United States Patent Application Publication US 2019/0348154 A1 - sequence listing, part 111

SEQ ID NO: 419825 - DNA, 1338 bp, Staphylococcus aureus
atggataaagacaatcaagaatcatatataagattaactgaagaggagaaagcactattagaagagcataaaagaaaaaagaaacgttggattgttagtattatcataattgtaattgcacttgtaattgctttagcgatttatttatttgccgtgaataagggaacaagtggtcaaattaatgagttcgataaagcagttaaggataaagattacgataaactaaaggagattgtaaaatcaggacaaaaagatatcagtacaacagatgctaagcattttgtagattatattaatcgtcctgaaaataagaaccggtacaatgaagaaattaaaaagatgaaagaatcattagaagataaagataaacaagattcagaagttggtaaagttactgataaaaatggtcatactattattgatgtaacaaaaaatggtaataaatttttagtgttaaatgatttagcattcgaacccaacttttatgatgtttacatcaaagaaggaaataataacgcttcatacgaatttgaaaataatggcaaaagaagaaagattgttagtaattctaatagccaaacagaactagggcaattttttgtaggcgattacaatgtagaaacaacaaaaaatttcaaagacaaacctttagatggctcagtagatggccaattacatattaatacagacaaaatggctaaaggtagtaaattttttgctgaagaaaaaatacctcaagcatggtttaaagttaaaataaagaataatgaagtgcttgataaaggattcaaattaaacattgatgataatgaaattgactatgataaaaaagaagtttatggaaaatacccagcagatgttccgataacaatttcggctaagggttcaggcaacaatgaaacattagaaacagaacaagttgaagttaaagctaataaaaataataaaccacaagctatagaattagcctttaaagatagtgatattaatagacagaagaagatgaataaagaaatagagaaagatgctaaaaagttcatggaagattatactaaaaagttaaatagaggatatgaagtttcagattttaatgccttacaatattgctttgaagataaaaattcagatgtagcccaaaatattaagaaacaagttgaatcgaagaaaaaatctaagttcaaaaagccagaaatccaatcatataaacgtgatgacactaacgtgaaacttacactaaagaaaatagataaaaaaaatcgtgttattacttctgaatatgagttgatatatgattacaaagaaaaagaattcaaaatcaaagattatacagatatttaa

SEQ ID NO: 419826 - DNA, 732 bp, Staphylococcus aureus
  misc_feature (677)..(686): n is a, c, g, or t
atggataataaaaataagtccattaataaaaagaactctagtaataaaaatcatctaaaagttagtaagaataaagtaaagtattttataatgagtgctaaagtatctttgattttgacgattgtatttgtggttatattgataactcaaagacagtcagactattttccaactttactgagttcgaatacagctctaatagctatattcattaaaattgaatgggacgagcataaagaaagagaaaaaaataaatataataatcaaagattgattttggcttattataatgaattaaaaaatatgcagttagttttcaaaaaaaataagtatcaactaaaggcagaaggagcagacatagaaacgatagataaaaaagtggaagaagctgaatggaacgaacagaaaatagaaatatattattacaaggctataaaaaaggaaagattaagaggattgcataatttaaaaaggttagaagttaggttatctaatcacgaaagattagagaaaagtatcaaaaaaatgttattagagtccacaatgacaataagtgaaagtctattaaaagcgttgtgggaagtacaagaaaattattataaaatatatataaaaccattaaattatgatgagttgaaaagaacattaaataaaacaatggtattcaaggattctgnnnnnnnnnnacaatatactaatgcagcgattagtgcaggtattcaaggattctga

SEQ ID NO: 419827 - DNA, 990 bp, Staphylococcus aureus
atgaaaaaaatattaggagcaatttcagcgacacttttaacaacaacattaataagttcaaccgcttcagcagaaccaaatcaagatgcagacaatgagaagcaacctgaattaaaagaagatgttatcacatacggcggtaatttaaacagtaatcaaaaagatgaagtgaaagaaaaattaggcgcagatgataatgataaatctgtagacgtaacacttgcagatgttaaagattttacaggtgtacagtatgaccatatatattcaagctcactgatagagcctaagagttttggaaagggtgttgatgttgaaatcgtaacacctgataacatcactaaaattacaaaagaacaatatactaatgcagcgattagtgcaggtattcaaaacgctaagatacgtgtagcgtcaactgtagagccaacaacaggcgatggtgcattaacaggtattgttaaagcttatgctaaagaaggcacagatttaagtgaaagtgacgctaaaaatgccaatcaagaaatgtctgatttagctaacattagtgatgaaaataaagacaaagaaggttactcagacgcagcgatgaacaatgcagtagctgatatgaaatcacaggtagcccaagaaaaagaagataatggtaatgtgtctgaagacaaagtacgtagtatagtagatgatgtattgaaagaaaaaggattagatggtgtggtatctgataatcaaagaaatacgatatataacattgttattaatgtttcaaaatcaaatgtgatgaataatgaccctaaatcatttatgaaacaattagataaatataaaggacaactagagaaaaatcatggagatttaattgataaagccaaagacaaagcgaaagatttaaataatgaagaaaacagaaatctattacaaaaaatagttgatttcttcagagatatcattaatgcgattatcgacttcattaaaggattgtttaattaa

SEQ ID NO: 419828 - DNA, 342 bp, Staphylococcus aureus
atggatattgagcttataataaaaatactagattcagaaggtattgaacttacaagtaatattgatgaggctatatatatactagcagacggacgcatggtatcgggaatgtttgattgtggtgttagaggtatagaccatagagttatggaaattctatttgaagatgtggatagagattcagaaaacttttgggacgaggttttaaatagagcatgtttagttatgtatgtaccagaaacaaaaacagttttgataaaaagaaatcaaaatattactgatgaacaacttaaaatcattaataaccttgaaaaccaaaagcacagtgttgaatatttctaa

SEQ ID NO: 419829 - DNA, 447 bp, Staphylococcus aureus
atgaaaggaaatgcattagtttatatttgttatggattactaggtgctatgtttattttaattataatatggttttggataaatatgttagaacacttaaataacgatttcaataaaacctattcgtcttttgaaaaagatactaaggtaataaaaggcgaagttgtagaagcgcaaaaggaaaattcaattataggaggaacaaaatatcaattaattgtaaaaacaagtccagaccagagtcagttaattgatgttgatgaaaagcaatatagagactatcaaaaaggttctaaagtacattttagaatagataaatcagatgataatagtgtactactggacttaaaaaaagaacgagattttcatagtaaaaaagattacgaaaaatatataaagacaaataaaaaaggtatctttagcttttcatatattatgatgtattaa

SEQ ID NO: 419830 - DNA, 249 bp, Staphylococcus aureus
atggaaaaaccttatgataaaattattgccaatttcaaacggaaacataattatattaatgaaagaaaagaaaaagagggttacgatttaaataaaagtgacatgacttgggcaacagttttagtagcttctctggaattattagaaaaagaaaaaatatctatagaagacgctattcagcatttacacaaagagattaactttagtggcaaagactatgtagacaaacactacagaagcggtaattaa

SEQ ID NO: 419831 - DNA, 822 bp, Staphylococcus aureus
atggaatatgattatcaaaacaatctcaacttgatgaaatttattaaaaagaacagtcgaagaaagaagattttgaagaatcaattgaataatatattagataaggctcaatatatattagaaactaatccaaatagaatatatgaacaacaacaccctatttttagctacataaagttatttacagatttaatacaaagcaaattagctacatcagttatgatgaatggtgttggtaatgttcatataaaaaatggaaaatggtttaataccgttagtgcatatatgaatcctattgataatattttcttgcaagggaaattttcggaatccaatttgtatacgggggtgaatttgaaaatatataatgacagagaccctatagtaactcatgtttggagttcagataggttagctaatgcaattagaaatataggcaaaggtatgatggataaaagatatatgaacatagatataaaaaaagaacatgcttttaaatacgatgagttaaatcataagggggaatatatatatccactaggaataacaaatatatataatggtaatcattcaataagtgcagggcttaataaatctgaaggtaacgttataattgatgaaatagtagatataagtgatttatatgatagatataaatttgatggaaaatatttaattaatcgagaaacaggaaagaaagaccaaatatattttgagtttggtgttatctttgaaataggacgtttgttgttagagcataaacatatatttaataaagaaatacaagatattattgaaaatcaaaaaacctttgagttttaa

SEQ ID NO: 419832 - DNA, 339 bp, Staphylococcus aureus
atgaatattataaaaagaacagtagatatcgtcggtagagtatttggtattaatttgtttgtcatgactttgcttgatagaaaattaaaatcatttatgtatttagtagttcaaatattcatgacaatgttttcttcagtgattttaattggtttgcaaagagttttaggtatgggattaaatcatcttctcaacaacgttaacaatatagaaactaatgccattgcctattatgcgattggaagtatatatgctatagttatttttcttttaataccattagtatatactttgccatatttttataataaaaaggcaatgaaaaaattggttaattaa

SEQ ID NO: 419833 - DNA, 162 bp, Staphylococcus aureus
atgaaaaggcaagaaagatatagccgaaaagagaaaaacagaccactaagtaaagatatcatcaaaatcggcataggaatttcaacagtgttaggaacaacaacaggaattatcaacggaatagacgcactgataaaattatttaaacatcttatacactaa

SEQ ID NO: 419834 - DNA, 207 bp, Staphylococcus aureus
atgactttaaaacaaccaaaaacaaatgtagtagtagaactcattggagaagacggtaatatatttaatttagcaggaaaggtatctaaagcgttaaaaagaaatggttacacagaatatgctaaagagttacaacatgaattgtttcaacaagaaagctatggagatgctttgaatttactcagtgactatgtagaagtcaaatag

SEQ ID NO: 419835 - DNA, 831 bp, Staphylococcus aureus
atggaaaaacgagaagatactagaataaactcaattgaaattagaaatttcatattagtaggattaatgattgttttttttatgttttcaatcgtattatatggtagttatacaagaatggatttgaagatttggttttggctcatcactatatttacaggtacttttattgttagtttttattatatagctggtagtataaagtgttcgatagaaagcattcataagggttctgtaagcttaattaaatcagtattgataatcgttggcgttttgttatatgagcaaatacaggcgaatatatggtctttgataacgcatggagaagattttaaagctacagaagaagtagctaaaaatataaaattaaatataccatttttctatgagagtagcgttattgtacctattcttgaagaagtgatgaatagggcagtaccatttattatatgtttatgggtcatattacatctatttaagtgttttaaaaagacaacgactgtgtcagatgtttataagataagtttagtgatttatctaatcacatcttcagtaattttttcgtcaatacatagtcatgataattggggctcgtttcttatatatacattgagtgggcttatttgggcaatagcttacgtatggtctaaaacgttacttgtacctatagttatacatatgcttaataacgcagtatctagtttaggtattgtttattctaatcgtattaacgatgatgtatcaatctctaacactattatagaaagcattatattgttagtattgattacttgtttaattgtttttgaaaaaaggggtagtaataaatga

SEQ ID NO: 419836 - DNA, 1053 bp, Staphylococcus aureus
atgaaatctgaagtgaagaataaattaatagatactgttaaatgtgagtggattgatgatattaagcaaatgaataatgtagatgatataagtaatcagacacaacattatttagagatattaaaacatttagaagaactatactcgaagaatgataaagaagtagaaaacggtgtaagtaatcaaagagaccatttagaaataaatggagatacagataatttagaagatgataatgtttatatattaactagaaaattactcggtggattaggaataaaaaattctaatagtgaagatacagtttatgttcccgaaaatgtgatacgttcagaaaaattagaacatggagatagttttatatatgaaaaaaatggtctgtctattggtagagataagtttaataaagtagaagaaatatctaaagcaaatattgaaagtaataatatagaaagctatgattatgcagttgtagattttgatgacacactcaaaagttatgtttgtaaaagttattataatgatggcgtgttaagtcgtttgccaacgttcttaatacatgctaatgatgtgagtaaatacaaaatagaagcgggagatttagtgacaattgcacacatgccaaataaaagtattgtgcgtatacgttggaaatatagtgtgaatgagccgatacctacaccaacacctaaaaaagcgtcgttttataaagatagcacaatatctgaagaaaataacattagtgatgagttttcaggaattagtattggtatagtaggtgcagaaaaattcagtaatggttatatagaagaagttactaaacgtggtggcatggtaaatcaaacagattcagatgtgttcaatatcatagataatgtggtaaacaagtcggatatagttgttataccagtatttcagacaagtcatgctaaatcattgatggctaaagatatagctaaaaagaaaaataaaccatatataattttgaagacaaatggacgtacaaattttatcaatgaaattcgtaataatatagagattattcaaagataa

SEQ ID NO: 419837 - DNA, 270 bp, Staphylococcus aureus
atgaataataaggataaaatcaagataacattgatttctcttttatttatagcagttattttgttcttgttatttctatcattctttggtggatatagtgtgtttttatcaatgttattaggtttatccacgcatacattaaatgcagtaacatgtattataggtatatttattattcagattataggtgtttgtgcgtggcgtgtaattaaaatggctttttataaatataaagaaaaaactggtttcaaaatagaaaagcgtaaataa

SEQ ID NO: 419838 - DNA, 762 bp, Staphylococcus aureus
atgattgaaaaaaaagaaaaatttaataaaacatataaaatagtaaaagcgttagaaagtggactttatcaaaaatatcttgatggagatttagtattgcaggatatagctaatgaatatggagtgacaattcaacatatagcatcaattataaaagaaaataacataggtaatcctaataaagaaaagaaacttcatagagatgaagaaagaaaattaataaaaagagatatagaaaatggtttgccagtagattactttaagcctaattataaaatatttgaaaacgtttctagtccaattaatgcttttaacacaatatcaagatgggttaaaaaagatgaatttcacacagacataccatatataacattatctcgtttaaataaaataatactaagtgttaatatcagaaaatatgtagaaagtaataatcatttacctaaaagtaaaaaggaatcaataagagaaatagcagaaagatttaatgttatttatactaaagttggtaatattgctagtcatataaaaaaagatacaaataagcttttaccacaaaaagatgatgaactagcaagaatagtcctaagaaacttaaatatagtagaagaagtaaactacagtaaatccagtcatgaaaaagcaattgctaaagcagctaaaaaatttaatgtggataaagatataatagtaagtatattatcttgtgaagcttacgcaaaaggagctaatttagaagaatatatagaaagtcgtaaataa

SEQ ID NO: 419839 - DNA, 180 bp, Staphylococcus aureus
atgggagtaattatatttttaattgcatttggtttacttaccatgtggtatgccctacatgtaattatctataaaaattatagcactgttaaaaatatattgtttttcacgacatcatctataatactgtatacaatactatcttattgttttgtggaattgttaaaatataaattataa

SEQ ID NO: 419840 - DNA, 402 bp, Staphylococcus aureus
atgcttgatgaactcaataataaattattagaagagggatatgatactcaattagattatgaaggtatatatatacctaaatataatattgatattatcattgaagattactcatttattataagaccatctaattctgaaccaatagtagtaaactcagttgaagaggctgttatgtgtattaaagatttttcatacagtatagaatttagtgaagaacttgataaaaatcattatctttatcatcaagaatctcctagatttttttcaatcggtagtgataaagttaaaatcattgacggtcgtttttatttagaagatgaggaaggagaaacaaatatatttataaatattccttctataatcggtgctattcaatcaaaaattttgggagaaaaataa

SEQ ID NO: 419841 - DNA, 453 bp, Staphylococcus aureus
atgtctaattatacaaagttaactgatgaatttggtattgaaaaagttaattcagtatttaatgattcttacaatgaaattagtaaattactttctccatctaaaataaaagaagcttttaatgatttagaaggggattgggaagatgattatagcgaaataaatgttatggtaaatgatgaagaatttttcgaattactagattgttctaaaaaagatattgcatcaaaagcaatttttggagagtacaatccacatcatgaatatgttattttagatggatatgaaaatttaaagtcttatgatgaatctagatacaataacttattaaaagaatatgctcctaatataacaaaagaatatttagcaaaagtcactaaaaatgaagttgatatatatgatgatatttttgatgaagttcacgaaataattaaagaatatggttataattaa

SEQ ID NO: 419842 - DNA, 624 bp, Staphylococcus aureus
atggctaacactaaaacacaaaaaatattaactatctcaaaaacaaaaagtgagaacatcacaaactggtttgtaaatgatgcacagtggaagttattagctgaacatttagatttaggtaaaacagccatcttcaaatataagaaacttatcaagaccaaaactgaagaaaagaacgcactttatgcgttaggagatatcttcaccttgaatcaactaaacactgtcattgagctatttaacgacactatagaacaccctgaaaagtataaaaaaccgaagaaaaaatctgacgtggatttaaaagcacaatccgatgtgattcaaaaacatacgaaagatatgaatatggattatttaggctatcaaacaaagccgacggcaactgaagacaaagccgaaacggaaaacgacaatcaagaagaaaaacaagcgaaaaaccctaccaaatcagatgttatcgctagacacaatgcagaaagccaagcgttaaaaagagaaatcgacgcattacctaaagatagccaagaacgaatggaaaaagaacgagcatataagcagactgaagccgatagaatcgccgaattttgggacgcacaaaagcgagaacaagatgataaatag

SEQ ID NO: 419843 - DNA, 216 bp, Staphylococcus aureus
atggcagaagatacaattaaagtaaaagatgtattagaaaaggctaaatcaaaaggtaaaggcatggaatatttcggtgtgcttggattgaaagagtgtatggatatcaaagataaattagatgagttaggtgtagagtacaaaacaacagcagttgctgaagagggagacttaactccatatgatatttatgtagacgtgaacacctacaagtaa

SEQ ID NO: 419844 - DNA, 231 bp, Staphylococcus aureus
atggtaagtttacaagatatgttcaaaaaagcagaggagaatgtgcaagacagattagacggactaccagtatttggtagttataaagagatactgaagcaaatactaaatatagataaccaagtgtttgaaatgttatacgacgaagatacagaaaattcaagtgactatgaattagaaaacgttgatttggtagcagtacatgaaagattagcacagtttcaaaattaa

SEQ ID NO: 419845 - DNA, 333 bp, Staphylococcus aureus
atgaaactgaaaaatatcaataattacactcatcaagaattaagagatatccttacacaagcaaaggcttatatgcagtttaaaggattagaagaagtagatattacattagcgaattatcaagaagagttagaagatgagcaacattattatgaaatttatcaatcattcctcacaatcgaggaagatacaacgttagaaaaagcgttagagatgcaaattgaaacagaaaaagtggttaaagaatacaaaacaaaacgaggactaattcaagcattcttaaatgataaagatgtaaatggagagtattacagaatccatacacaattataa

SEQ ID NO: 419846 - DNA, 171 bp, Staphylococcus aureus
atggatattagaacgcctacagatgcaagaaaagatttttatcaattattaaaaagcgtgaatcataatcatgaaccagtgtatattaaaggaaaatacaaagaaagtaacgcagtgattataagtttgaaagattggaacagcataaaagaaaagttgaagcatgaatag

SEQ ID NO: 419847 - DNA, 2058 bp, Staphylococcus aureus
atgatggtaaaattaccaacattaaaaaagcgagaatcaaaatctaaagataaattgaaagaagctaagaaaaaagaatcagatattaaaaaagaaaataaagagaaaaaagcgaagaaaaagaaaggaaataagaataaaactaaaaaacaaagtaaaagagctaagaaaaaagaagaaaaacgtattcgagatttaggaacagaatatgcgccaagctcagggtatgtatcaaccgcttctattatgaagtcaggtaacagatacggtacggtatttaagctgattaataattatggtatgaacagaaaccaacaattaggttgggcatataagttaatcccacaaattaatgtagaaggtgtacgaggttatttatttgtagaaaccactccattcagtaaaaaagaacaatctcactactttaaaaacgtcgtaccagaaacgcaaaaatcgtataaaacgaatgaaacaggtaatgttgattcagctaacgacgagaagaaaagaaaagcaagattacaagatatagcaattgcagaggaattgcatggtgaagaaaatatcgcattagatttacacatacatgtcctaattgtgggtgataatcccgataatatagaagaacagatacgtcgattgaataatagctataataaacgtatcaatggtgtgaagctaatgagtgtagcaggtgttcaagaacaaatgtttagggaacttcttttagctaaagaagggaaatcttcaaattatacaatgatgagtacgttatatggaggctttgaccatgtattaagacgaggacttaatgacaaagacggtttgcctgttggagaattaagtgattcatataccaaaggtcaggcttttatggcattgaataatacgtttaatagacgtgttgtggttgctagtcacaaagaaagttatatcaaaggctttagtcctaaaaagtcttcctcgtcattgtgggggcaattaatcgctaataacgctatgatgtatggtaatcgaacattccatattgtccttaacggtcatagatattacggagatatagatagaacacatttttcttgcccgccaagtttaaataaaaaacttcaatacattgatttagggaaaggtggtcttaaccctattcaaatgtttggagatactcggagaaaagatgataaagcatatattactaatatatttgataataatctacaaaagttatatcaaatggtttatttattaggtggacgacgtttgagcaccgaaagagaagatttaatcacattgttagagaaattctacaaagattcaaaagtatggaaccgagaccaccctttacgttctcgattaattggtattagtgagcctgagacagttaagacaatgggaagtttcatattaacgctcaataactatcaaaaatcagtaagggataatccaacttcaactgaagaagaaattaataacgctaagcgtttatatcaaaccgtacaaagtgcattgaatacacacagccaattatttaacacagtaacaacattacctagccataaagataatagtaaattgcaatggtactatgatgtatcaagtattaataatcctgatgtaagagaagcacaatttgttaatgcgtttgattattgtacttatacagcagcacctaatgatatagtaatgattcatggtgtcgataaaatttcagttgagaccttaaaggtacttaaatcaacattagaacaactttcagaaagaggcgtacgcttagcctatctatttgatacggttggttcgggtgaagtcaaagatgatgtattaaaagcagatatttttaatacagacggcattttatatcaagactttgagcagcaatttgattactctatattaggtacaatgtcgcaatcagacctagcgcaatatgagagcaaagtcagacagcaattaaatactgaattaagaagtgcattgataagaaataatccagtacagtatcaaatacgacgtacaggcgatttaacatctaacatcattagaggagagtttatattataa

SEQ ID NO: 419848 - DNA, 882 bp, Staphylococcus aureus
ttggctgataataatgaaggtggtcaaccaaataaaatatatggttttaaagctaactttagacagcgtaaaacagaagttgaattgcgtatagataaagtggatagatttaacattccatatacaattattcccaaaagattgattcgcgcagccttaatggtagcagtattaataattacaacaggcttcttcttactcatagatttaagaagagcaatttatataggtattcctatgcttttaatggttatatcattattgatactaatagggctatacgcctttctattcccagctttcgggtcattacttgaaattagtattaattttataaatcatttgataacaagtagacaagtaagaaaaggtaagaagccacgttcaaaaaaaacaggatttaaacgaactagaaaagatggtttgattagatattcgagtggtaaagtagctcgtttagccatgttagatggtcgaacatcaaaaacagctttcccaacagaaatactcatgcaagaaggtatcgcagcagcttatcatacgtctagaaatagagaaataactgaaaatatcattacaagttcacaacgacaaagtacagaacttcaattagaaaatatgcgtgctttagaagaaacaaatgaagatgattcaattaaagaattgattaatctacagcacacatacacggatagaataatagaaggacgagcaacaacatttgttcaatatcttctaatgattgcacctgacgaacaaattttagaagaaggtattgagaacttaaataattcagtcgaagaaggactatattacaatgtacaatttctcgataaaaagagtacagataaggtgctatctgatatcaaaggatttaagtag

SEQ ID NO: 419849 - DNA, 2118 bp, Staphylococcus aureus
atggctaagtttgaagacttaaagtacgacagtattaaaaatgcaaatgatgttgaaattccttttgtcatagtatttacgtatttagatgaatatgttgaaacatttaaaagagaggataaagcatggagagcatttgaaaagcaatatcaaagcgatagaccgaaagaaaattatcatcatatagaagatgtctctatagatattgatgatgaagaggagccttatagagataaacctgtagcagttattactaaagaatcattaagtgctatttcagaaaatgacaaagcaacattagattttggtattcgtgttgtagataatgaaagtaatattgcacgtgtgtttaatcaagaaatgctagattattttcaacttgaatatgttatccaaaaaattgaatttgatgatgtagaatcaacacttgaaaacatcatggaacaaaccaaacaattgtctacagttgcaggtaaacaaaatgaaactaaagaaactcaaaaagaaaataaagttcaagaattagcatcaggtaacgaagataatcataattcaaagacagcaaattatacagatggtacagatgatgaaaatgaagaaataaaaaatgatgaccaagaagaagagcaaaatactaatatagaaaaaatagaaaacaaaaaatctagaaagcaatttaataataactctgacgacaaagaaattaatggagaacaagaagaacaacatgaacacaatcccacaccaattaaagaactaccccaaaaaacaactcaagaaaatgctgatataacagaacaaaataaacaacatatttttgatttaactcctaaagaacctgaaacaccaatggactatgctaagcaagatttacttcatgagttatcagaaaaaattaatccaatacaacttcctagattaagtcatattcctgatgatacgttagggaatcttagtgattcaaaatcgtatgataaattcgttgcgctcaaacgtattactgaagataagtttgaaaagcgtacagaatcagtcgaaaaatcgcttaataatattcgtcgagaacgtttaatgaaagtaaataataaattagttagacgattaagcattgaaaatgatgaattactaaggaaaagtgattttacttcagaatattctccattcaacgaaggctataaaactttaaaatcgcaataccaagaaattattgattcattaccagaaactaagtatgaagaaattgaaaaaaataaacataagcatgaaacaagtaaaaaagcatatgtagaaagagcagctaaaacagcagcagaagaatttgaccaaaagaatttacatttaattgatgaaaaagcacaatcatatattgatgaaatcaaacaaagtgctgacaatgaatacaatgataactataaaacattggaacaagatgctcagaattggaacgaagaagatattaattatttaattaaacaattccaagatattacttacaaagaaattgaaactgataaaaataatcaaacacttatcgacaaaaaagtgaacgaacgtacattagaatatccagaattccaacatcaaattgataatttaaaacaagaattagaacgagttaataaagaaaatgataaagcttacgaagaccaaaagaatttagagagagatttattaaatgagcgtaagaaaaatgaaggattacaacaatcacttgaaaatcgtagcttagattttacgaatgtatctgataattaccgtgaattacaaaaaattatggctgaaggtaacgttgaaaaattacaacgtattatcgagaagaacaaaggtgaaagtatgaagccaaccttaggtgaaaaaatcaaaggtgtaggtaatattattgccgcagctattattgcgattgctattattattgcagcaatactctttagtggtggcaaagcagatgaaaatgcagtatctcaaagccaagttaaaacagaagtacaaaaagcagtagataaaaatgacgaagaacacgcaaaagaccaaaaagcatctgatgaaaaaattcaaaaacttgaaaatgacttaaaagaagctaaaaaagataaatctaaaaaagatgataaaaaataa

SEQ ID NO: 419850 - DNA, 225 bp, Staphylococcus aureus
atgagtgacaactacatcaatttagatagagatgaacttatagcacatgcactaaagatattgaacaacaaaaatttaaagggcacttatatagctcaagaattaaaaatgaatcaacgacaagtatataactataggaacggtagtaaagatatagaaaaagcacaattagaaacgttgattaaatttgaaaatctatatcaaagaattaaaagtcgattatag

SEQ ID NO: 419851 - DNA, 294 bp, Staphylococcus aureus
atgctagacccgattgttgaaagaatacaagcactaggaccagaggcaaaagccgttattgcggctgttgttgtacttgctggaattatctttgtcgcaaagccggttataaatagtgttaaatcatttagtgatgctaaatggttacaaggtttaatgtggggtggtgcagccctagctgttgttgcaatatccgctggagccttagcaattgtatatggctggggtaaagaacttggtagcggcatggaaggcgaactaagctttatcatgatgcaaattcaaaattattaa

SEQ ID NO: 419852 - DNA, 456 bp, Staphylococcus aureus
atgaaacgtgtttatattcccaatattaaaaagtacattgaagttaatgatgatgattttgataaagtgagtgcgtataggtggtatatcacttatgctcacggaacacagcgatgtttagcatatattaacggcaaaaaaatagcattaccacgctttttaacaggtcaaattaatgcctatcaaaagtgtaaaaatttagattttactagaaataatataggcattgatgagaacaaacaccgttatagaaaacctcaaaaaaatagttctagtatatataaaggcgtacatttatctaaagaaattggcaaatataaagttagtatcaatgttaatggaaaacatatttttttaggcagttacacagaagaaaaagaagctgggaagcgctataatcaagcagttatagagtatttcaatggcaatggatatatgaacgaaatagatgagtag

SEQ ID NO: 419853 - DNA, 1446 bp, Staphylococcus aureus
atgaacaaaaatttaaaaactagagtatgtaacgaaaatgataaaaaacatttaccgtttcttaaaagttacaaattcctatttcaagataaaaattatcaagccttaccttatcaatcaaaagcaatgtatacgaatatggctaataaacaagtgcgtgttctaaaatctgatgctaaagatttatacattgataaaaacggtaaaccttttattacttatccaattattgacttagaaaatgaccttaaactttcaaagtcttcagtcaaaaaatataagcgtattttggttgaatatggacttattacaacgactaataacggcaaaaatatctatgtgaataaaccaaaagtatctgataattctctaacttatgataacggtaaaaagttatcttatttccatatgccgaaattttttgaaacaaatcctaattataaaaatgcgtctttattaacaagattagtctatacattacaaaaagaccgtttcacacttacgttagcaaacgtaacacctaaaaaatcatctagctatattgatgaaagaggtcgtgttttctgtatctatgccaatcaagaactcgcaaaaatgttgaacgtgtgtgaacaaagtattatcagagctaaaaatgaattagaagcattaggtttacttaaacaaagacaacaaggagtgaataaacctaatcgcttatatttatatacaccattgcgtagtgaacagctaacaactgaagcatttttagaagaaactcaaaccgaagaaaatgataaaaattatgtgcttgtaccacctgaaaaatcaattgggggtcgcacttacaagagggtagggtttaaatatgcagtcgacaagggtttaaatatgcagtctaataatacagttataaataacactgtcttaaataatacattaaatactatgtattctatgtatagtatgtacaaggtaaataattatgttaaagattcaaacaatacaaacaatgacttagaacaaactaaaaaagaaatgaaattaaacccttataacttctcaaaagaattaactcgttatcttatgaacttctcatcaaatgatttaagtattgtacttaaaaaattggctaatgctaaaaataattataataaaaattatgatacgcattttgtacttgaagatattaacgatgaattatttgatatgataaaacgaatcaatgaatttaaatcatatgaaatcaaaaaaattgaagaaaagcatgataactgtgatgaaactgaagaagaatttgcaaatcgttgggatagtaaaattaaaaatgttattcaaaatttaaaaaataaaaatgttgaatctgaatctgtgaaacatgagcgaaatcaattaaatgttattaaagaaaataagtctataactgaagtagtaaactatcatgacgaattaggtataccgtattaa

SEQ ID NO: 419854 - DNA, 318 bp, Staphylococcus aureus
atgataataaataacgtatcaaattatttaaacttttttagaatagcaaagcccagatttttaggagggtttaaaattgaaggaatgaataacggaatctcagtaattttaaacgtgattagtttaactgtttttttaggttatatcataggaattggattggctataaaattgtttacttttataagtaatgagagtgagatgtatgcatggattagtgcaattatatctatagtggttattagcattgttttacatctatatgtgaaatggcttaatcaatatgttcgaaaaaatagcaaaagagactttaactaa

SEQ ID NO: 419855 - DNA, 729 bp, Staphylococcus aureus
gtgtataaaggaatcgaatgtaaactctatccaaatcaaaaacaagctgaactgatacaaatgacctttggtcatacacgattcatttggaatcaaatgttaggtatgttaaaagagcgatatcaaaataatcctaaccttaaaatgttatcttattcaaaactatcttcattaatccctcagttaaaacgggaatatccttggttaaaagatgtagacagtgtcgcgattcaatgttctgttaaaacattatctgatacatttgaccgtttctttaaaggggtttgtcgctatcctaaatttaaatcaagaaaacaaacggtacagtcttatttaagtacaataagaggggagaatatacgttttaatggcaatcaacgttatgttaaacttcctaaattaggttgggttaagtgtagaatgagtgtacctcatattgaaaatgaacgtatcaaatcagttactattaaacaaaaaccaagtggtaagtatatgatgtctgttttagttacaagtgaaaatcaaactttacctaaaacacatcaaactgtaggtatagatttaggcgtttctgattttgcgattacatctgacggtcataaatatcgttctcaaaggttgcatttaaaataccaaaaacagttacatgtttgggaaaaaagaatggcaaggcgtcgattacgtgccaaagctgaagataagtcattgtcagaatcaaaaaattattag

SEQ ID NO: 419856 - DNA, 423 bp, Staphylococcus aureus
atgattattaagacaagaacgaatgtgtatgattttaattttcatcttgtatgggtgactaagtatcgtgcttcagtttttgatacagaattaaaacgtaatgagatgaaacggatacttaaaaatatatccaatcgttacgatatcactattcaagaaatcgaagtgatgccagaccatattcacatgttattaagtttcaatcccaaacatgccccaagttctattgttaaaacgctcaaagggcgttctgcgagagaatggtttctactatttcctgatacgaaacaacaactatggaacgggcacttatggtcacctagttttttcatgtctacacttggcaatatgtctaaagatgttgtagaacaatacattcaaaatcaattgacagagtacaatgcaggtcgcccaagacaatga

SEQ ID NO: 419857 - DNA, 258 bp, Staphylococcus aureus
atggatagaaaaatatttatattaatatttagtaagaaggtaacagggtatgagatatctcaacgtacaggtattaatgaagctactatttcacaggttaggaacggtaaacgtctgatagaaaatcttactatcaaaaaaggactagcattagaagattgctatgatgaatatgagaaagatggaaaaatagaatatcagcgagattatgaagaagcacagaaaaattataaaaaaataaatgttgatataaactaa

SEQ ID NO: 419858 - DNA, 294 bp, Staphylococcus aureus
gtgaaatcgaaacaagttatcaaagattcgatgatatatgcattagttacgataatcatttcaacacttgtttgtatgtatataatgaaaatcaagttgaacaggacgcaagaaatttatgataaatatgaaaaattaggtattccagtaaaagaaaccattaacaccaatgtgcatggtttttggggattgttacaggttactatgagtgattggttatgtattacaggtatattttcaataggacttattaccttcctagttatgttaaattataaagtatttattgaatag

SEQ ID NO: 419859 - DNA, 591 bp, Staphylococcus aureus
atgtcaacaaatccttttattatggcactaggtatgtatattttgattacattgtttatatacatatctattaaaataaatagctacaatataaataagaataatagagcagtaaagaacgaagaaaagagaattaacataaaccgtcaaagtacatcgaaatcaatcaatgatgtttatcatattggtggcattacatcagagcaatttatattagaattgttgagcacttactcacttgattatgcaggatatagttatgaagaattatataataagaaaacacaagtagattatgatgcatatgatttatttgatgtattatgggtattatttggaacgtttgatgagatactggaatgtgactatgtagaagatggatatggaacaatgaactataaagaagttcaggttcgatataacgctaagaaagaccatatgaaaatagatatggcagacctaactatcgaaggtactatcgaagaaatggcagcttttagacacaatccattaaaaaattatgaaatgttagaccctatatcagcgtcaaatcatatagaagattatataggagaaataaatataaaataa

SEQ ID NO: 419860 - DNA, 384 bp, Staphylococcus aureus
atggtcgaatttgaaagtgctaaatcttttagtagtcataaatacgataagtttattagcaatgttgatgaacattcagacaatttaaaacgttgtgcctcaattatttttcaattagaaacagataacacgttaaatctagatgacaaaaaccaattaaaaaatgaattaggttctattattgataaaattaaatctgataatcaaaatattattgatatgctggttactgattatcaagtttatgatgcaactgaacctagacttcatcaaaatttaagcggtttccaaatgctgaaagaaaaggtagcaagcaaagataagaacttcaaattatctaaagaagaagcggaaaacgatagctcattttactatcgagattaa

SEQ ID NO: 419861 - DNA, 1362 bp, Staphylococcus aureus
ttggaaaaaaaatcccatactcggtcaagagtgttgagatatataaaaataatgtgtggttcagcattaattgccagtacatgttttactacatacgaatcatctaaccaatcacatgtagccaaagcaactaatcttccagttatagatacacagcaaggttgtacagtgggaggagataaggatagtaaaacgggtaaagatgatgtttcacctaaagaccaaaacattaatatgaaaaaatataaatcaacattcgagaagaacgctaagggtgggaaattagaaggtaaatcaatgaaaatacttgatattgctgaagaagaaaaagtaccacctttacttatgatagcaatcattgttaatgaatcaggttggggaacaggcgcaaatgccatgagacaaaataacccattatctgtaatggggaataaatctattggagattcaacttacgatacgatagaagaaggattacatgcaggtgctaaaaatctttatgaaggttacataaaaaaaggtctagatacacctaaaaaaatcggccccaagtatgcgccagtcggagcagcaaatgacccagataatttaaatgcgaattgggttcctaataatgaaaaagtaatgaaagatttaggagctgaagatattaaatcatcatcaagtagcaaagataaggataagaaagatgatagtgatgaagagggggcatcttcagccgatacatctaatgattcagtgcctaaaaatccatgtggtgaccaagataaaagtagtgatgatggtggtggaaaaacatcaggggaactaggctcatcaactaaagctaatggtaaatcaggtaaaaaaatagaaggtaactggacttatgatgaaataccagaaaaatataaaaaacatatagagctacctaagtttcaacctaaatatcttaaaggctcaccatttgtccaatcaggagatgatggacaatgtacagaatttacatgggcaatgatgaatcaattgtataagaaagaccaaccagcatttgatggagttacgaatggagatagtgtatatcaaatatataaaaagcgtggtgcaaaaacgacacataatccaactgtaggatatggattttcatcttctcctccatacgcattagctcaaataccaaatgttggccacacaggcgttgtcgcaggtgtaatgaaagatggaaaatttattattgcacaaatgaacgtagaccctgacccagcaccatcaagaacggtactttattcagtcatcgacggtgtgccaaaagatgcaggtaatgaattaatattctttgaaggtgtaggagaacctaagaaagaatataaaaaaggaaaataa

SEQ ID NO: 419862 - DNA, 537 bp, Staphylococcus aureus
atgaatcctaaaatgcaatatgtattgatggcttgtctagctatcataatcattgggttaagttggtatggtataaatcaaaagcaaaaagctgaaaatttaaaagaaaaattagaagacaatccaattacacaaaaaaaagaaaaagaccaatcaattacttcaaaagatgtagcaaaatatcaaaaagtagcagaaagtaaaattgatgactttttgaatggtgattataaagatgatgatgtctttaaagatggaacagcaggcaatacgttgtataaactatttgttccttcaggcatgaaaggtttaaaagaagatgctactaaaaaggattttcaaaagagatataaaggctatagttataaattgaagaatgtaacagctcagaaagaagatgatgattcagtcttattgaatgctaatgtagaagttaaatataaagatgagacagtagaaacaggttatgagcttatttctttaagaattaatgatagcaaccaattggaaggaggaacactatatgccaaacaataa

SEQ ID NO: 419863 - DNA, 594 bp, Staphylococcus aureus
atgccaaacaataactctcaaacagataagtatgaagaagcttatcggctaagacgtaatgtggtaacaagtgtcctcttagtaatagctgttatagtgtgtatattcgcttatcaacaacatgctaatgttaaggatatacaaagtaaagttgataaacgaatggagcaaaatagcaagattaaacaagaaaataaaaaggtagaagaagctaatacgaagttgaaaaaacgtatcggtatatatgatacagaccaatcatctaagaagttttacaataaattctttaattggtcaacttggaaagaatatatgagtaatatgaagcaactacaagtcctttatcctaaagtagaagaaggtaaagtagttaacattaaaggagacaaaagaggagctggtgctagtccagaaagtagttatactagggatagctttgtaggaacaaaagatagtcagattggtgatattgttaaacaaagtaaagcttatcctgatggtaaagaaacggaagcaatatggtatataatatctgattacaaagatgataaatacaatattacttatatgaaatcctaccgagaagctcaataa

SEQ ID NO: 419864 - DNA, 354 bp, Staphylococcus aureus
atgtatgaaacggcggaagaaatcaaatcaagaaagttagaagaaattgcagattatcaaatgatagaagtattccgattattagctgaggcaacagataaacgttgtttagtacatggtcgtttaagatatttagataaagatttattaaataaatgtgtggatttaatcatgatatatgacaatttgaatacaagagcagagctttgtgaacgtttggatataaccaatgtaacaataagacgattaattggtaagaatgaccatcaaacagctaaccgtctcagtgtagataaaatcatacaagttatgaatgatatagcagataaatttgaaaatgaattaaaccaataa

SEQ ID NO: 419865 - DNA, 612 bp, Staphylococcus aureus
atggaggttttatctatccaatacaataagtcacttttaaacatatttaaaatatggtgtggtactttccttatatctggaattgtcttcttaatccaagaactcgtaattatgtttgctaatgaaaagacgtatttacctttactatttgaacgtaatacgattaattcaatattggttatttccttgattataactattgctttatcctttatctcgaccaatcaatacattaacaattacattaagaataacaatgtgaaatatttattaatcattgctaaattcatcacttatgtatgttgtgtgttatttattttaacaactatatctacagtaaccatcgcatttttaaatgctaaaaatgtagattctatcaatggtaaggttaataaagtacaaaaggtttcatctaataaaaatggtacaaccgtacaagttattactgttgaggattcatctaacaataaattaagactatatcctagcaataaaattaagaattttagtgttaataagggcgataaaatcaaaattgattatcttccttcagcaccgctaaaatcaaaagctaatggaacaatcttaggttattcatcagtatctaaataa

SEQ ID NO: 419866 - DNA, 282 bp, Staphylococcus aureus
atggcatttcaaccacatgataaagaccataactctaaagtgcaagaaagtttaaaatcaacgaatgtagatagatatcaagacaaattaaaatctacaaatgcaaatatatcttctgacggtacaattcatgttcccaaaaaagacccaattgaaaaaaagaaaaattatacgttttcacttctaccttcagttagaaaaaatatcgaaaaaatggctaaagataacaactatgaatcttcaagtgaattgttaaatacattattcaaagaacagaattaa

SEQ ID NO: 419867 - DNA, 813 bp, Staphylococcus aureus
atggaaaattcaaaacaacccgtattcttaactgtacaaatgttaaagggtggcgttggaaagtcagttatcgcatttaactttatgatgtggttggcaattgaaaaagataagaaagtgttaggtattgatttagatgaaaattgcaacttttctcaagtattaaatgtatatgaccaagaaggaactgttgcaaatatacttgaaggaaatggagacgtaaaaatccatcaaatcactgaaaatgtagatttaattggtggatttaatagacttcatgatgttcaagaaaatatcgcaacgagtgagaagaaaacaatgatgttgtatatgtggttagaagataactatgaccgacttaatatcggtcaatatgattacattattattgatactcacaatgatttcggcacagcaactaaaaatgctgtagcagtcagtcatttaatgcttagtcctattgaacctgtagactttagtgcaactgctacagtaaagcaacgactagaagaatttaaaaatgatgtcatagatttcagaactcgagaatcttatattactactgaccttaaattcataggtaataaaattcgtcctactaaaaatggtaaggaatttgaagaacgtattcataacgatgatgattttattgctaaatttaaactaaaagaacctttcaatacatcagtacaagaaaagacacctatttctttattattagaaagaccaagaaataaagatgaaaaagtatttaagaaagcatttgatgaaaatatgaataaaatatatgaagaagctaaaaaatatcaatag

SEQ ID NO: 419868 - DNA, 375 bp, Staphylococcus aureus
atgactaataaaaatagaatcgaacttaaatcacttaaaaatagaaaagtgaaagtaacagcaacagtagaagatgtaaaatacagaagtccattggatttaaatgataatggcaaattaaatgtatgtattctacttaaaccaatcactgttgatggtatagatttagaccatgtgtggatttacaaaagaaacaaatactatgatatgtttcagtcgctcatcggtgaacaaattaaattcaaagcgaatgttgtaagctatgtaaaaaataaaaacggtatttaccaagaagattatggtattaaaccaatatctaaaattatgactaaaacctcatatgataaaaaaattgaagatacaatcaagagataa

SEQ ID NO: 419869 - DNA, 2364 bp, Staphylococcus aureus
atggcaaataacgacactaatcattatccatatgctacaacctctcgtgtcttatggaagataggaaaatatttaatcgttttacttttattatggtatgtagtgtttaattttatactatattatctgtctttaggattgaaaaaattagcgaatagcaatggtttacatgacatcatagaaaaattaaaccacataataggatttgtaacatctaaacaaatacccccagcaaaagggttaggtgattcacttcatcaatgggttaatgaacataaattactggataatctgtccgttattatatggatattaattgtgattgcgatactttatgtgggcactatcattttaagacatcattatagagaacaagcgccgtttatcaatgatatgcaatctaaaatattgaaagtaaaaatgcggttcgcattaggtgctggttggaacaatatatacgatgaagacgaaaaaagaattagaaaagtagaggtagcagttagaagacgtattagaagaatgcgagtacatatacacactaagaaacatgctggagaaagtgtacctactaagcagtatgtagtgagtatacgtattccgagtaatgacgatgtgattaatttacttaatcgaaaaataaaaaatatgccagaccgtctaagaaaacaatctaatggcgttatatttggtgatagagaagaagcgacagatggtaaatggtataactttaaaggttcaaaagaagctaaaaataaagaggcattgttagttaaactagaccgtaagaaagctaaaaaagttaaaaaagaagaaaagaaagcagcaggaactgatacttttacaaaacgacctgagatagaatatacatttccattggatttattcgttgataaaacagatgacattaaaaaagcgacaaaagcagcacatgattttgctgaaagaaaacaaagagaaatcgctaattatctaacttcaacagaaaaaagtgctacacatcaattaactgaagtgggaagtagttcagtactttataaatatcgtgttgcattctctaggaatcaaacttcagataaagcagcacaagcaattgaagatggattgtcagatgctttaggagtagaaggtattttagtatcaggtggcgcaagtatcttaacgattacattacctttaaaagaaggtgaagaagatgatggaacgttaaaatacaattataatattccgattgatgttaaaaacatgatacaaaaggtagatttcaaagaaccaactgatatgattttaggaatgacacctgataataacgtacaacattttccacttgcgattgcgcctcacttgttaatatgtggtgcgacaggttcaggtaaatcagttaacgtacaacaaatgttaattacaatgatgattcatagcacacctgatatattgaaattcttaattgtagacccgaaacgtggagatttttcattctataaagggctaccatatatgcttgcagaccctataactaatatggacgatgcaatggacgctattacatatgcgacaattattatggaagaacgtttgaaaatgtttgagcatgttggtgtccgtgatattaaaggctataataaatgggctgaagaaaatggaaaagatattcttccatttatcgttgtaacaatagatgaatatgcccaattgatgaaaaagcataaagaagttgaggaaccgattcaagaaatagcacaaatggctcgtgcagcaggtatccatttaattattggtactcaaacgccacgtgcgaatattattactggagcaattagagataatatagatgctcgtatagcgatgaaagtggccaattcttcagcaagttggatagcacttgatgatacaggggcagaaaagcttaaaaaacgtggtgatatgttaattaagcgagatgataaaacagtacgtgcgcaaggtgcatttatttctgatgatgaaatcaagaatattttcagttatttaagagataaatttgataagccaatatatgttgattataaaaaggtagttgctcgtgctaaaggtgaggaggacgatgagttagctgaaagtggaaaagtgccaaatagtacgactatttcaacgaatgctaatcgtatgagaccagagccgaaacaaaactcaggacaatcaattaaaggtaaaacaaaagtatctacttcagcgtccagtatgcaaaaattaaaagaacgtgctagaaaaagacgtgaaacgaatgaaggaactaacaataaatcagttacaagtaatgagacatctaagaacaaacaaactaagaaaaaacaaatggatatggatttcttcttaggaagaaaatag

SEQ ID NO: 419870 - DNA, 666 bp, Staphylococcus aureus
atgggtattatacgtgagattcataaatggttagaaccttataaatatgataatgaagtagagttaccttccaaaaaaaagacgaataaaaagaaacatgttaaagttagcaaaataacaaaaaaagataaaaaacctaccgagcttgatgcagtaaatagaggagaattaggtgttaaaatcattacacttaataatgtactgaatgaagatacagcttttcagaaaatggataaaagtgcttctcatatagcatattattttcattcatctacaaaacatcaaatagcagcacgttttgaaccagcatcagggtttagatattataagagaaatgatattaagcgaaaaaacttcaagcctatcatttacaataaatattccgcttcagataaaacacatttaatacctgttggttttcatggctcagaaaacgaccctagactattaattggttggagtagaaaactgaatcgtggtgggattaagaagcatgaagaaaaagtaattaatattaataaagactacacgattttttggtttgttgatgtagaaaaaacatcgaatggtagtgcaaaatggacgtcaacagtatggttcgaagatggcagtatagtcgataaaaaaacattttatgataaagataaatatcattggccaagttaa

SEQ ID NO: 419871 - DNA, 1578 bp, Staphylococcus aureus
atgagtgatataagaaaagtagagaacacactgtatgtgagcgatgattatttagataaagtgttaaattatggtgatattaaatttatggccgatttacacagttataagcttagtgatgttcagaaaaagcatgggtatatagctaattatcagatttataaccaaaaaagtgaaattaaaaataccacaagcgatattgtgatacattttgaccatataagagcacattacaaacaagatggtattatgacggttacgtttgcttatatcattaaagctatattaatgcattatgtagataccaataaaacaatagaaattaatttagtaaaaagtggagaggtaaaccttataaataaagaagtttattttaaattgttatctcagaaaccttcagaagagagtagatacagatatgaggtatttaaacctgaaaatagaaaagacgatataaattattatgataagttacttgaaaatagcaaatacaatattgttgaattacccaaagaagcatttgaaaatagagataaggtttattatgaagaaatgttactagaagaattgatagaagtagctaaaagagaagttattttgttatataacaactatcaaaatgaaaaaaataaacaacaaattatagaagaagcattagacaatgttaatacatatgccgctataaagagactatctgattattattatgatatagaaaataaatctgaagaagttatgaattgtatatatatattagatgagtttatgggttcatgggcatatgcaggacataaaaatcgagaaaacgtatttaagacgtttaacgaaagaagacaacgagtagcaatcattgtgatgatacatttattattaaatactcaatttcctatagatacaatatctaaagcaacaactatcaatcaagaaaagttgaatagtataaaaacgggtgaaattaaaatagagaatttaactcttgatatagcatttcggttatatgaatatgcgttaagtatagaacctatacaaaagaaaccagacacatttttagaaaaaatgaagcggaaattaaaactgaaaaatgatatagaaatggcagaacaagtcatatttaacgaagatattaaaactaaagagattgaaacagaaacgagtataggtagagcagtaataggctcagttcgaaatggtaaaaaagagataatagatatctctatgagaaacttagttgagctatgcgaattgaataatagaatcgaaaatggagaatatatcatagataagaaaaaaactgagaaaaaaataaatgataagaaaagagattattataaactgtctgaaagtcaaaagcagcaattaaaagacaaaggtattaaccaagaactatattaccgacgaagaaaaatgaaatggacgtttgaagaaattattaatacgccagtaagagagaaaaagcatttaacagatgaggaaagagaattgttgaaagaggcgaatattgatgagagaacatttcatgtgcgaattgctagaggttgggatagaaataaagcattaacgacacctaaaagtaaataa

SEQ ID NO: 419872 - DNA, 288 bp, Staphylococcus aureus
ttggtcagcaattcaaatttaagcgatgaagctaaatgtattaaagagaccattgaagcggctttagcatttgatgatgagccagtagaaaggatagccaagcaacatagatatttaaataaagcgagtaatagtgctatagaagaagtcattacatcactgagtaaagataatcagtatggaagtacattaaaagaatttatggagaatggagaattgaacaaagtcaattttgatattgtaaagtttgatattgtcaaagcgataaagtcagaaaaggaaacatag

SEQ ID NO: 419873 - DNA, 270 bp, Staphylococcus aureus
atggaaatgttagataagatattcacgctactatttagtgatgaagtaaagggaacagaaattgcaaggcttactggaatcagtgagagtggcatatacgaagttaaaagaggcaaacggaattatatgaactacacattgaagacagcaaagagattgtcggattgctttgataatttagagaaagaaaacaaggtaaatcgtcatagcagttatgataaagccttgaaaaatttttactctaaaactactcatatgagtagaaaatga

SEQ ID NO: 419874 - DNA, 267 bp, Staphylococcus aureus; identical to SEQ ID NO: 417358

SEQ ID NO: 419875 - DNA, 576 bp, Staphylococcus aureus
atggctaaatatactaaatcaagaacatggggaatggttgtatacccagaatctgccccagaaaattggcaagaattattggcagaaacatttatgcaatttgcagtatctcccttacatgataaagataagaacccagatggagagataaaaaaagaacattggcatgtgattttaatatgggacggtccagttactcaaaatgcagcaatgaaagtagcggaaaaagtaaatgcaccgcaaccagttaaattagaaagtgtacgtggtgcatacagatattttactcatatggataatccagaaaaatatcagtatgacgaaaaagaaataaagctatttaatggttttgatatatcttcatatatttcgttgactaaagaagaaaaatacgaagctattggtaaaatcatggatattattaatgaaaatggaattacagaatacattgatttattaaatatacttagagcaaacgattataatctatttaaagttgcttgtgataatacaatcttatttactaatgttgttcgttcattaagacattcagaggacaaaaggaagaggttttga

SEQ ID NO: 419876 - DNA, 168 bp, Staphylococcus aureus
ttggtattggagaagaaaaagcagagaaaaagattaaatattacgttgccaccagaactaattgaagagttagaaaaagtaaataaaaaatacaagataaacaagtctagtcagattgaaacactaattattaaatatttaagaaaggagtatggtgattttggataa

SEQ ID NO: 419877 - DNA, 336 bp, Staphylococcus aureus
ttgagtaacagtagaaataaaaagcgaaaaaaagaattaaaaaaggataagagaaagtatcaaacaatttcccaaaatgaagagcagcaacttcacgacaaccgtatatcaaaggaacgtttttatgagagattggcgagaggttggccaagaaaaaaagcattatcaaaaccagtaaataactatattagaatcactgatgaagagaaaaaattaatgcatgaaaatggtattgataataaaacatttagagctagggtatcgagaaacatggatagaaaaaaagcagctacacaacctaaaaggaaatataaatataatcgtaagaaaaattga

SEQ ID NO: 419878 - DNA, 726 bp, Staphylococcus aureus
atggcaatcaatgaacagcaaatacaaaagctatcagaaaaaatcgaagaaatcttacaatctacaaacttcggccaattattagaaacaacagatgcatatctatatgaagagatggttcgagatgcatttgaacaaaaagatatgcctgaagatattgatacaaaagacgtgaatcatgaattaatattaaagagtaataaaagtgcagattcatgggctgaattactttctagagaagagattcatagcgaatcagatttgaatgattatttagataaagaagaagagttagcacaattaatgttaaatcatttggaaggtaattttgatgctgaagtcgaaattaaagaagaattgagtgaagtcagagagcgtaaacctgatgttaaaacactttcagatgctttagaaaatgcatatgaagaaaatgaatttatcgaatacttaaaagaaaatgaaaaagataaatttaatgaaaaagtaaaagaagttgcttcagatgaaggtatatcacacgatacaccagtagaggaaataccatatacagcttatattaatttaaaatcagattttgatacaatagcagaaaaacatttagatgaagctattgaaaaagaaagtgcgacaacatatgcgcacgaaaacatcaatcgaattttagttaaagatgaagcatatgaattagatattgaagtagataaagaacaatttgaagaagtataa

SEQ ID NO: 419879 - DNA, 624 bp, Staphylococcus aureus
atggctaacactaaaacacagaagatattaactatctcaaaaactaaaagtgaaaatatcgcaaattggtttgttaatgacgcacagtggaaattattggctgaacatttagagttaggtaaaacagctatctttaaatataagaagcttattaagacaaaatcagaagaacaagatgcattatatgcgttaggagatattttcacattaaaccaattaaacactatcatagagctatttaacgacacgatagagcacccagaaaagtatgaaaaaccgaagaaaaaatcaaccgttgatttaaaagcgcaagccgatgtgattcaaaaacatactaaagatatgaatatggattatttaagctatcaaacaaagccgacggcaactgaagacaaagccgaaacgaaaaacgacaatcaagaagaaaaacaagcgaaaaaccctaccaaatcagacgttatcgctaaacacaatgcagaaagccaagcgttaaaaagagaaatcgacgcattaccaaaagatagtcgagaacgaatggaaaaagaacgagcatataagcaatcggaagccgatagaatcgctgaattttgggacgcacaaaagcgagaacaagaagataaatag

SEQ ID NO: 419880 - DNA, 426 bp, Staphylococcus aureus
gtgtctaaatttacaaaaataaatgtgaatgaaataagactagatagtattagagaaaagtatcggaaagagttagagaaagaaaaagattccctcaatagtattgataatttatttacattagtaatcgttttggttttagccttaacatttgtaagtcatatgatagccagttctcaatactcatatttcatggctataggatatggtataggcgttatatcaattatttatatcagatatgctagaacaaagcagaaagcaaggttacgtcacttaattgaaattgcttcattaggcaatattcaaaatccaataaaaatagttaactatcatgaaaaagcacacacagcagctatgtatatcatgttgatatctttaacactttccctaatcaacagtattttagaaattatgatgaaataa

SEQ ID NO: 419881 - DNA, 1389 bp, Staphylococcus aureus
atgcgagaattagcaaaaaaatatttaaaaaatcgtttgataactggtgatatagcatttgctacagcaaggttttatataagagttttaactaggttttttcaaaatatatctaaaaataaagaaacaaggaatagtttaaatgaactagatagatgtcatatcgaagcatatatagaatttttgtttgaatatgcagctaataaaaatttgcaaagtactaagaattttgtgagagaagaattaaaaacaattagaaggttcttaaacgatattataactcaaaactatgctatagcaccgtaccaagatatacgatttttaatttatcctcaagacttacctaaacacgaaaagaaaaatagtagccaaattgattatatcccagattttgtattggaacagctttttgagcatataaatgatttgcataaagatttaatacctgtagtttggatagcttttaaaacaggattaagaatttctgatgtattgacattacaaaataattgccttgcaaaagttaatggaaagtattcaataatcacagatattgctaaaacttttgttaaaggacatagaataccaattgataataaattagctgatataatagcagttttaatagccgattctaaaagtaaaagtacaaaagataataatcctaataattatatttttgctatttataaaggaaaaagaaagggaatgccctttacacaacatatggtcagagcacacttaaatcatttatcaaagactaaaaatattattgatgaacaaggagaaatcttccatttcaaaactcatcaatttagacatacctatgcagtaaaattgttaaatggtggagcagatatattaacgatacaagaattattagcacactcctcaccagaaatgactctaagatatgctaagttacttgatgatacaaagagaaaggcttttgaatcagttattgatcaaggagcttttagttttgatgttgacggtaaaattaaaaatatacagcatagtagtgaactatctgaaaaagcattgaattctttatggcaagaacataaattaaacgcaatggacaatccttatggcacttgtcatgctagattgagtggtgattgtccatacatggaagctccgccatgcctgacttgtaattctgggaaaccatgtaaggatttagctattggattttctgatttagatgttgaaaaatatgaattacatatcaaatcaacggtcaaatctatagaattagctaaaaataataatagacaagatatggttgaaaagcatataaatatattaaataaatatgaagaaatactaggtaatataaaagatggaaacattatattcgggagaagtaatagaataaaagtatag

SEQ ID NO: 419882 - DNA, 633 bp, Staphylococcus aureus
atgacatataatattaatacgattgcgaaatggtttgtagagaataacattactagcagtgaaaacagttacgacggaaatttaacattaaataaactcatttattttgcagatgcgatgaattacgcaatcaacaacaaaaaattagtggatgaaataccagtaggatttgcgaacggcccggtgtaccagtctgtttatgttgatcatagataccgcactttagaatcaattaattcagatgacgctgaaatttctgaagaaactttaaaattgcttagaattgttaaattcgcattcggatcatacacctctcaatatctatcggaattaacacatgaacaaactccatggaaaaataaagagaaatggtgcaaaaaaagttttatcaatccgcaacttagttttgaagatttaactgatgatgaaaaatttgatttgattgaaacgtataatatgtacggagatatgaatttagacaattatgtgattgacagaataggaaacaatgtttttgtatatgatataaacactaacctaaatgaagatgattacatggaactacagaaattaaaaaatgaaaatgatagtatttttatcgaaaaaattgatggagaaatagtgtatgcatga

SEQ ID NO: 419883 - DNA, 432 bp, Staphylococcus aureus
atgcatgatggttcggtatttatagcaaaaataagatttaaaagagataccagtcctaatataaaacctcgtcaatttattgttattagtagcgataatggatatttatattttttagagactgagagcgttatcaacaaagtaaaattcaacctatcaaatattaaaagatcaagtttgaaatatcatattttaacgtctgaagaaagcctaagatgtggatttaatgttaaaactgcagtgaattgctatgaattgttttattgtgaatattttcctgaaattttgtctttgaaacacagagacctacctattgaaattttaaaaaacatccaaggaaaagtaaggtccattaaagaaaaagggttaaacattgaagattgtaaaataagcgaacaagaattgataaatttaaatccgaaattaagataa

SEQ ID NO: 419884 - DNA, 504 bp, Staphylococcus aureus
gtgagtcagattcagacagcgattcggattcagacagcgactccgattcagacagcgattcagactcagacagtgagtcagattcagatagcgattcggactcagacagtgagtcagattcagacagcgagtcagattcagacagcgattcagactcagacagtgactcagattcagatagcgattcggactcagacagtgagtcagattcagacagcgattcggattcagacagcgactccgattcagacagcgattcagactcagacagtgagtcagattcagatagcgattcggactcagacagtgagtcagattcagacagcgagtcagattcagacagcgattcagactcagacagtgactcagattcagatagcgattcggattcagacagcgactccgattcagacagcgattcggactcagatagcgactccgattcaagagttacaccaccaaataatgaacagaaagcaccatcaaatcctaaaggtgaagtaa

SEQ ID NO: 419885 - DNA, 198 bp, Staphylococcus aureus
ttgagtcattccgttaaagttgcaatttctatctatttagcacttatctttataacgttcacttcttatttagtcattattttatatacgagtatgactggacatgatgtatcacatttcgtgttagatagtcagcattctcatcatggatctcttacgcaaaaacatttgagtcttcctgaaatctcatttaaatag

SEQ ID NO: 419886 - DNA, 276 bp, Staphylococcus aureus
ttggataaatgtttagctaataaatctattaatgaaacatatgttcaagatatagatggctataaaatattcgataaagaagcatttatttcattgttacgttataaaaatcactggcaagatagctatactaagtatgctaataaaattggtttaacggcagaaggtaaatatttaaattataattctgatgtggttttaaattttcgatttaaggactgtgtacttgaaggtggaatgactaaagaagatagtatttttagattgtcaaattaa

SEQ ID NO: 419887 - DNA, 987 bp, Staphylococcus aureus; identical to SEQ ID NO: 407499

SEQ ID NO: 419888 - DNA, 504 bp, Staphylococcus aureus
atgattatttttcaattctttgtgaatagtgctgatgcaacaaaagttaacttatcgcaaacgtttgaaccaataagttggacccatttactaggaacagatgactatggtcgtgatttatttacaagggtcattgttggtgcacgatcaacattattcatcacaatcttaactttaattgctattgttattattggggtaacacttggattacttgcagggtataaaaaaggatggatagagcgcattatattacgcattgttgatatcggtctaagtataccggaatttattatcatgatagcattagcaagtttttttcagccaagtatttggaatttagttattgcaattacaattataaaatggatgaattatacaagattaacaagaagtattgttaatagcgaaattaccaaaccttacattaaaatggcaaaattatttcatgtaccaactagggtaatattgttacgccacttaacacctaagataatgccgtaa

SEQ ID NO: 419889 - DNA, 528 bp, Staphylococcus aureus
atgttcaaatcattgataggaaaagaaatttctgaagaggatgcaaatgatgcatctggtcttacagctgtatgttcgattataaatggcggcaaacaatttaactctgtaccagatgaagcttcacttgaatttaacgtaagaccagttcctgagtatgataacgactttgtagaatcatttttccaaaatatcataaatgatgtgaatagcaataagctttcacttgaaattccaagcaatcatcgtcctgtcacaagcgataaaaatagcaaattaattactacgattaaagatgtagcttctagttatatagaacaaggtgaaatctttgtttcggcgcttgtaggtgcaacggatgcttccagcttcttaggagataataaggacaatgttgatttagccatttttggaccaggtaatccattaatggcacatcaaatcgatgaatatattgaaaaagatatgtatctgaaatatattgatattttcaaagaggcttccattcaatatttaaaggagaaataa

SEQ ID NO: 419890 - DNA, 381 bp, Staphylococcus aureus
ttgaactctacaactagcaacagaatcaaacaagctatgaagtcatcgaatttaaaacaaatagatatagtaaacaaagctaaaagcatggaagaagaaactggtatcaaattatcaaaaactgatttaagtcaatatgttaatggtaaagtgacgccgggtcagaagaaattatatgttttagctaaaatattgaatgttagcgaagcttggttgttgggatacgacgtagaaagtaaaagaattgatgataaagaaagagataaatttaatcagcatcaagaaactatagctggtcatgcaaataaagatgaatttactcctgaagaatgggaagaaatcgaaaactttatgcaatgggttagagatagaaagaaataa

SEQ ID NO: 419891 - DNA, 225 bp, Staphylococcus aureus
atgtgttttgattattcagctttaataggtcgtataattgaaaagtatggtaatagatatgcttttgcatacgcgataggcttatcagaacgaagtttatctttaaaattaaatgataaaattggttggagagattccgaaatagctaaagcttgtgaattattatctatacccagagaagaaatacaagtatatttttttaattataaagttcaaaataattga

SEQ ID NO: 419892 - DNA, 204 bp, Staphylococcus aureus
gtgcgaaaacaagtgattattacaaaaacagtagttggctggtacaacattaaagatactcaacataatttaatgttaaatataccgccgaaagtatttgaacagtgctttcctgatgttagtaaagatgttcaagttgcgtgtttagaaatggatttatcaaaaattacagaaattaaaaataagaaaaaggtaggtagttaa

SEQ ID NO: 419893 - DNA, 546 bp, Staphylococcus aureus
ttgacaacgatcgagaccacggctacgaactttgatcaagcgacaaagactaatgaaaaacgatttattagcgcaatgaaacactatattcaacgcattgatagtgataatttaaaacaagatttcaaaacagccatgcaagaagaactaaaagatattaaatcggaaacagaaaatatggttaaacaatttcaagtgagtcagatagaattacaaacatccaataatgaatacgcgaaaaccattgaagcacgcttaaacaaaaatgaaaccgcgataaagcagtatgatcaagcagtgaataagttaacgaaaggattaacttctatgtttttcatcgttgctttagtaatggtcgcatgtttagttttaagtccgttaagcgatgtattaggtgttcattatttttatgaatggattaatcatgtactcaaaacaggtcattcagcatggcgttattttatcgttatcctttatttaatcccttatatcttattgtggttgcttatacgtggcattttaagcgcattagttcattttgaatag

SEQ ID NO: 419894 - DNA, 1008 bp, Staphylococcus aureus
atggcaacaactaaactaagcgcaaccaaatcaacatctcgtgctattaattacgctgaaaaacgcgctgttgagaaaagtggcttaaactgtgatgtagattatgctaaatcgagtttcaaagcgtctcgtgagctttacggtaaaacagatggcaaccaaggtcatgtcattatacaagcctttaaacctgatgaagttacacctgaacaatgtaatcagctaggtttagaactcgctgaaaaatttgcaccgaatcatcaagtcgctgtctatacacacaatgatacggatcatgtacataatcatattgtgattaatagtattaatcttgaaacaggtaagaaattcaacaacaataaacaagcattacgtgacttaagaaatttcaatgacgaagtttgtcgcaatcatggtttaagcgtaccagagaaagatacagcacgcttacgttatacccaaactgaaaaagccattgcggatccaaacataaaatcaacagcacagtattcatggaaagatgaaattcgagaagctatcgaccaatcacaagcaacgaatatggacgaattaaaaacgcatttaagtcaatatggcattgaaattgaacgtgtcacaccaaaaagcattacgtatcgacacctagctgaagataaaaaagtacgggggcgtcgattaggcgaaaattacaataaagggggcatagaagatggctttgaaagacaaatacaacgacgacaacaagaacgagactcagaacacgactaccaaccgaaacgacgaacttcgaatcgtgatgaatcaactgaaagagatacaagcatcactcaatcagattgggatcgattcgccaaggatacaaatgaattggagcgtagccgaaaagctgcagaatcagcaagacttgctcatgaaaaggctcgaagagatcgagaagagagaattcaagcggaacgagcgacacgaaaaaatattgacaacgatcgagaccacggctacgaactttga

SEQ ID NO: 419895 - DNA, 384 bp, Staphylococcus aureus
atgagcgaacaaaacatatttgtggctagcgatacggttaatgggcaaattcataaacccaaccgtaaagcgccaaaacaaattagttttcgtgtgagcgaatccgaatatttaaagttgaaacaatcggctgaaactttaaatatgagtgtgcctgctttcgttaagaaaaaggcacaaggcactcgattagttgtacctaaattagataaaactacacgacaatctctagctagtgatttaggtaaattaggttcaaatgccaatcaaattgccaaatattgtaaccaacatcaatatgacgcaccaaattacgaagcattagaacgtaatatcagcgaattacgtgaaaggctggatgacatatggcaacaactaaactaa

SEQ ID NO: 419896 - DNA, 210 bp, Staphylococcus aureus
atgataaataatattaagcattatcgtaaagaaatgaatttttcgcagcaagagttggctaataaagttgaagtaacaaggcagacaatatctttaattgaattagggaaatataatcctactatcaaattatgtattagcatagctaaagctttacaagtagatttgaataaattattttgggaaatgagtgataatagtgaggaataa

SEQ ID NO: 419897 - DNA, 417 bp, Staphylococcus aureus
atggatgaaagacaagaaataattaataagaatatgttaattaggtcttttggctttttatttatactattaataatttatatagcttttttaggcgtgattaatgtaactataacaggacaccaattaatattaatcagtattattacactaactagtatatatatgtggattgattcttttataaataaaattttgtattatgatgttcaaaataacaaagagataaaacgaaagttgtcatcatgcgttacgacattgttagttattgatgttgcagttttaatattggcttttttaaataagattgatattaatatttcatttttatttttagctatattaatatcctttaacattatagtactaagtgtatattatataatattaaaattctggttaatttggtataaatag

SEQ ID NO: 419898 - DNA, 1716 bp, Staphylococcus aureus
ttgcataagagtaacccattattaagtattttgaagaacttaaagtttcctaaacttctattattatcagctttaattatatcgtctattggtagtattgctggtctattagtaccatggtttacaggggaattagtaaataaaataaatggaaattcactaagttttaattttttagttatagttatttctatatttttattaaacgcaattataagtggtgttggtttatatttattaagtaaaattggtgaaaaaatcattttttcaattagatgtttagtatggaatcatattgttcgattaaaaacttctttttttgattcaaatgaaagtggagagctattaagtagaataatagatgatacaaaagtaataaatacttttgtatcacacaaacttcctagcactttacctaatatattaacaattattggatcgataattatgctttttatattagattggaaaatgactctatgcacatttgttattgttcctttattttttatgattatactgcctttaggacaaatgatggaaaaaacttctaataaaacacaaaatgaaattgctcaatttagtggaatgataagtagaattttatcggaaattagattagttaaagtttcaagtacagaaaatttagaagtcaaaaatggtaaggatcgattaactaatatttataatttaggaataaagcaggctaaaataacatctataatagaacctatatcgagcattttagttttattgatgatagctattgtcttggggtttggaggctggagagtatcaagtgggaatatatcatcgggaaatttagtagcaatgattttttatgtatttcaattagttttacctattagtaatatttcaacactaataactgattataaacaagctaagggagctagctttaggctatcagaaatattaagtcaaaaaaccgaagaaatagaaggtaaaagaaatgaagatttagatataccttttattaaatttgaaaatgttactttttcatatgacaaggaagaaatattgaaaaatttaagttttacaataccacaaaataaagtgacagcttttgttggaccttcaggatctggaaaaagtactatattcaatttgattgagaaaatgtatgacattgataatggaaaaatatatataggtaattcattattgagtgatttggatttattgagttggagaaaaaatctaggatatgtaatgcaagataactcaatgatgagtggcactatacgagataatattttatacggattagaagatcaagaaattaaagatgattatctagattattactgtaaattagcaaattgttatgattttgttaataatttagaagaaaggtataatacatttattggagaaagaggagtcaagttatctggagggcaacgccaaagaatagatattgctagaagttttataaaaaaccctaaagtactattacttgatgaaattactgcaaatttagatagtgaaagtgaacataaaattcaagatgcaatgtctactttaatgagagatagaacaacaattattattgcacataggctatcaacaatccaaaaggctgatcagataatatttttagataacggtgtaatcacaggtatgggggaccataattcattatataacagtcataaaaagtataaagagtttgtgttaaaccagcatatataa

SEQ ID NO: 419899 - DNA, 165 bp, Staphylococcus aureus
ttggaaaatgtaacaaatgatgaagtgtttgaaatgattgatagtagaaccggtgttttaaatgttaatgattggaaaagtcaattaaggcgttctgccactacacaagcattgaaaaaacgactacaaatgctgaaatcatattgtgtaatgatgagagtttaa

SEQ ID NO: 419900 - DNA, 441 bp, Staphylococcus aureus
ttgcctacaggcgagattaaaaaggctcattggcatattcttttgtgttttagttccaataagacgtttaaacaagtattagaagtatctgagcgtttaaatagtcctataccacaaaagtctaaatcaactggtggtagtgttagatatatgattcatattgatagtccagataaagttcaatacaaaaaatctgatattgaagtttatggaaatatcgatatagagcaatattttagaataactagtactgaaagatacaatttaattcgagaaatgattgattttgtaagagaaaatgaaattgatgaaatccaagatttaattgattatgcaatgataaatcgatttgatgattggtttccgttactttgtgataactcaacgtttatcatgagtaattacataaaatcaattcgacatagaaaaaagagattttga

SEQ ID NO: 419901 - DNA, 345 bp, Staphylococcus aureus
gtgaaatacaaactcaaaaatggcggtgaaagcagtattgctggcacttccaatttggacgagcttagcagttctaataatagtcctgtcaactctaatagtgtttacagcatcaatttgacgagaaaaaatccaaacgggaatcagatagacgctaattcaacatggaaaaaactaactcaaagccttaaagaaaaaggcattgttaaagatagtgataaagtttctatttatagcaaagatcatacagatcctaaaatctctggaatagttggacaagattttaccgatcatagtaattatatgttatacaagaaagacatagataaaataactataaactag

SEQ ID NO: 419902 - DNA, 2151 bp, Staphylococcus aureus
atggcaaaatcatgcttgcatatacttactaataatgaatatgcgacaacgcgttgccaagatggcatagtcttattttggccaattgacggggaaatcgaactacaaaaatttcgtaaaagtaaaataattgaagatgatatatatatcattaatcatctggatgtatttagtattaagaataataaaaaaacgatcatgttgtatttgagtagcgattggtttgcggaattaggctttactttctttaattatcactatacagcaaagttaattaaatcatcctataatttgaaatgcttattattaaaattgacatatcgataccttgataatcagcctattaatgacgctgatattagaaaattacaggatattattaaaatcattgcaaaagaagcaagtatggataaaaagattgcgcaaaatcaatatcgttatgcttattatggtgatttgcgagatgagctcgaatatatttatcaaaatgtaaatcaacgattgacattaaaaagtgtcgctgataaattatttgtttcaaagtcaaatctgtcttcgcaattccacttacttatgggcatgggttttaaaaaatatattgatactttgaaaattggaaaatccatagagattctacttactacagatagtactattagcaatataagtgaacatttaggatttagtagcagctcaacgtactctaaaatgtttaaaagttatatggatataacaccgaatgaatatcgtaatttatcaaaatttaataaatgtatcatgcttaatccagagccacttgtaggcggtatggcgcaagaagtaaaagaagtcatattgaattatattgatcattataaaaatcacctaactgatgttatacatattgacgaagataaatttgaaatacctaagttatttcaaacggttattcaaattaatacttatacagaaatgaaactagttttcttagaagggatttttaaaaccttattgaataagaacagccaagttgtctttttcatcatgccatcgattttaaaaagtaaaaataccatgtccgaagaagaaaagtttacaatcattaaaaccataattgaaagtgatttaaagatagcatttaatataaatgatattgaaacgacttattatgttgaagaagcttttatgaatgttattagacaattatctccaaacgaaataaatcatcataataattacgaagtgcattttgtttttgatttatcattgatggaaattaggacaatttaccgtatgattttaaaactacataacatcatgttaaatgtgaaattaggattgaatattacctgtttatttgataaaccttcagtttttaaatcactagtatcacaaataaagcgacttaaattcgattcgttaataatagataatgcaaatttaagtagcccttatttgatgggggaaagtgatgagttactattgaaaaatattttgcattttaaaaatttaaaacaagttattaacgaattggatatagaacaagaaaagctgatttttctaaatgttgaaaatcataaactgcttaataataaagaacgagatttaagtaatagtgctccattaatttataagacattaagtgcgctgtatcataactttgatggttttggattaaacatttttgataatcatcaaacatttaatgcgatgcatctatatgataaaaatggatttaaaacaacactaggtcttatattagaaaagtttatcgaatatgtctcgaaaccaaaatacgaaaacagttattattctatttttgatatagagaattattattgtctggttatttatgattggcgagtgattgagagcgagacaattatgagcaattttgaagatagtcaagtttatataaatttcaaaaataatgttttaaacgataaatatctaattgtaatagaaacgttagatgaaaatagtgggaacattaatcatttgatctctaaagaattaagagataaatatgaatggaaccccagtttactctctaaaattgacaactaccttaaaccggcaatcgagattaaagagcataactttagtaataattccttaaatattaacgttacttttaatgcgttatacataattaaaataggaaaaaaataa

SEQ ID NO: 419903 - DNA, 531 bp, Staphylococcus aureus; identical to SEQ ID NO: 407478

SEQ ID NO: 419904 - DNA, 261 bp, Staphylococcus aureus
atgtattacgaaataggcgaaatcatacgcaaaaatattcatgttaacggattcgattttaagctattcattttaaaaggtcatatgggcatatcaatacaagttaaagatatgaacaatgtaccaattaaacatgcttatgtcgtagatgagaatgacttagatatggcatcagacttattcaaccaagcaatagatgaatggattgaagagaacacagatgaacaggacaaactaattaacttagtcatgagatggtag

SEQ ID NO: 419905 - DNA, 249 bp, Staphylococcus aureus
atgaaagatgctagaagaggagtaggctacaaagctgaaatcgaattatatacaacactgttttcgaaaagtagaaacttttcaaaggacaagaaattagatgatgctatagatttatccgaaagcgtgaaaaagttaaaccttaatttagaaaacacgaaaatatttttacaactaacgaaatctaccattaatactaaacaagtaaattatagtgataacaaacctatcaagattgaggttgagtga

SEQ ID NO: 419906 - DNA, 387 bp, Staphylococcus aureus
atggctaaaattccagttacggtattaagtggttatttaggctcggggaaaacaacattgttaaatcatattttacaaaatcgtgaaggtcgacgtatcgcggtaattgtaaatgatatgagtgaagttaatatcgataaagatcttgtcgcagatggtgggggactatcgcgtacagatgaaaaattagtcgaactctctaatggttgtatctgttgtacacttagagatgatttattaaaagaagttgagcgtttagtgaaaaaggtggcatcgatcaaattgttattgagtcaacagggatttcagagccagtacctgttgcacaaactttctcatatattgatgatgaacttggcattgatcttacagcgatttgccgtttag

SEQ ID NO: 419907 - DNA, 423 bp, Staphylococcus aureus
atgagtaaaatttatcatacatttttgcctgcattaactttaggattattatctactgctggttatattcaatatttacgtaatgatattattgaaaattctaaaaaagattatgtattgacggcaaggtcaaaaggattatctatgaataaaatttataataaacatatattgagaaattctttaatacctattattacatttttaggtgctgatattgtaagtattttaggtggagctgtgattactgagactatcttttcatataacggtatcggtaaattatttttagaatcggtaataggtcaagactatccattaatgatggcattaacgttgtttttctcatttttaggtttactgggtaatttgatttctgatattacttatggatttatagatccaagaattagaagtaactag

SEQ ID NO: 419908 - DNA, 378 bp, Staphylococcus aureus
gtgaaaatagaatgggtaaaagaaacactgattcaatataaaagtattgaaccatgtaattttaataatgatttaaatttttggattgaatatattgaatatgttgacaaaaagcttcctcctttcgatacaaatactgttaatgacgaaaattttgatgtgttttatgagttgtttgatcaatcaaaatcaataaaagatttaaatataatttcctctgcttctaatcatattaggttatataaaaataaaattaataataaaatagttgttaaagagatattttgtgtacctattgtaaatgaaaggatatacaacacaaagaaaagcatacttaaagaatcaaacactgatattgtgtcgcaaaaaatcctataa

SEQ ID NO: 419909 - DNA, 159 bp, Staphylococcus aureus
atgttgcaacaaggtcgtgattttatttcgtctcatccaattatgttgattgcacctgcttcagtcattgctataactattttaatttttaatttaaccggtgatacgctaagagatagattgctgaaacaacgaggtgaatatgatgagtctcattga

SEQ ID NO: 419910 - DNA, 225 bp, Staphylococcus aureus
atggattacgcacatttaaatttagaacatttttttgcacgaaacgacgatttagatgttataagagatcgcgctgatttcgtgatgataaataatttcactaatgaaatgatgtatcgtgatggtcaaattgaaggtacgattgatttaaatcagtactattataaaaatagatcaaatgcagcaagttttattatgatggattataaaaaagaaactaagtaa

SEQ ID NO: 419911 - DNA, 291 bp, Staphylococcus aureus
atgattcaagttggaaatttaactaaaactataaataatcaaatgatattggacgatattagcatagaaattgaaaaaggtaagttgacttctttaattggacctaatggagcagggaagagtacgttactttcagcgatatgtcgcttaattcggtttgatgaaggggaagtaaaaatagatggacagcttatgtctgattataaaaacaatgatttgtcgaaaaaagatatcgattttaaagcaaacgaaccatacagaaatgaacattactgtagaacaattagttaa

SEQ ID NO: 419912 - DNA, 876 bp, Staphylococcus aureus
atggaaagtgaatcaaaaaaagacacgaatacagaaacaaaatcagtaccagaagaaatggaagcttcaaaatatgtaggacaaggctttcaaccacctgcagaaaaagatgcgattgaatttgcgaagaagcatcgtaaagaatttgaaaaagtaggtgaacaattctttaaagataactttggactaaaagttaaagctacaaatgttgtaggtaaagatgatggtgtagaagtttatgtgcattgtgaagatcatggtattgtatttaatgcaagtctacctttgtacaaagatgccatccatcaaaaaggatcaatgcgtagtaatgacaacggtgatgatatgagtatgatggtgggtacagtgctgagtggctttgaatatcgagcgcaaaaagaaaagtatgataatttatataaattttttaaagaaaatgaaaagaaatatcaatatacaggttttactaaagaagcaataaacaagacgcaaaacgtcgggtatcaaaatgaatacttttatattacatatttatcaagaaacttaaaagaatatcgtaaatattacgaaccattgattcataaaaatgataaagaatttaaagaaggtatgcaaaaagctagaaaagagctaaactatactgctaatacaaatactgtagcaacgttatttagtacgaatgatgaaaggaatagaaaagaaaagataaataatgtaatagatttatccgagaaaattgaaagaacaaaagatatgccaatcaagaatactataactactcaattaggaaataaacttattggcacaaaaaaagctcgttttgatgataagaaagtagtgtcgtttggagcatttgaagatgaatataataaatga

SEQ ID NO: 419913 - DNA, 165 bp, Staphylococcus aureus; identical to SEQ ID NO: 409216

SEQ ID NO: 419914 - DNA, 285 bp, Staphylococcus aureus; identical to SEQ ID NO: 410480

SEQ ID NO: 419915 - DNA, 534 bp, Staphylococcus aureus; identical to SEQ ID NO: 405660

SEQ ID NO: 419916 - DNA, 489 bp, Staphylococcus aureus; identical to SEQ ID NO: 405191

SEQ ID NO: 419917 - DNA, 501 bp, Staphylococcus aureus; identical to SEQ ID NO: 405188

SEQ ID NO: 419918 - DNA, 216 bp, Staphylococcus aureus; identical to SEQ ID NO: 419528

SEQ ID NO: 419919 - DNA, 858 bp, Staphylococcus aureus
atggaaaaatttgagaaattaagcaatccttcacaaaatttcgaacaaatttataaaaaaaacataataaataatcacaaaataattatcgatatgtattaccatccggattacttcacattagcaaacggacttttaccttggattataatcatgcgaaatagagaattaaataatttaggaaattatgatatagagatacataacttattaaaaaataaaattaatagaactattatagagcaaattaaagatcccggattgtttaatggtttatcaggtctgacatatatcttagctatatcatcgaaaaatggacgctatgataatctaatagaaggaactttaccttatttggaatatcaaacatacgataagataagcgagtgtattagaaataaaaacaataaaacagttaatgattatgattacgatttaataagtgggctgagtggaatcttaaaatgttatctaaataaacatgtaatcaagtacatacaagataaaaaagtaatagatgatatcgctatatgtttagcagactattttaactttaaggaatacaacaatttacaaagcttacctttttatatcaaaaatcaaaaaaatgaatatataaatagtgaaggtgaaatgatcaacctatcacatagtcatggaattatggggattcttagtgctttaaatcaatattataaaacttatcatcaaaatgatataaaaaaaacaatcgaaaaaatttgtgactttgtcgctcaatattattgtaaaaaaagtagaacatggatcaaaagacattataataaccaaaaaaaatatttggagatccaaactatacatggtgttatggagatttaa

SEQ ID NO: 419920 - DNA, 363 bp, Staphylococcus aureus; identical to SEQ ID NO: 418174

SEQ ID NO: 419921 - DNA, 396 bp, Staphylococcus aureus; identical to SEQ ID NO: 408499

SEQ ID NO: 419922 - DNA, 1290 bp, Staphylococcus aureus
atgactattttagcaattgtaatttttcttttaactttaacctttgtgatttggcaaccaaaaggtttagatattggtattacagctttaattggagctgttgttgctatcattacaggagtcgtaagtctttctgatgtattagaagtaacaggtattgtttggaatgcaactttaacttttgtggctgttattcttatttcattaatattagatgaaattggtttttttgaatggtctgcgatacatatggtcaaggcttcaaacggtaatggcttaaaaatgtttgtttttattatgttacttggagcaattgtagcagcatttttcgcaaatgatggtgcagctttaatcttaacgcctattgtattagcgatggtaaggaatctaggatttaatcaaaaagtgattttcccctttattattgccagtggttttattgctgatactacatcacttcccttaattgtaagtaacttagttaatatcgtttctgcagattacttcgatattggatttattgaatattttagccgaatgatcattcctaatatattctctctgattgctagtattctcgttttatggttatatttcagaaaatccatacctaaaacgttcgatacagaaaatctatcagatcctaaaagtgcaattaaagattctaagttatttaagctttcatggatagtattagcagtactactcgttggatatcttgttagcgagtttatccaaattcctgtatcaattattgctggtattattgcttttatctttgtaatattagctcgtaaatctaaagcagttcatacaaaacaagtgattaaaggtgcaccatggaatatcgttgtattctctattggtatgtatcttgttgtgtttggactaaaaaatgtaggtattacaacggtccttggggatgttttaacaaacatttcaaattatgggttatttagcagcatcatgggtatcggctttatagctgctttcttatcttcgattatgaacaacatgccaactgttttaatagatgcaatagcgattggccaatccagtgctacaggaatattaaaagaaggcatggtttatgcgaatgtcataggttctgatttaggacctaaaattacgccaattggttctttagcaacattattgtggctacatgtcttaacacaaaaaggtgtgaagatttcgtggggaacatactttaaaactggaattatcatcactattccagtcctatttgtaacactcttaggtttataccttacactaatcatattttaa

SEQ ID NO: 419923 - DNA, 315 bp, Staphylococcus aureus; identical to SEQ ID NO: 408501

SEQ ID NO: 419924 - DNA, 318 bp, Staphylococcus aureus; identical to SEQ ID NO: 408502

SEQ ID NO: 419925 - DNA, 213 bp, Staphylococcus aureus; identical to SEQ ID NO: 408503

SEQ ID NO: 419926 - DNA, 378 bp, Staphylococcus aureus
atggataaacaagttagaaatacaacagaaattgtacgtttggcgaagcagaaatcacaaaagacaagggaaaaagtagacaaagcgatttctaaattttcgattgaaggtaaagctattaattttaattcaatagcaaaggaagctaatgtttctaaatcatggctttataaggaacacgatattaggcaaagaatcgaatcccttcgtgagcgtcaaataacatcaaatgtagtctcaaaacccaagaaaagttctcgttcggaggaaatccttataaaaaccttaaaaagaagggttatggaattaaaaaaagaaaataaaaaattacagaaccaaattcaaaaattatatggagatctgtataataaaaagtag

SEQ ID NO: 419927 - DNA, 366 bp, Staphylococcus aureus
atgacaaaagatatgtgtgaagttacctatattcatgaagataaggtaaacagggctaaaaaagaccttgctaaacagaatcctatggatgtagcgaaagtttttaaggctctatcagatgatacaagagttaaaattgcttatgttttgtctttagagggagagttatgtgtttgtgatgtagctaatatcattgaatcttcaacggctacggcatcccatcatttaagattattgaaaaatttaggtatagcaaaataccgtaaagaaggaaaagtagtctattattcactagatgatgagcatgttaaacagcttgtagaaaaagctttcttgtatcaaagggaggttgctagtattggatag

SEQ ID NO: 419928 - DNA, 2181 bp, Staphylococcus aureus; identical to SEQ ID NO: 408527

SEQ ID NO: 419929 - DNA, 222 bp, Staphylococcus aureus
atgaaattatcttcagacataaatacggattttgaagttactactctttcatatttacaaaaattaataattgttatgatgaacttaaacatgaaaataagcaaaagtgaaatagctagacacatgggtgttgatagaagagcagttgataaatattcaaatgtctttgacttttattttataaattcttccataaaaataaccacactcctaaatcaatag

SEQ ID NO: 419930 - DNA, 693 bp, Staphylococcus aureus
atgtatagtataaaaatgcgttctagcaatcaagatgttcatattagtggtgctgaaacgatttgtgagtttgacaaaatagaacagacggtacaaaggttttataataaaggtttttttcatgaaaatgggcaaccggattttctcaatataaaaatacaaaaaatcatggaaccgattcaacaaataaaagcattacaaattattgaggatgataaagcaaatctccaacatttaacacaagaatgtggtgtcactgaacaagcgctaaatcaagggatgacatatattaaaaatgaaacggtttatacaggagctattattctatctgctatatctggtaaacgtttagattcatttggacaaagggggattagggcaacacatttttcgtttgaagatataaataataaaggtgatcttaatgaaagagtgactgatgccttagcaattgctagttgtatcaatgcgcatccgtatgtcaaaggagaactttgcgtgtccgatgacttaacgtatacgacaggttattttgcctctgctaaaattggttaccatcgattgtttgatattaaaccagttaatacgagatatggaggcagaataatatttgtggacgattgtattgatttaaatcattacatatcatttttagaaagcacaccgaagcaagttgtttatgaaacggtatag

SEQ ID NO: 419931 - DNA, 123 bp, Staphylococcus aureus
atgaaattagatttacagactgctcgtcgtaatttaaatagccctaacattaaaacaagaaagcgtgctttaaagattattaagcaacatatattttcgagtatccctagctcgttaatataa

SEQ ID NO: 419932 - DNA, 279 bp, Staphylococcus aureus
ttgaaaaattataaagacggagatatttcatataatccagaggtaccgagttattcagctaaatatcaattaactaatgatgattataatgtaaaacaattacgtaaaagatatgatataccaacaaataaagcgccaaagctattgttgaaaggttcgggagacttaaaaggttcatcagttggatataaagacattgaatttacttttgtggagaaaaaaggtaaaaatactttttttactgatagtctacatcttgaaccaagtgaggataaataa

SEQ ID NO: 419933 - DNA, 654 bp, Staphylococcus aureus
ttgagaaaaaaagtagataatccgcttattgattttaaattatttgaaaataaaccatatacaggtgcaacgatttcgaacttcttattaaacggtgttgcaggtacattaattgtagcgaatacattcgtgcaacaaggtttaggttatacagcattgcaggcaggatacttatcaattacttatttaatcatggtgttattgatgattcgagttggtgaaaaattattacaaaaaatgggttctaagcgaccaatgttattaggtacattcattgtggtcattggtattgcacttatttcattagtattcttaccaggcatattttatgttatcagttgtgtcgtaggatatttatgtttcggactaggcttaggtatttatgcaacaccttctacagatacagctatttcgaatgcaccgttagataaagttggcgttgcttcaggtatttataaaatggcttcatcacttggtggcgcattcggtgtcgcaattagtggtgctgtatatgctggtgcagttgctgcaacgagcattcatacaggtgcgatgattgcactttgggttaacgtattaatgggaatcatggcatttatcgcaattttattcgcgattcctaatgatgataaacgtgtcaaagatgcgaaataa

SEQ ID NO: 419934 - DNA, 432 bp, Staphylococcus aureus
gtggaattattaaatagttataattttgttttattcgtattaactcaaatgatattaatgtttacaataccagctataattagtggtattaagtacagtaaacttgattattttttcattataggaatttcgacattatcgttatttctatttaaaatgtttgatagcgcgtccttaatcattttaacttcattcattattataatgtattttgtcaaaatcaaatggtattctattttgttgattatgacttcacagattattctgtactgtgctaactacatgtatattgttatatatgcatatatcaccaagatttctgatagtatatttgtaatattccctagcttttttgtagtttatgtgactattagtatactattctcatatataataaatagagttctcaaaaaattagcacaccatatctaa

SEQ ID NO: 419935 - DNA, 564 bp, Staphylococcus aureus
atgatttcacacttgataacggatacttcgaagaagatacatcagacagtgattcagactcagatagcgattcagattcagatagtgactcagactcagatagcgactcagattcagacagtgattcagactcagatagtgactcagactcagacagcgactcagattcagatagcgactcagactcagacagcgactcagattcagatagtgactcagactcagatagcgactcagattcagacagcgattcagattcagatagtgactcagactcagatagcgattcagattcagacagcgactcagattcagatagtgactcagactcagatagcgattcagattcagacagcgactcagattcagatagtgactcagactcagatagcgattcagattcagacagcgactcagactcagacagtgattcagattcagatagcgattcagattcagatagtgactcagactcagatagcgactcagattcagacagtgattcagactccgacagcgattcggactcggatgcaggaaaacatacacctgttaaaccaatga

SEQ ID NO: 419936 - DNA, 414 bp, Staphylococcus aureus
atgggatatttaaaaaggattggattgtgcataagtatcttgattttaatagttattgtagcaggttgtggcaaaagtgatgaaacaaaagaaggttccaaagaagaacaaattaaaaagagttttgcgaaaacgttagatatgtacccaattaagaatctcgaggatttatacgataaagaaggatgccgtgatggtgaatttaaaaagggggacaaaggtacatggacaatatcaacagattttgctaaaagcaacaaacaaggtgaaatgaatagcgaaggtatggtactacattttaatagaaatacgaggacagcaagaggatattatactgtaagaacaacttatgatgaagtggataagttggcacgcgaaaaaaataccgtgttgaatttaaaaacaataagatag

SEQ ID NO: 419937 - DNA, 771 bp, Staphylococcus aureus
atgggcactttaattaagcaagaatgttttaaattgtttaaaaagaaatcgacgtttattataccaattatcattatgttattaatggttgttcaagctataatatctaaaaactatgatgatgttttttctccacaatcatctattgaatcagcatttagtggtttttcatggtttatctttttattaattattcaagccagcaccattatttcaatggagttttatcatggtacaattaaaaatcttctctatcgaaaatatacgagaacaagcattattattagtaaaattattacattaatacttttttcactactgtattttattgttagtattgttgtaggaattattctatgggctattttcttcaacgatatcaatctccttgaaagtaagggtgatgcgttatcgttattaagtaaaatgttattaactggactaggtacatatgttggaacatggttagtcttaagtatcaccttattaatttcatgtgcaatgaaaagtcccggtgtctctattgctgtcggtattgtattgtattttgccacttcaattttgtcagggatattaacaattgttgtagataaatgggaatggttaaaatggaaccctattagtatgatgaatattatggttcaaattgttgataaaaacatgaaaaaattcacaaaattagaactgcatgaattatttattggtaatattgtttatattattattttcttaatcatcgtagtatttgtctttaaaaagaaaaatgtctaa

SEQ ID NO: 419938 - DNA, 696 bp, Staphylococcus aureus
atggatgttttaacagtagaacatttaacaaaaaagataggtaataagactattctcaaagatatttctttaaatttaaaacgaggacagattgtcggtcttgttggagcaaatggggcaggaaaaacatctttgatgaaagttatattaggctactcgatttatcaagaaggtaactttgaagttattgaaaataagcataaaaaaagtaacgttggtgcattgatcgaaaatccaggagtatatccctttatgtcaggctatgacaatcttaaactactaaatgaaactaaaaatactcaagatattgatacaattgtctctcaacttaaaatggatgagtatatacataataaagccaaaacatattccttgggtatgaaacaaaaattaggtattgcaatagctttcttaaatcaaccccaattaattattttagatgaacctatgaatgggttagatcctagggctgtaagagatgttagagaactcattgtaaaaaaagcggaagagggcgttacctttttaatttctagccatatattaagtgagttagtaaaaatcaccaattctatccttatcattaacaaaggtaaaattgttactgaaactaccgaagaagaattaaaccaatataaagataacgatttagaaaatgtattattaagtatcattgataaggaggatcaatcgtaa

SEQ ID NO: 419939 - DNA, 1467 bp, Staphylococcus aureus
atggaacaatatacaattaaatttaaccaaatcaatcataaattgacagatttacgatcacttaacatcgatcatctttatgcttaccaatttgaaaaaatagcacttattgggggtaatggtactggcaaaaccacattactaaatatgattgctcaaaaaacaaaaccagaatctggaacagttgaaacgaatggcgaaattcaatattttgaacagcttaacatggatgtggaaaatgattttaacacgttagacggtagtttaatgagtgaactccatatacctatgcatacaaccgacagtatgagtggtggtgaaaaagcaaaatataaattagctaatgtcatatcaaattatagtccgatattacttttagatgaacctacaaatcacttggataaaattggtaaagattatctgaataatattttaaaatattactatggtactttaattatagtaagtcacgatagagcacttatagaccaaattgctgacacaatttgggatatacaagaagatggcacaataagagtgtttaaaggtaattacacacagtatcaaaatcaatatgaacaagaacagttagaacaacaacgtaaatatgaacagtatataagtgaaaaacaaagattgtcccaagccagtaaagctaaacgaaatcaagcgcaacaaatggcacaagcatcatcaaaacaaaaaaataaaagtatagcaccagatcgtttaagtgcatcaaaacaaaaaggcacggttgagaaggctgctcaaaaacaagctaagcatattgaaaaaagaatggaacatttggaagaagttgaaaaaccacaaagttatcatgaattcaattttccacaaaataaaatttatgatatccataataattatccaatcattgcacaaaatctaacattggttaaaggaagtcaaaaactgctaacacaagtacgattccaaataccatatggcaaaaatatagcgctcgtaggtgcaaatggtgtaggtaagacaactttacttgaagctatttaccaccaaatagagggaattgattgttctcctaaagtgcaaatggcatactatcgtcaacttgcttatgaagacatgcgtgacgtttcattattgcaatatttaatggatgaaacggattcatcagaatcattcagtagagctattttaaataacttgggtttaaatgaagcacttgagcgttcttgtaatgttttgagtggtggggaaagaacgaaattatcgttagcagtattattttcaacgaaagcgaatatgttaattttggatgaaccaactaattttttagatattaaaacattagaagcattagaaatgtttatgaataaatatcctggaatcattttgtttacatcacatgatacaaggtttgttaaacatgtatcagataaaaaatgggaattaacaggacaatctattcatgatataacttaa

SEQ ID NO: 419940 - DNA, 333 bp, Staphylococcus aureus; identical to SEQ ID NO: 413588

SEQ ID NO: 419941 - DNA, 525 bp, Staphylococcus aureus
atgatgagatatttaaaaagagttgtactgtacataattgttatggttttgagtgtttttataataggttgtgataaatcaagcgatacttcagaaaagccaaaagaagattcaaaagaagcacaaattaaaaagagttttgcaaaaacgttagacatgtatcctactgaaaatctagaagacttttatgacaaagagggatatcgagatggagaatttaaaaaagatgataaaggtacttggctaattagatccgaaatagttaaacagccaaagggcaaagtgatgaaaacaagaggtatgcaattatatattaatagaaataccaaaacagccaaaggtttctttgttttgaaagaaataagtgaaaataataatcgtgtaaataaagataaggaggaaaaatacgaagtgaaagtggtaggaaataaaattattcctactgaacaaattaatgacgagaaaataaaaaaagaaattgaaaacttcaagttttttgtgcaatatggaaatacacaacgatga

SEQ ID NO: 419942 - DNA, 225 bp, Staphylococcus aureus
gtggtaaactacggagaggaggcaaaaaaggacaaggaattagaatttgaaatgaatcagtatgaagggtatcagtattgtaatcaaaagacagcttatacaggattacattttatggaatgttatttgtacgacatcaatgataaaataatttgtcatgatagttttggtctttttataaatgataataatagagaagtgagaaaattaggaatagaggattga

SEQ ID NO: 419943 - DNA, 1134 bp, Staphylococcus aureus
  misc_feature (1088)..(1097): n is a, c, g, or t
atgtttcaattacttgcagtttgtccgatgggattagaagctgttgttgctagggaaattcaagaattaggctatgaaacaaatgttgaaaatggtcgtatattttttgaaggagacgcaagtgcaattgtaaaggcaaatttatggttgcgcacagcagaccgaatcaaaattgttgttggacgttttaacgcaacaacgtttgacgaattattcgaacaaaccaaagcgctcccttgggaatctataattgataaagaaggtaacttcccagttcaaggtagaagcgttaaatcaacactacatagtgtgccagattgtcaggcgataactaagaaagctattgttgaacgattacgtcgcgcatataacgaaaaaggttggttaaatgaatcaggtgccaaataccctgttgaagttgccattttaaaagataatgtattattgactatcgacacatcaggttctggtttgaacagacgtggttatagattagcacaaggtgaagcaccaattaaagaaacgttggcagcaagtttaatccgtcttgcaaactggaaaggtgatacacctttaattgatccattttgcggttcgggtacaatagctatagaagcttgtttaattgctcaaaatatcgcacctggttttaatcgcgagttcgtatcagagcaatggaacatcatgccagcaaatatttatgatgattaccgtgatgaagcggataagatggctgattatgataaagaaatcgaagtatatgcttctgatatcgatcctgaaatgatagagattgctaagcgtaacgctgaagaagttgggttgtctgatattattaaatttagtgtaaaagatgtcaatacattaacaattgatacagaagaaccggtggcgttaattggaaatcctccatatggtgaacgtattggtgatcgtgaagaagttgaagaaatgtaccgttatattggtaaactaatgaaacaacatccatttttatctacatacattttaacaagtaataaagaatttgaatatttagtagatcgtaaagcaacgaagcgacgtaagttatttaatggatatatagnnnnnnnnnngatatatagaatgtacttattatcaatactggggtaa

SEQ ID NO: 419944 - DNA, 210 bp, Staphylococcus aureus
ttgaaaaacggacgtaaattcttaactaaaggcgataaatgtaaagtatctattcgtttcagagggcgtgccattacgcataaggaaattggtcaacgtgtgctagaaaaatatgcagatgaatgcaaagatatagcaacagttgaacaaaaacctaaaatggacgggcgtcaaatgtttatcatgttagcgccaacagctgaaaaataa

SEQ ID NO: 419945 - DNA, 522 bp, Staphylococcus aureus
atgaaagtcgaagtttataaaggagcgcaaggcaaacataaccttaaagattatgaagaaacatataatacttttgattggaaagacgtagaacaagcattttcttggagtgaaactggaaaaatgaacatggcatatgaatgtatagatcgccatgtagatcaaggattaggggataaaatagcgttaaattacaaagatgagcacagaaaagaatcgtatacttataaagatatgcaacggttatctaataaagcagcgaatgttttgtctgaacatgcagaagttgacaaaggtgacagagtatttatatttatgtcgcgtacacctgaactatattttgcgttgttaggtgttttaaaaattggtgcaattgttgggccgttatttgaagcatttatggaaaaggcagttgctgatagattagagaacagtgaagctaaagtgttaattactaataaggcattgttacctcgagtacctgtagataaattaccgaacttgaaaaaattgttgtcgtag

SEQ ID NO: 419946 - DNA, 1110 bp, Staphylococcus aureus
atggagtttgaaacatttaatttaactgatttatatactattagttcaggtttatcaaaaaatagaaaatattttggtactggtacaccttttttaacatttaaagatgtattcgataatttaatattacctaatgagttttctgggcaagttataactgaagaaaaagaaagagaaaagtattcagttaaaaaaggagacctttttttaacaagaactagtgagaaacaaaatgagttaggtataagtgcagtagctttaaaagactataaaaatgcgacttttaatggatttaccaaaagattaagaccaaacaaatattgtgagaataaattgttaccagtatttgctgcattttattttagaagtaataattttagaaatcaagtaaattctatgtctatcatgtctacaagagcaagtttaaataacgaaatgatttcaaaacttaaaattactatacctagtcttcaaaatcagatgaaaattagtcatatactattagcacttttaaaaaaagaaaaaatcaatcaaaaaatcatagcaaatcttgaagaactttctcaaacactattcaaacgttggtttgttgattttgaatttcctgatgaaaatggaaatccatacaaatcaagcggtggagagatggttgatagtgaattgggtgaaatacctaggagttggaaaaatgattatttatataatgaaaaaattattataattggtagggtaggaactcatggtgtaatccaaaggttttctacaagaacatggccatcagataatacttttgtaataacaagtgattttgaaagcattatatatcaagtacttaaaagtatagactatatatcattgaatagaggttctacacaacctctattatctcaaaaagatattaagaatactaaagtagtaatgcccaccaatgcaactttgctttcaaaatatcaaaagaaaaacaatcatattttaaaaatgatggatcaaaaaatcatagaaaacaagaaattaacacaactccgtgacacattactaccaaaattaatgtcaggtgaaattgagatacctgatgacatcgaggtgaatgaagatgagctttcaatttag

SEQ ID NO: 419947 - DNA, 264 bp, Staphylococcus aureus
  misc_feature (246)..(255): n is a, c, g, or t
gtgatagacaatacaaactttgcgttaacctatccagttgataacaagtactatattgatgatttcttagatgtgatgttagagctttaccgcgaacatttaaatgtaactcataactttaagatttatccatattgcattgcaggtaatgactgggtatatgattgccaaaatttaacgcttacagaacaaaaattaaaaagtgatgagctctactcaattaaatatgacctagatattaaagannnnnnnnnnttgatttag

SEQ ID NO: 419948 - DNA, 249 bp, Staphylococcus aureus
atggcatcatcgcattttgaaattaataaagaagaaatttcattaaaagaattagattttaaattgagaaaacaattaattgataatcatgatctttataaaacagaacctaaagacagcaaaattacagttactatgaataatggagactattacacatttgaattaaataaaaagttacaagaacaccgcatgggtgatgtaatcgatggtactaaaataaaagaaattaatgttgaattaaactaa

SEQ ID NO: 419949 - DNA, 375 bp, Staphylococcus aureus
  misc_feature (333)..(342): n is a, c, g, or t
atgaataaacacaagaaaggttctatttttggaataataggacttgttgtcatatttgctgttgtctcatttttatttttctcaatgatatccgatcagatatttttcaaacatgttaaatccgacattaagattgaaaagttaaatgttacattaaacgatgcagcaaagaaacaaataaataattatacgagtcaacaggtatcaaataaaaagaatgatgcatggagagatgcatctgcaactgaaattaaaagtgcaatggatagcggtacttttatcgataatgaaaagcaaaaatatcaatttttagatttatcaaagtatcaaggnnnnnnnnnnggattgataaaaatagaattaaacgtatgttag

SEQ ID NO: 419950 - DNA, 534 bp, Staphylococcus aureus
atgattcatggtggtttaacgccacgtgaacgtaaacaacaaatgaaacgtatacgtaatttagaattccaatacgttattgccagcgatttagcatctcgtggtattgatattgaaggtgttagtcatgtcatcaattttgatgtgccaaatgatattgacttctttacgcatagagttggacgaactggtcgtgggaattataaaggtgtagcaattacgctttatagtcctgatgaagaacacaatatttcattaatagaagatcgcggttttgtattcaatactgttgatattaaagatggtgagttaaaagaagttaaagcgcacaatcagcgtcaagcaagaatgcgcaaagatgaccatttaactaatcaagtgaagaacaaagttcgaagtaaaattaaaaacaaagttaaaccaggttataagaagaaatttaaacaagaagttgaaaaaatgaaacgtcaagagcgtaaacaatttagtaagcagcaaaatagacaaaaacgtaagcaaaacaaaaaaggttag

SEQ ID NO: 419951 - DNA, 603 bp, Staphylococcus aureus
atgttaattagtctcgtaatccctgtttttgctttgttagttattggtggtattatttgggtgattatagaaggtatagtacatatttcaaaaaagaataaagcaatcgataactttttaaaccaagttaataaagtaagtgagacatataaattcgctactgcttttttatttctaatcttggctacggctggtatttctcaattttatctatattatatagtatcagcgtttcttttttggcttgtcatacttacctttggtattgcaggtatcatttttttaatgccatatggattatgtttcctaccactttataagcaaaaaaagaaaaaacagacatttaaaaaatacatggtttacactacgattggtttgtcaatttgtctaggcttatctctagttttggttcacactacgaaaatttatatggacgaaggtggcgtaagatactattacggtagttttgtaatgaaacaagcgggcggttatgcttatttagctttagcggtactttcaacgttgttaattgttgcgaaaaaagctacaaataaaaataaagaaatcgaaaccgtcgacaatacaaatataacggaaagataa

SEQ ID NO: 419952 - DNA, 720 bp, Staphylococcus aureus
  misc_feature (685)..(693): n is a, c, g, or t
atggaaaatattttagaagtcaaccaaataaaaaaatactacaaaattaaaactggattattacaaaaaactcagtacgttaaagctgttgatgacgtatcgttttcaataaaaaaaggacaaacttttggattagtaggagaatcgggttgtggtaagtcaacgttaggtaaagtgattatcaggcttgaagatgcaacttcaggctcaataattgttaatggtgaagatataacaagattacaaggtaaaaaactcagaaaatcacgacaacaatatcagatgatatttcaagatccgtatgcatcattgaatccgatgcaaatggttggagatatcatttcagaacctattttaaattataaaaaattgccaaaagaagaaataaaaaaagaagtactatatttattaaaatgtgttggcctaagtgaagatgcatattataaatatgcacatgaattttcaggtggacagagacaaagagtgggaattgcaagagcattggctttgcgtccgagtttaattgttgctgatgagcctgtaagtgcattagatgtatctgttcaatctcaagtactgaatttattaaaagatttacaagaacaatttaacttaagctatttatttatcgcacatgatttaagtgtagtaaaacatataagtgatgtcattggagttatgtatnnnnnnnnnttcgtcggcagcgtcagatgtgtataa

SEQ ID NO: 419953 - DNA, 303 bp, Staphylococcus aureus
atgtatttaggtcatatagttgaaatcgcatctgataaagaaatttatgaaaatcccaaacatccatatacaaaagcgttgatttcatcaataccacaaattgataaacataataacaatagaattatattaaaaggagaattaccttcgccaagtaatccgccgcaaggttgtccttttcatacaagatgtccgattgcaaaagataaatgtaaagaaaatataccacaattaaaggacattggtgatgaacatcaagttgcttgtttttatgtaaataaagtaggtgatttaaatggttaa

SEQ ID NO: 419954 - DNA, 1011 bp, Staphylococcus aureus
atgaaaggtaaatttttaaaagttagttctttattcgttgcaactttgacaacagcgacacttgtgagttctccagcagcaaacgcgttatcttcaaaggctatggacaatcatccacaacaaacgcagtcaagcaaacagcaaacacctaagattcaaaaaggcggtaaccttaaaccattagaacaacgtgaacacgcaaatgttatattaccaaataacgatcgtcaccaaatcacagatacaacgaatggtcattatgcacccgtaacttatattcaagttgaagcacctactggtacatttattgcttccggtgtagttgtaggtaaagatactcttttaacaaataaacacgtcgtagatgctacgcacggtgatcctcatgctttaaaagcattcccttctgcaattaaccaagacaattatccaaatggtggtttcactgctgaacaaatcactaaatattcaggcgaaggtgatttagcaatagttaaattctcccctaatgagcaaaacaaacatattggtgaagtagttaaaccagcaacaatgagtaataatgctgaaacacaagttaaccaaaatattactgtaacaggatatcctggtgataaacctgtagcaacaatgtgggaaagtaaaggaaaaatcacttacctcaaaggcgaagctatgcaatatgatttaagtacaactggtggtaattcaggttcacctgtatttaatgaaaaaaatgaagtgatcggaattcattggggcggtgtaccaaatgaatttaatggtgcggtatttattaatgaaaatgtacgcaacttcttaaaacaaaatattgaagatatccattttgccaacgatgaccaacctaataacccagataatcctgataaccctaacaatcctgataaccctaacaacccagatgaaccaaataaccctgacaaccctaacaaccctgataatccagacaatggcgataacaataattcagacaatcctgacgctgcataa

SEQ ID NO: 419955 - DNA, 207 bp, Staphylococcus aureus; identical to SEQ ID NO: 413665

SEQ ID NO: 419956 - DNA, 729 bp, Staphylococcus aureus
atgaaaaagacactgggatgtttacttttaattatgcttttagtcgtagcaggttgttcttttggtgggaatcataaattatcatcaaagaaatcagaagaatcaaaacaagaaactgtaaaaaaagaatcggaagaagagaaagacccagatttagagaaatttgaagaaatagagaagaaaatgaaaggaattaaagatgcgccatctttagataagttggatccattaatgacagaaaagtcgtttacgaatagtaaagggattcaaggatggaaagattacaaagaattaatgggtaaagtggaacttgcagattatagatttacaaaagattcaaaaggatcttctataaaagatgttgatgcattctttaaaggtaagaaaggtataaaaaggaaagtgattgaaacacacgatgatgtaaaacaagttgattattggtatgtagatccagatggaaagaaaattggcaattcaaacacacctgttttttacgcagaaattatgacaaaatataaagatggaaagttagtttatgcatcagtcgaaccaggatcttacgtaatacataaagatgatgcaattaaatatgacgattattctaagttaaaaaaattaagtcagctaactaaacttgatcatccaaaaccagttccatatagcgtagctcaaatcaaatctttcggagtacctttaacaagcgtttcatttatgacacatggataa

SEQ ID NO: 419957 - DNA, 342 bp, Staphylococcus aureus
atgttagataaaatatcaaacacgttaaagaagaagttatatcaaaagggtgaaactcacagtggaaatgacaatttaatcatacaaagatacttaattgctcaaataggaaaaaattattctgaagaagcattggctacaaaatccataaatggaaacgatttgttatctttagcatatgagaaagttttagaaggtgcgaacatatttggtggttcatatatttggatagagtatgaagatgtttatagattaagagaattttatagaaaatttggatttacagaaatcaaagatcatacaagtgaaaataatttgaagatggctattcttaaaatataa

SEQ ID NO: 419958 - DNA, 324 bp, Staphylococcus aureus
atgaaatttatggcagaaaataggctgacgttaacaaaaggaacagcaaaagatattatagaacgattttatacgagacatgggattgaaacattagaaggctttgatggcatgtttgttacacaaactttagaacaagaagattttgatgaagtgaaaattttaacagtttggaaatcaaagcaagcttttacggattggttaaaatctgatgtctttaaagcagcgcataaacatgttagaagtaaaaatgaagatgaaagtagcccgattatcaataacaaagtaattacatatgatataggctatagttacatgaaataa

SEQ ID NO: 419959 - DNA, 507 bp, Staphylococcus aureus; identical to SEQ ID NO: 406137

SEQ ID NO: 419960 - DNA, 315 bp, Staphylococcus aureus; identical to SEQ ID NO: 406980

SEQ ID NO: 419961 - DNA, 186 bp, Staphylococcus aureus; identical to SEQ ID NO: 405404

SEQ ID NO: 419962 - DNA, 348 bp, Staphylococcus aureus
gtgataagtgctgattcagctgaacaaaaaagtatagctgagattagaaagcatggtataggaagaattaaacctgcaatcaaaggtaaagatagcattatggccggaattcaatttattagtcaatttgaaattatagttgatgaacgatgttttaaaactattgaagaattagataactatacatggaaaaaagataaaaataccggcgaatactataacgaacctgtagatacatataatcattgcatagatgcgcttcgctattctgtatgtaatttaatttttaaagataagaaaactgaaaataaaatagatgatttaacaaggattagaaacatgttctaa

SEQ ID NO: 419963 - DNA, 291 bp, Staphylococcus aureus
gtgaaattcccagtaacaataaataaatttgaaaacatagtttcaaatgaatttgtgttctataatgcaagcaaaattacaattaatgatttaagtataaaacttaaatcagcaattgcaaatgatcaagggataactaaacatgacatagaacttgctgaacgcgcagtgtataaagtgtattttaaaaatggttcgtcaaaatatgtagacttaaaaactgagtataaagatgaaagagtatttaaagcaactgacattaaaaaggtagatattgaacttaaattctaa

SEQ ID NO: 419964 - DNA, 729 bp, Staphylococcus aureus; identical to SEQ ID NO: 411620

SEQ ID NO: 419965 - DNA, 1428 bp, Staphylococcus aureus; identical to SEQ ID NO: 411622

SEQ ID NO: 419966 - DNA, 1464 bp, Staphylococcus aureus; identical to SEQ ID NO: 411623

SEQ ID NO: 419967 - DNA, 4500 bp, Staphylococcus aureus; identical to SEQ ID NO: 417051

SEQ ID NO: 419968 - DNA, 885 bp, Staphylococcus aureus; identical to SEQ ID NO: 411625

SEQ ID NO: 419969 - DNA, 1113 bp, Staphylococcus aureus; identical to SEQ ID NO: 411626

SEQ ID NO: 419970 - DNA, 783 bp, Staphylococcus aureus; identical to SEQ ID NO: 411627

SEQ ID NO: 419971 - DNA, 486 bp, Staphylococcus aureus; identical to SEQ ID NO: 411628

SEQ ID NO: 419972 - DNA, 396 bp, Staphylococcus aureus; identical to SEQ ID NO: 411629

SEQ ID NO: 419973 - DNA, 270 bp, Staphylococcus aureus; identical to SEQ ID NO: 411630

SEQ ID NO: 419974 - DNA, 1005 bp, Staphylococcus aureus; identical to SEQ ID NO: 411631

SEQ ID NO: 419975 - DNA, 843 bp, Staphylococcus aureus; identical to SEQ ID NO: 411632

SEQ ID NO: 419976 - DNA, 660 bp, Staphylococcus aureus; identical to SEQ ID NO: 411633

SEQ ID NO: 419977 - DNA, 1143 bp, Staphylococcus aureus; identical to SEQ ID NO: 411635

SEQ ID NO: 419978 - DNA, 915 bp, Staphylococcus aureus; identical to SEQ ID NO: 411636

SEQ ID NO: 419979 - DNA, 1338 bp, Staphylococcus aureus; identical to SEQ ID NO: 411637

SEQ ID NO: 419980 - DNA, 735 bp, Staphylococcus aureus; identical to SEQ ID NO: 411638

SEQ ID NO: 419981 - DNA, 675 bp, Staphylococcus aureus; identical to SEQ ID NO: 411639

SEQ ID NO: 419982 - DNA, 363 bp, Staphylococcus aureus; identical to SEQ ID NO: 411640

SEQ ID NO: 419983 - DNA, 2706 bp, Staphylococcus aureus; identical to SEQ ID NO: 411641

SEQ ID NO: 419984 - DNA, 1485 bp, Staphylococcus aureus; identical to SEQ ID NO: 411642

SEQ ID NO: 419985 - DNA, 1203 bp, Staphylococcus aureus
atggctaagattccagttacggtattaagtggttatttaggctcggggaaaacaacgttgttaaatcatattttacaaaatcgagaaggtcgacgtattgcggtaattgtaaatgatatgagtgaagtcaatatcgataaagatcttgtcgcagatggtgggggactatcgcgcacagacgaaaaattagtcgaactttctaatggttgtatctgttgtacacttagagacgatttattaaaagaagttgagcgtttagtgaaaaaaggtggcatcgatcaaattgttattgagtcaacagggatttcagagccagtacctgttgcacaaactttctcatatattgatgatgaacttggcattgatcttacagcgatttgccgtttagatacaatggttacagttgtggatgctaaccgcttcgtacatgacatcaactcagaagatttattgatggatcgtgatcaaagcgttgatgaaacagatgaacgttcgattgctgatttattaattgaccaagttgaattttgtgatgtattgattattaataaaattgatttaatcagtgaagaagaacttgcgaagttagaaaaagtgttaagtgcattgcaaccgactgctaaaatcattaagacaacaaattctgaagtagatttaaaagaagtcttgaatacgcagcgttttgattttgaaaaagcgagcgagtcagcaggatggatcaaagaacttgagtctggtgggcatgcatcgcatacacctgaaacagaagaatatggtatatcatcgtttgtatataaacgtcgtctacctttccatgctaaaaggttcaatgattggttagaaagcatgccaaataatgtcgttcgatcaaaaggtatcgtatggctagcacaatacaatcacgtagcatgtttattatctcaagcagggtcatcttgcaatattcatccagttacatattgggtggctagtatgtctgaagcgcaacaaacacaaatattagcagaacgtcaagatgtcgcagctgaatgggatccagaatatggcgatcgtcatacacaatttgtcattattggtacagaattagatgaagaaaaattaacaaaagaactcgacgcatgcttagtcaatgcgcaagaaattgatgcagattggcaacaatttgaagacccatatcaatggcaaattagaccggcacgataa

SEQ ID NO: 419986 - DNA, 195 bp, Staphylococcus aureus; identical to SEQ ID NO: 410129

SEQ ID NO: 419987 - DNA, 309 bp, Staphylococcus aureus; identical to SEQ ID NO: 411645

SEQ ID NO: 419988 - DNA, 324 bp, Staphylococcus aureus; identical to SEQ ID NO: 410127

SEQ ID NO: 419989 - DNA, 1323 bp, Staphylococcus aureus; identical to SEQ ID NO: 410126

SEQ ID NO: 419990 - DNA, 141 bp, Staphylococcus aureus; identical to SEQ ID NO: 414477

SEQ ID NO: 419991 - DNA, 282 bp, Staphylococcus aureus; identical to SEQ ID NO: 407864

SEQ ID NO: 419992 - DNA, 165 bp, Staphylococcus aureus
atggtaagagtaaaagttggaattactttaactgaagatacgttggctaggttagaagaaatttgtaaagaaatggggttaagtaaatctcaagctttatctatgttagttaataaagagtatttacaaaaatatcaagatgataacaaagtttttaaggcataa

SEQ ID NO: 419993 - DNA, 426 bp, Staphylococcus aureus
atgacaaatatagattggataatcacctctaatagagtattcaacaatccaagtaacaatttattaatcgatgagcctataacaagcatttcgctgtttaatgttcctagtcaatataccttcacaatatcttttggaatctcaaatatagatctaaatgatgtacaaactataaatcttagaattggaaatttagatacggaaaaagaaattgttaacgcacctttatatatagataaagcaaaggaaaacgaagtgaaaaacaaacgtgctaacggacttgtagattttgtttcaaccgttacattgaataatttccttttcgaagaaacaggtaatcattatataacaatgaagttgggcgaaagcactcagacttgttattttaacgtcatgttaaatcaggagttagaagatggtaaataa

SEQ ID NO: 419994 - DNA, 372 bp, Staphylococcus aureus
atggtaaataaaaagtatcacactgacgcagctagacctaattttcaagttgtagatgataaatataaagaatctttacttaacaacattcgccagaataatggtaaaatgaaagaaaaaggtaactattctggaggtggtaagatgaatggaaaatatattaccaaagaagtatttgaacagtttgaaaagcgtatagacaataagttagattctttacctgacagaatggctgataaaatggatgctaaaataagcggtttagaagctaggcagacaaaatggtttgtaggaatagctataagtacagctattggtggtttaagtctgatagtaggagcagtaggattgatcgtcaacttatttatatag

SEQ ID NO: 419995 - DNA, 210 bp, Staphylococcus aureus; identical to SEQ ID NO: 409578

SEQ ID NO: 419996 - DNA, 492 bp, Staphylococcus aureus; identical to SEQ ID NO: 409556

SEQ ID NO: 419997 - DNA, 174 bp, Staphylococcus aureus; identical to SEQ ID NO: 412396

SEQ ID NO: 419998 - DNA, 162 bp, Staphylococcus aureus
atgagcaacatttataaaagctacctagtagcagtactgtgctttacagtcttagcaattgtacttatgccttttctgtacttcactacagcatggtctcttgcaggattcgcaagtatcgcaatactcatattttttaaagaatacttttatggaaagtaa

SEQ ID NO: 419999 - DNA, 225 bp, Staphylococcus aureus
atgactaaaacacttgaattaagttttaaatcttcactagacaagcctgtaaaactgcaattaccacaattaaacaacgtagtgaccgagcaagttgtacgtgatagtatgaatgcattagtagatttaaatattataaagtcaaatagtggtactatcaccaaagtacattctgctcaaattattgataaaacaacaactgttttatttgaagataagaaatag

SEQ ID NO: 420000 - DNA, 402 bp, Staphylococcus aureus
atgtttaaaacactctatgctagaattgcgatttattccattacggttattttatttagtgcattaataagttttgtattaacaaatgtttactatcattataatttaaaagcatctaatgacgcgaaaatcatgaagacgcttaaagaagcaagacaatatgaacaatcagctaaaccaacgcacattcaacaatatttcaaacatttagggcaaatgaattaccaaataatgaccgttgatcaaaaaggtcataagacattttatggggagccatttagagaagatactttatcacaaaatgctattaacaacgtattaaataatcaagattaccatggtattaaagataaaccattcgcattattcgtaactggattttttcgacaatgtaacagataa

SEQ ID NO: 420001 - DNA, 810 bp, Staphylococcus aureus
gtgacggtatcgataaacctgttgttcctgaacaacctgatgagccgggtgaaattgaaccaattccagaggattcagattctgacccaggttcagatagtggttcagattctggcagcgattctaattcagatagcggttcagattcgggtagtgattctacatcagatagtggttcagattcagcgagcgattcagattcagcaagtgattcagattcagcgagtgattcagattcagcaagtgattcagattcagcgagtgattcagattcaacgagtgattcagattcaacgagtgattccgattcagcaagcgattcagattcagatagtgactcagactcagacagcgattcagattcagatagtgactcagactcagatagcgattcagattccgacagtgactcggattcagatagcgattccgactcagacagtgactcagattcagatagcgactcagactcagaaagcgactcagattcagacagcgattccgactcagatagtgattcagattcagacagcgactcagactcggatagtgaatcagactcagacagtgactcagactcagacagcgactcagactcagatagcgactcagattcagatagcgattcagactcagacagcgactcagactcagatagcgattccgactcggatagcgactcagactcagatagcgattccgactcggatagcgattcagaatcagatagtgactcagattcagatagcgattccgactcagatagcgactcagattccgacagcgattcagattcagacagtgatttag

SEQ ID NO: 420002 - DNA, 510 bp, Staphylococcus aureus
ttgtatagatgtgcatataattttaactttgcaacagaaccaattaatatatatattataaaggaggatatacctttaggaacagccggtcctctatctttattaaaaaacgtagatgatgatttaatagttattaatggggatattttaactgatgtaaatttcaaagatttctatcagttctataataaaaatgatagtttagtaacaattttaaccatacctttaacaacaagtattccttttggtgttttaactgttaatgaaaatcaaaatataacaatgatagaagaaaaacctaaaataaaaaactatatcagtggtggatgctacatctttaataaagaaataataaaaaaagtacctaaaaataaaaatcttaaaatgactgattttttagaaaaattaattaacgataatatttctatttcttcttatgttcataatggagtttggatagacgcaggaacttgggaagatttaaaaaaagctaaatccatatttttatag

SEQ ID NO: 420003 - DNA, 273 bp, Staphylococcus aureus
atgaatcggctaaatacaaattactttgataacttttatattgattggcagaacaatgaaatatcagaaaattatgttgaattttgtcaaaagcaaattaataacttaagtcacattgttccttcattaaaaaaagagaaaagaaaaatcatcgatacttgttgtggctgtggttttcattctaaatttttgatagataaaggtcatcatgttattagctttgacaaatctgaggaaatgttgaactttgcatataaaaaaatggcattttag

SEQ ID NO: 420004 - DNA, 315 bp, Staphylococcus aureus
atgtcttattccattgttagagtttcaaaagttaaatctggaacaaatacaacgggcatacaaaaacatgttcaaagagaaaataataattatgaaaatgaagatatagaccatagtaaaacttacttaaattatgatttggtaaatgctaataaacagaattttaataacttgattgatgaaaaaatcgaacagaattatacaggcaaaagaaaaattagaacagacgcgattaaacacattgatggtttaattacatcagacaatgatttctttgataatcaaacgccagaagatacaaagcagtttttttga

SEQ ID NO: 420005 - DNA, 666 bp, Staphylococcus aureus
atgaactatttcagatataaacaatttaacaaggatgttatcactgtagcggttggctactatctaagatatgcattgagttatcgtgatatatctgaaatactaagagaacgtggtgtcaacgttcatcattcaacggtctaccgttgggttcaagaatatgctcccgttttgtatcaaatttggaagaaaaaacataaaaaagcgtattataagtggcgtgttgatgagacatatatcaaaattaaaggacagtggtgttatctgtatcgcgcgattgatgcagatggacatacattagatatttggttacgcaaaaaacgagatcatcaatcagcatatgcgtttattaagcgccttattaaacaattcggtaaacctcaaatgataattacagatcaagcaccttcaacgaaggtagccatggctaaaataattaaagtgtttaagttgaaacctaactgtcattgcacatctaaatatctcaataacttcattgaacaagatcatcgtcacattaaggtgagaaagacaagatatcaaagtgtcaatacggcaaaaaatacactcaaaggcattgaatgtatttacggattatataaaaaaaccgtaggtctcttcagatctacggattttcaccatgccacgaaattagttatatgttag

SEQ ID NO: 420006 - DNA, 759 bp, Staphylococcus aureus
atgacaatattatcagtgcaacatgtttcaaaaacatacggtaaaaagcacacatttcaagcacttaaagatattaactttgacatacaaaaaggcgaattcgttgcgattatggggccttctggatcaggtaagacaaccttattaaatgtactaagttcaattgaccaaatttctagcggtagcgtgattgctaacggacaagagcttaataaacttaatcaaaaagcacttgccaaattccgtaaagaatcattaggtttcatcttccaagattacagtattctgccgacattaactgttaaagaaaacattatgttacctttatctgttcaaaaaatgtcgaaggcaacaatggaagaaaattacaaagcgatcacgacagcattaggtatttatgacctaggaaataaataccctagcgaattatctggtggtcaacaacaaagaactgcagcagcgagagcatttgttcacaaaccacaaatcatatttgcagatgagccaacaggcgcactcgactcgaaaagtgcaaatgacttattacaacgtttggaagaaatgaataaatcgtttgatacaactattgtcatggttacacatgatccggttgcagcaagttttgcagaacgtgtcatcatgctaaaagatggccaaattcatacacaactttatcaggaaggacgttctaaacaggccttttatgaagacattgtacatcttcaatcagtattaggtggtgtctcaaatgacatttaa

SEQ ID NO: 420007 - DNA, 147 bp, Staphylococcus aureus
atgaaatactttattccagcttggtacgatgaccaacgatggtggcaagacacgactgtgccgtattatcaactacaaaataagacggaatttgacgatatgattagtttaatgggaatgcaccttgaaaatgacttagattattaa

SEQ ID NO: 420008 - DNA, 957 bp, Staphylococcus aureus; identical to SEQ ID NO: 418208

SEQ ID NO: 420009 - DNA, 6816 bp, Staphylococcus aureus
atgagtaaaagacagaaagcatttcatgacagcttagcaaacgaaaaaacaagagtaagactttataaatctggaaaaaattgggtaaaatccggaattaaagaaatagaaatgttcaaaattatggggctaccatttattagtcatagtttagtgagtcaagataatcaaagcattagtaaaaaaatgacgggatacggactgaaaactacggcggttattggtggtgcattcacggtaaatatgttgcatgaccagcaagcttttgcggcttctgatgcaccattaacttctgaattaaacacacaaagtgaaacagtaggtaatcaaaactcaacgacaatcgaagcatcaacatcaacagccgattccacaagtgtaacgaaaaatagtagttcggtacaaacatcaaatagtgacacagtctcaagtgaaaagtctgaaaaggtcacttcgacaactaatagtacaagcaatcaacaagagaaattgacatctacatcagaatcaacatcctcaaagaatactacatcaagttctgatactaaatctgtagcttcaacttcaagtacagaacaaccaattaatacatcaacaaatcaaagtactgcatcaaataacacttcacaaagcacaacgccatcttcggtcaacttaaacaaaactagcacaacgtcaactagcaccgcaccagtaaaacttcgaactttcagtcgcttagctatgtcaacatttgcgtcagcagcgacgacaaccgcagtaactgctaatacaattacagttaataaagataacttaaaacaatatatgacaacgtcaggtaatgctacctatgatcaaagtaccggtattgtgacgttaacacaggatgcatacagccaaaaaggtgctattacattaggaacacgtattgactctaataagagttttcatttttctggaaaagtaaatttaggtaacaaatatgaagggcatggaaatggtggagatggtatcggttttgccttttcaccaggtgtattaggtgaaacagggttaaacggtgccgcagtaggtattggtggcttaagtaacgcatttggcttcaaattggatacgtatcacaatacatctaaaccaaattcagctgcaaaggcgaatgctgacccatctaatgtagctggtggaggtgcgtttggtgcatttgtaacaacagatagttatggtgttgcgacaacgtatacatcaagttcaacagctgataatgctgcgaagttaaatgttcaacctacaaataacacgttccaagattttgatattaactataatggtgatacaaaggttatgactgtcaaatatgcaggtcaaacatggacacgtaatatttcagattggattgcgaaaagtggtacgaccaacttttcattatcaatgacagcctcaacaggtggcgcgacaaatttacaacaagtacaatttggaacattcgaatatacagagtctgctgttacacaagtgagatacgttgatgtaacaacaggtaaagatattattccaccaaaaacatattcaggaaatgttgatcaagtcgtgacaatcgataatcagcaatctgcattgactgctaaaggatataactacacgtccgtcgatagttcatatgcgtcaacttataatgatacaaataaaactgtaaaaatgacgaatgctggacaatcagtgacatattattttactgatgtaaaagcaccaactgtaactgtaggcaatcaaaccattgaagtgggtaaaacaatgaatcctattgttttgactacaacggataatggtactgggactgtgacaaatacagttacaggattaccaagcggattaagttacgatagtgcaacgaattcaatcattgggacaccaacaaaaattggtcaatcaacagtgacagttgtgtctactgaccaagcaaataacaaatcgacgacaacttttacaataaatgttgtggatacgacagcaccaacagtgacgccaataggagatcaatcatcagaagttttttctccaatatcaccgattaaaattgctactcaggacaatagtggtaatgcagtaacaaatacagtcacaggattgccgtctggattaacattcgatagcacaaataatactattagtggtacaccaacaaacattggtacaagtactattacaatcgtttctacagatgcgagtggtaacaaaacgacaacaacttttaaatatgaagtaacaagaaatagcatgagtgattccgtatcaacatcaggaagtacacaacaatcccaaagtgtctcaacaagtaaagctgactcacaaagtgcatcaacgagtacatcaggatcgattgtggtatctacatcagctagtacctcgaaatcgacaagtgtaagcctatctgattctgtgagtgcatctaagtcattaagcacatctgaaagtaatagtgtatcaagctcaacaagcacaagtttagtgaattcacaaagtgtatcatcaagcatgtcggattcagctagtaaatcaacatcattaagcgattctatttcaaactctagcagtactgaaaaatccgaaagtctatcaacaagtacatctgattcattgcgtacatcaacgtcactcagtgactcattaagtatgagtacatcggggagcttgtctaagtcacaaagtctatcaacaagtacatcagaatcgtctagtacgtcacaatcattaagtgacagcacatcgaatgcaatcagcacatcagaatcattgagcgagtcagctagcacctcggactctatcagtatttcaaatagcatagccaactctcaaagtgcgtcaacaagcaaatcagattcacaaagtacatcaatatcattaagtacaagtgattcaaaatcgatgagtacatcagaatcattgagcgattcgacgagcacaagtggttctgtttctggatcactaagcatagcagcatcacaaagtgtctcaacaagtacatcagactcgatgagtacttcagagatagtaagtgactctatcagtacaagtgggtcattatctgcatcagacagtaaatcaatgtctgtaagtagttcaatgagcacgtctcagtcaggtagtacatcagaatcattaagtgattcacaaagtacatctgattctgatagtaagtcattatcactaagtactagtcaatcaggttcaacaagtacatcaacgtcgacaagtgcttcagtacgtacttcggaatcacaaagtacgtctggttcaatgagtgcaagtcaatccgattcaatgagcatatcaacgtcgtttagtgattcaacgagtgatagcaaatcagcatcaactgcatcaagtgaatcaatatcacaaagtgcttctacgagcacatctggttcggtaagtacttcgacatcgttaagtacaagtaattcagaacgtacatcaacatctatgagtgattccacaagcttaagtacatcagagtctgattcaataagtgaatcaacgtcaacgagcgactctataagtgaagcaatatctgcttcagagagcacgtttatatcattaagtgaatcaaatagtactagcgattcagaatcacaaagtgcatctgcctttttaagtgaatcattaagtgaaagtacgtctgaatcaacatcagagtcagtgagtagttcgacaagtgagagtacgtcattatcagacagtacatcagaatctggtagcacatcaacatcattaagtaattcaacaagtggtagtacgtccatttcaacatcgacaagtatcagtgaatcaacgtcaacgtttaagagcgagagtgtttcaacatcactgagtatgtcaacgagtacaagtttgtctgactctacaagtttgtcaacatcattaagtgattccacaagtgatagtaagtctgattcattaagtacatcaatgtcgacaagtgattcaatcagtacaagtaaatctgattccattagtacatccacatcattaagtggttctacaagtgaaagtgaatccgactcaacatcatcaagtgaaagtaaatccgattcaacatcactgagcataagtatgtctcaatcaacatcaggaagtacaagtacgtcaacgagtacaagtttgtctgactcaacgagtacatcattgtcactaagtgcctcaatgaatcaaagcggagtagactcaaactcagcaagccaaagtgcctcaaactcaacaagtacaagcacgagcgaatccgattcacaaagcacatcatcatatacaagtcagtcaacaagccaaagtgaatccacatcgacatcaacgtcactaagcgattcaacaagtatatctaaaagtacgagtcaatcaggttcggtaagcacatcagcgtcattaagtggttcagagagtgaatctgattcacaaagtatctcaacaagtgcaagtgaatcaacatcagaaagtgcgtcaacatcactcagtgactcaacaagtgcaagtaactcaggatcagcaagtacgtcaacatcgctcagtaactcagcaagcgcaagtgaatccgattcgtcgtcaacatctttaagtgattcaacatctgcgtcaatgcaaagcagtgaatccgattcacaaagcacatcagcatcattaagtgattcgctaagtacatcaacttcaaaccgcatgtcgaccattgcaagtttatctacatcggtaagtacatcagaatctggctcaacatcagaaagtacaagtgaatccgattcaacatcaacatcattaagcgattcacaaagcacatcaagaagtacaagtgcatcaggatcagcaagtacatcaacatcaacaagtgactctcgtagtacatcagcttcaactagtacttcgatgcgtacaagtactagtgattcacaaagtatgtcgctttcgacaagtacatcaacaagtgtgagtgactcaacgtcattatctgatagtgttagtgattcaacatcagactcaacaagtatgagtatatccgattcaatgagtgtatctgtatcattaagtgattcgacaagcacatcaacatcggctagtgaagtaatgagcgcaagcatatctgattcacaaagtatgtcagaatctgtaaatgattcagaaagtgaaagtgaatctaattctgaaagtgactctaaatcgatgagtggctcaacaagtgtcagtgattctggctcattgagcgtctcaacgtcattaagaaaatcagaaagtgtaagcgagtcaagttcattgagtggctcacaatcgatgagcgattcagtaagcacaagcgattcgtcatcattaagtgtatcgacgtcactaagaagttcggaaagcgtgagtgaatctgattcattaagtgattcaaaatcgacaagtggttcgacttcaacaagtacatctggttcattgagtacatcaacatcattaagtggttcagaaagcgtaagcgagtctacctcgctaagtgattcaatatcaatgagtgattctactagtacaagtgactccgactcattaagtggatcaatatctttaagtggttccacaagtcttagcacttcggattcattaagtgattcaaaatcattgagtagctcgcaaagtatgagtggatcagaatcaacgtcaacaagtgtgagcgattcgcagtcaagctcaacaagtaatagtcaatttgactctatgagcatcagtgcatcagaaagtgactcaatgtctacaagtgattcgtctagcatcagtggatcaaattcaacgagtacatcactttcaacatctgactcaatgagcggaagcgtatcagtttcaacatcgacaagtttaagtgactcaatatcaggttcaacaagtgtaagtgactcaagctcaacaagcacatctacatcattaagtgattcaatgtcacaaagccagtcaacaagtacaagtgcatctggttccttaagtacatcgatatcaacatcaatgtcaatgagtgcaagtacatcgacatcacaaagcacatcggtgtcgacatcattatcaacatcagacagtatcagtgattctacttcaataagtatcagtggttcacaaagtacagtagaatcagaatctacaagtgattcaacttctatcagtgactcagaatcattgagtacatcagattcagactcgacatcgacaagtacatcggactcaacaagtggttcaacttcaacaagcatatctgaatcattaagtacgtctggttcaggttcaacgagcgtatctgactcagcatcaatgagtgaatctaattcatcgagtatttcaatgtcacaagacaaatccgactcaacatcaattagcgactcagaatcagtgtcaacaagcacatcaacgtcattgagcacatccgattcgacaagcacatccgaatcactgagtacatctatatctggttcacaaagcatttctgactcaacatcaacaagtatgtccggctcaacaagtacatctgaatctaactcaatgcatccgtcagactcaatgagtatgcatcatactcacagcacgagcacatctcgcttatcaagtgaagcaacaacgagcacgagtgaatctcagtctacattaagtgcaacatctgaagtgactaaacataatggcacgccagcacaaagtgaaaaaagattgccagatacaggtgactcaataaaacaaaatggattactaggtggcgttatgacattattagttggtttaggtttaatgaagagaaagaaaaagaaagatgaaaatgatcaagatgattctcaagcataa

SEQ ID NO: 420010 - DNA, 3423 bp, Staphylococcus aureus
atggaaaatcaagaaaattacaatgcttctagttttgatgatttaattagccaaattaatgagacagcacaagatgttcaaagagagcgaggaacactttttgaaagattagtattagcctatttaaaaaacgaacctacgtataaaaatctttataaaaatgtatggttactaaaggatgtaccttcagaatttaatatttcaaaaaaagatttaggcgtagatttagttgctgaacaacaaaatggtgatttagtggctatacaagcgaaatttaataaaggaaaaataggtaaaagtgaaattaattctttcgtcgcagaacttggatcaacatattatactagaggattaattatagcaactgttgacgagtggaatagtaatgcaagagcgacgattgataagaatgaaaaagggatagagataattgggctatcagatttgagaaactcacaaattaattgggctgattttagttttgagaggccagaacaaacaacaattaaacagcctaaatcattacgtccataccaattagatgctttagatagtgcaataagttattttaaaactaaagatcgtgggcagttaatcatggcacctgggacaggtaaaacgttcacaagtttaaaaattgctgaagcattatctaaacaatcaaatcgacaatttaaagttctttatttagtaccaagtattcaattgcttacgcaaacattaagaggatggaataacgatactgaatatactatgacaagtatggcagttacttcagatagagatgcttctagaggtgatgatggtactgaagatattaaagctacagatatcggatatccagcaacgacatctaaagatcagttgcttaaaaattggaatgatgtacaaaaaaaagaatcaaatactgatttatttgtagtatttagtacttatcaaagtattgaagtaatcggaaaagctcaaaaagaaggattcccagagtttgatttaataatttcggatgaagcacatagaacaacgggcgcacatgaaatgaataaggatgctagtgtatttacaaaagttcatgataatgaaaatgtaaaaggaaaactgcgcatgtatcaaacagcaacacctaagatttatggtgataatgctaagaagaatgcaaaagataaaagtatcttattatcttcaatggatgatgaatcaaaatatggtgaagttatttatcgcatgggatttggacaagcagtatcacgtggcatattaacggattataaagtgatggtcttggcagtagatgaaacagctattcaaagagatatgcaacgaacattagctgattctgaaaatggtttaaatatagatgatgttggtagaatcgtaggtatttggaacggtatgatgcgtagaaatggatataaaaatccaattaaaaatagcccttttgatggtgcaccattagagagagccattgcatttaccagaacaattgaagattctaaaaaagtatcacatcaatttgaagaagttgttaatgaatatattggtgcggatattgaagaacaatcgaaaaagctatcaatgagacacgcagatggaacaatgaatgcattacaaaaaggtgaattattggattggttagcagatccaaataaatcatctgatgaagcacgaatagtttcaaacgtacgattcttaacagaaggtatagatgtaccgacattagatgctgttatcttcttagcacctaaaaaatctcaagttgatattgtacaagcagttgggcgtattatgcgtaaatctgaaaataaagattatggctatatcatattacctatagttatcccagcaggtgaaaaacctgagacgatactagataataataaaaactatgaagcagtatggcaaataataaatgcgttacgctctgttgatgaacgtttcgaagcaatggttgataaaattaacatagctaagccaaaacagttaaaagtcattggtgttggaagcgcacctaataaagaaaatgacttagaagataatgttggaaatgctgatacgccaaaccctaaagaatttgaacctactcaattagaattccaatgggataagtacgaaaaagcaatatttggtaaaatcgtagaaaaagtagggaatcgtaaatatttagagaactggtctgatgatgtagcaaaaatagcgcaaaggcaaattagttggataaagacaaaattagaaaataaaaatgatcctatttcaatagaatttaaaaagtttgtgtcttctctacaacataatatcaatgaaagtatagatgaaagccaagctgctgaaatgttatctcaacatttaatcacaaaacctatatttgaagcattatttagtaagtatagctttgtaaataataatccagtatcctcagctatggaaaacatcgttctagaattagagaaagctggttttgccaaggaacaagaaaatcttgcacctttatatgagtctgtaaaaatgagagcagaagatgtagaaaaagcagaagataaacagaaaataattataactttatatgataagttctttaaaacggcatttaattcaactacaaaaaaattaggtattgtattcactcctgtagaagttgtggattttatagtaaagtcagttgatcttacattagagagacattttggcaaaaatcttgctagtgagagtgttcatattttagatcctttcacagggactgggacatttatggttagaacactagaatacttaaaagaacaaatgaaagaaggagaaatttcgttagcggatattacacgtaaatttacacaagaattacatgcaaatgaaattgtattgttaagttattatattgctgcaattaatattgaagcaacatttgatgatattaatggtaatgaacaaggatatacaccatttgaaggtatagtattaactgatacatttgaaactactgttcatgaatattcaatagatgaatattttattggaaatgatgaaaggcttaaaagacaattaaaagaaaatattacagcgataattggtaaccctccctattcagtaggacaagactcggaaaatgataataatcaaaatatcaaataccctattttagaagaaagaattaagaatacttattccaaatactctaaagcgaaattgaaacaagcattgtatgattcatatgttcaagcgataagatgggctacagatagaatagggagtaagggggttataagttttgtaactaatggagcttttatcgataatcaaagtttcgatggatttagaaaatgtgtttatgaagaatttaactatatttatatttataatttacgaggtgatcaacgaacacaaggtgaaaaatctagaaaagaggggggggaaaatatttggctctggaagtag

SEQ ID NO: 420011 - DNA, 1347 bp, Staphylococcus aureus
gtgaaaaatctagaaaagaggggggggaaaatatttggctctggaagtagaacaccaatagcaattacagttctagtgaaagacgaaagtgaaaaacacgaaattaagtattgtgatataggtgattatctgtccacacaagaaaaacttgaaatcattaaaaataatagttcgattgctggagtgaaatggaaaacaattcaacccgatgataataatgattggataaatcaaagagatgaaaaatatcaagattatatttctctgtacgaaaatgatggagaatcaatttttaatgattatactttaggagttcaaacaggtagagactggtggacaacgggttttagtaaattagagaccataaataatagtgaacgaatgatagaaaactttaattcagaaattaaaagattatggtttgaagaagaaccaatcaaaaaaataaatttggatccctcttttataaactggtcagacgtattaaagaaaagattagtaagaaaagattcaatacgaaaaaaagaaaatccgatgattataacttcgtttagaccatttacaaaaaagtggatgtattatgatgaagcaattattcatagacagagaaaatatagtcagataggtcagattgataaattgatttttactacaggaacaggaataagtaaagatttttcttgtttaattactaatcatatacccaattatcattatctagatacgggacgtgcatattatcaagaaataaatgataataccattaaagatatttattctgaaaatgtcacagatttttcgtctgagtactttgatataaagaaggaagatattatttattatgtatatgctttattgcatcatgaagagtttagaaacaaatatttatcagatttgaataagcaagcaccaaggattccaatcgttaaagaaaaaaataaatacattgaagttggacgtaaattatcagagcttcatattaattatgaaaagcagactcctcttgcagaaataaatgttaatcaaacatcgaataattattacgttaataaaatgaaatttaataaaaaagataaatcaataataatttttaataatgatattaaaatcgaaaatatacctttggaagcctataaatacgttataaatggaaaatcagctattgagtggattatggatcagtatcaagtgaaaaccgataagaagtcagggattgtagataatcctaataagtttagtacagatccacagtatattttaaaattattattgtctgttataacagtaagtgtgaaaacgcttgaattagtagaagaattacctggttttgagataattcattattaa

SEQ ID NO: 420012 - DNA, 987 bp, Staphylococcus aureus; identical to SEQ ID NO: 417887

SEQ ID NO: 420013 - DNA, 1719 bp, Staphylococcus aureus
atgcctgtgcctgtatctttaatgtataaaatatcttcgcttttattaagtattgctttaattacctttatgcaatactatttcacacaagaaaccgaaaatgccataagagaagatgctagacgtataagttcactggtcgaacaatcacataataaagaagaagcaataaaatatagtcaaacattaattgaaaatcctggtgggttgatgattataaataataaacatcgtcaatcaacggcttcactttctaatattaaaaagcaaatgttgaatgaagtagtcaacaacgaccattttgacgatgtgtttgataaaggtaaatctgttactcgaaatgtaacgattaaagaaaagggctcatctcaaacatatattttgttaggctatccaacaaaagcacagaagaatagtcatagcaaatatagtggagtctttatatataaagacttgaaatcaatcgaagatacaaataatgctattacgattatcaccataattacggctgttattttcttaacaattacaacagtctttgcgtttttcttatcgtcaagaattacaaaacctttaagacgtttaagagaccaagctacacgtgtatctgaaggggattactcttataaaccttctgtcacaacgaaagatgaaattggtcaattatcgcaggcatttaatcagatgagtacagaaatcgaagagcatgtcgacgcattatccacatctaaaaatattagagacagcttaattaactctatggtagaaggtgtcctaggtattaatgagagtcgacaaattatcttatctaataagatggcgaatgatattatggacaatattgatgaagatgctaaagctttcttattaagacaaatagaagatacttttaaatcaaaacaaactgaaatgcgcgatttagaaatgaatgcacgattctttgttgtgaccacaagctatatcgacaagattgaacagggaggtaaaagtggtgttgttgtgacagttcgtgatatgactaatgagcacaatctagatcaaatgaagaaagatttcattgctaatgtatcacatgaattacgtacaccgatatcattacttcaaggttatactgaatcaattgtagatggtattgttacagaaccggatgaaataaaagaatcgcttgccattgtccttgatgaatcgaaacgtttaaatcgtttagttaatgaattgttaaatgtcgcacgcatggatgctgaagggttatccgtaaataaagaagttcagcctattgcagcgttactagataagatgaaaattaagtatcgccaacaagctgatgatttaggtctaaatatgacttttaattattgtaagaagcgtgtttggagttatgatatggatcgcatggaccaagtactaacgaacttaattgataatgcatcacgttatacgaaacctggagatgaaattgcaattacttgtgatgaaaatgaaagcgaagatattttatacattaaagatacaggcacaggcattgcaccagaacatttacaacaagtatttgatcgtttttataaagttgatgcagcgagaacgcgaggtaaacaaggtaccggtttaggtttgttcatttgtaaaatgattatcgaagagcatggtggttccatagatgttaaaagcgaattaggaaaaggcacaacatttattattaaactaccaaaaccagaataa

SEQ ID NO: 420014 - DNA, 1419 bp, Staphylococcus aureus
atggaaaacacggttaaatatcgtaagtttatactccctatcgttgtaggtctccttatttgggcacttacaccttttaaaccggatgctgtggatccaacagcatggtatatgttcgcaatattcgtcgcgacaatcattgcttgtattacacaaccgatgccaattggggccgtctctataattggatttacaatcatggtactcgttggcattgttgacatgaaaacggctgtcgctggttttggtaataatagcatttggttaattgctatggcatttttcatttcgagaggatttgtgaaaacaggtcttggtagacgtatcgcacttcatttcgtcaaattatttggtaaaaaaacattaggcttagcatattctatcgtcggtgtagatttaattctagcgcctgctacaccaagtaataccgcgcgtgctggtggaatcatgttcccaattatcaaatcactttctgaatcatttggttcgaaaccgaaagacggatcagcacgcaaaatgggtgcatttcttgttttcacagaattccaaggtaatttaattactgcagctatgtttttaactgcaatggccggtaacccccttgcacaaaatttagcatctagcacatctaatgttcacattacatggatgaattggttcctagctgctttagttcctggacttgtttccttaattgttgtaccttttattatttataaaatttatccaccaactgttaaagaaacaccaaatgctaagagttgggctgaaaatgaattagcgactatgggtaaaatcgctttagctgaaaaatttatgattggtatttttgtcattgctctaacattatggattgtcggaagtttcattcatattgatgcaactttaacggcctttattgcgctagcattgttattattgacaggcgtcttaacatggcaagacattttaaacgaaacaggtgcttggaacacattagtatggttctcagtattagtgttaatggccgaccaattaaacaagcttggatttattccttggttaagtaaatccattgctacaagtcttggtggcttaagctggccgatagtcctggtcattttaatattgttctacttctattcacattacttatttgcaagttctacagcacatatcagtgcgatgtatgcagcattactaggcgttgccatcgcagccggtgcaccaccattattcagtgcattaatgttaggtttcttcggtaacctattagcttcaacaacacactatagtagtggtccagcgccgattctattctcttcaggttacgtgactcaaaaacgttggtggacaatgaacttaatattaggtttcgtctactttattatctggattggtttaggatcactttggatgaaagtaattggtatattttaa

SEQ ID NO: 420015 - DNA, 309 bp, Staphylococcus aureus
atgacaactaatcctgctaatgcaccgagtaaaagtccaagtaaacttgtcgtctttttaaaaatatattctaaaattaaccaacctatagcacctgcactggctgaaatgacagtatttgtaaatgcaagcatcgcaatattatcaaatgtaaaagcactacctacattaaatccataccaaccaatccacacgaatataccgccaatcaacgtaatgataagattatgtggtgttgattcagaatgtttgtttccttttccaatcataatagctaatactaaaccagaaacacctgatgtaatatga

SEQ ID NO: 420016 - DNA, 630 bp, Staphylococcus aureus
atgaaaagattagttacagggttactagcattatcattatttttagctgcatgtggtcaagatagtgaccaacaaaaagacggtaataaagaaaaagatgataaagcgaaaactgaacaacaagataaaaaaacaaatgattcatctaaagataagaaagataataaagatgatagtaaagacgtaaacaaagataataaagataatagtgcaaacgataaccagcaacaatctaattcaaatgcaacaaacaatgaccaaaaccaaacaaataataaccaatcaagtaataatcaagcgaataataatcaaaaatcaagttacgttgcaccatattatggacaaaatgccgcgccggttgcacgtcaaatttatccgtttaatggaaataaaactcaagctttacagcaattgccaaatttccaaacagctttaaatgcggctaataatgaagcaaataaatttggtagtaataataaagtgtataatgattattctattgaagaacataatggtaactataagtatgtgtttagttttaaagacccaaatgcaaatggaaaatattcaattgtaacggttgattatactggacaagcaatggttactgatccaaactaccaacaataa

SEQ ID NO: 420017 - DNA, 399 bp, Staphylococcus aureus; identical to SEQ ID NO: 406878

SEQ ID NO: 420018 - DNA, 747 bp, Staphylococcus aureus; identical to SEQ ID NO: 409359

SEQ ID NO: 420019 - DNA, 384 bp, Staphylococcus aureus
atgaaagaacgtggctatatcgaacagctttggcgtgaggaaaaatatcatgtattgttacacagtcaacagtcttaccaaatgataaggaatgctttaaaaacggatttatcacttcatcaagttcaacaaatgattgatgatgctttgttaattgaaccgagtataggaagtgtatgtaatgcttttgatcatatgtggggatattttaaaaaatgtgcgaatgaagaagaaagacaacaatcaaaactacttaaagctgattttattaatggtaaaatcgacacccaaactttattagattttttagcagaacttgctaataaatatgatgttcaatatttactacaaagtcgtgttttaaacacaaaaagaaagagatag

SEQ ID NO: 420020 - DNA, 351 bp, Staphylococcus aureus
ttgattgaaataaatcctggcaatccagcagttcctaatgcgattgctttaaccttgaagaaagcaatatatgctgaaccaatacctgatccaacgatagcgccaataaatggatatcttagttttaagttaacaccaaacatagccggttctgtaataccaagtaatgctgaaatacctgcggcagatgccacaccttttaacttcttattttgtttaataataaagaacgctgcaattgctgcaccaccttgtgcaacattagacattgtcgcaatcgggaatataaatgatccacccgttttagtggcatctgcaattaatgtcgtttctacagctataaagctatga

SEQ ID NO: 420021 - DNA, 696 bp, Staphylococcus aureus
gtgaaattaaaaacgttagctaaagcaacattggcattaggcttattaactactggtgtgattacatcagaaggccaagcagtgcaagcaaaagaaaagcaagagagagtacaacatttatatgatattaaagacttacatcgatactactcatcagaaagttttgaattcagtaatattagtggtaaggttgaaaattataacggttctaacgttgtacgctttaaccaagaaaaacaaaatcaccaattattcttattaggaaaagataaagaagaatataaagaaggcattgaaggcaaagatgtctttgtggtaaaagaattaattgatccaaacggtagagtatctactgttggtggtgtaacgaagaaaaataaccaatcttctgaaactaatacacctttatttgttaaaaaagtgtatggcggagatttagatgcatcaattgaatcatttttaattaataaagaagaagtttcactgaaagaacttgatttcaaaattagacaacatttagttaaaaattatggtttatataaaggtacgactaaatacggtaagatcactttcaatttgaaagatggagaaaagaaagaaattgatttaggtgataaattgcaattcgagcacatgggcgatgtgttgaatagtaaggatattcaaaatatagcagtgactattaatcaaatttaa

SEQ ID NO: 420022 - DNA, 450 bp, Staphylococcus aureus
gtggctggatggttatgggcgtggaaagctgttccgttcaagttgttaggaataaatacaagtttgccatttcctgcagatataactgttagaatgcataaccctaataacattgtttttgataaaaatgatattcatatttttcaatcgcccgggacgtattttaataatttttcagcagttatatatataggtagaggtgtttatatagcgcctaacgtaggtattattacagctaatcataatattaaaaatttgaagtcacatgcaccaggtgaagatgtcaaaatagggaattatagttggattggaatgaactcagttatattaccaggagtagaattgggggaacatacaattgtaggggctgggtcggttgtaacaaaaagttttccagaaggtaacgttgttataggtggcaatccagcgaaaatcatcaagaaaatctga

SEQ ID NO: 420023 - DNA, 693 bp, Staphylococcus aureus
atgatggtttattatgtcgttatatcgttaataatgctagataattttaaaaaaatgaaaaaccgtgaatatcaaaaagaaatagcagaaaaaaatagacatattaatacattaattgctgaacaagagcgacatagaattggtcaagacttacatgatacgttagggcatgtgtatgcaagtttatcattaaaatcagaattagcttataaactaatagatactgatgtagaaaaagtaaaagctgaattattagcaattaataaattatctcgtgaatcattgaacaaagttcgagaaattattgatgatgtaaaattaccatcatttattgaagagattgatagtatacgtaaagttttaaaagatgctgatattgattttacatttgaaaataaagaattagcgcaagtattaagtcctactaaacaatctatgttagttatgattacgcgtgaagcgataaataatgttattaaacatgcaaatgcttcaaaagttcatggtaaattaaaaactgtaaacaatcataaattactgcttatgattgaagatgatggcaaaggtatcgatagtgattgtgaggtgaaaagtatttcacagcgtgtacaacatttaaatggaactttagcagtcgactcaacaaatggaactaaaataatcattgaaatctcaacaggaggaatagcatga

SEQ ID NO: 420024 - DNA, 603 bp, Staphylococcus aureus
atgacatctttaattattgcagaagatcaaaatatgttacgacaggcaatggttcaattaattaaactacatggtgattttgaaattttagcagatactgataatggtctcgatgcaatgaaacttattgaagaatataatcctaacgttgttattttagatatagaaatgccaggcatgactggacttgaagttttagcggaaattagaaaaaagcatttgaatattaaagtgattattgtaacaacttttaaaagaccgggatactttgaaaaagcagttgtgaatgatgtggatgcatatgttttaaaagaacgttctatagaagaattggtggaaaccattaataaagtaaataacggagagaaagaatatagcgccacattgatgacttcattttttgtagataaaaacccattaacgcccaaagaacaaattgtattaagggaaattggcaatggtttaagtagtaaagaaataagtgaaaaattatttttgacagatggaacagttagaaattatacatctgttataattgataaattatttgcagataatcgttttgatgcttggaaaaaggcaaatgaaaaaggttggatctaa

SEQ ID NO: 420025 - DNA, 1077 bp, Staphylococcus aureus
atgaatcagtcagtcaaattacttaaacatttaacagatgtaaacggcattgctggttatgaaatgcaagttaaagaagcaatgcgtaactatatagagcctgtcagtgatcaaattattgaagataacttgggtggcatttttggaaagaaaaatgctgagaatggtcaatactcaattatgatttctggtcatatggatgaagttggttttatggtaacaaagattgataaacatggttttatttcatttacgccagttggtggatggtggaatcaagtcatgctatctcaaaaagtaacgattacaacagattcgggcaaagaaattagaggtatcatcggttctaaaccgccacatgtcttaacgcctgaagaacgtaaaaagccaatggaaatcaaaaatatgtttatagatattggtgttagtagcaaggaagaagctgaagaagctggcgttgaagtaggcaatatggttacgccatatagtgaatttgaagtgcttgcaaatgataaatatttaactgcgaaagcatttgataatcgctatggctgtgcattagctattgaggtattaaaacgtttaaaagatgaaaatattggcattaacttatacagtggtgccacagtgcaagaagaagttggtttgcgtggtgcgaaagtggcagcgaatacgattaaaccagacttggcgatagctgtcgatgtaggtattgcttatgataccccaggtatgtcaggtcaaacgagcgatagtaaactaggcggtggtccagttgtcattatgatggatgctacaagtattgctcaccaaggtttgcgcaagcatattaaagatgtagctaaggaacataacatcgaagtacaatgggatacgacaccaggtggaggtacagatgcgggaagtattcatgtcgcaaatgaaggtattccaacgatgacaatcggtgttacgctgcgatacatgcattctaatgtttcagtgctcaatgtagatgattatgaaaattctatccgtcttgttactgaaattgtccgttcattgaatgatgaaagttataaaaatatcatgtggtaa

SEQ ID NO: 420026 - DNA, 936 bp, Staphylococcus aureus
gtgagtgatgtcggaaaagcatttccaggacagccatcaatcgcgcatgacagtaatattgaaggactaaaacgattagctacagcaatgaagaaaaacggtgccaaagcactcgtacaaatacatcatggcggtgcacaagcattgcctgaattaacacctggtggagacgtcgtagcaccaagtccaatttctttaaaaagtttcggtcagaaacaagaacatagtgctagagaaatgacgaatgaagagattgaacaagcaatcaaggattttggtgaagcaacgcgacgtgcaattgaatcaggatttgatggtgttgaaatacatggcgcgaatcattacttaattcatcaatttgtatcaccatactataatagaagaaatgatgtatgggcaaatcaatataaattcccggttgctgtgattgaagaagtgcttaaagcgaaagaagtgtatggcaataaagactttatagttggatacagattatctccagaggaagcggagtctccaggaatcacaatggaaattacagaggaactcgttaataaaattagccatatgccaatcgactatattcatgtttcaatgatggatactcatgcaacgacacgtgaaggtaaatacgctggacaagaaagactgcctttaattcacaaatggataaatggtcgtatgccacttatcggtattggttcaattttcacagctgacgaagctttagatgcagttgaaaatgttggtgttgacttagtagccattggtagagagctactactggattatcaatttgttgaaaaaattaaagatggacgggaagatgaaattattaattactttgatccagagagagaagataatcatcacttaactcctaatttatggcatcaatttaatgaaggattctatccattaccacgtaaagataaataa

SEQ ID NO: 420027 - DNA, 543 bp, Staphylococcus aureus
gtgaaagaatataaagttggtgatcctattctatttaatgaaactaataagtactcaccaatactttttaataatttaaaagggtcaataattgaaatatatgtttttgaagaatatatattgtttgatttagaaataaataaagttataaatgaacttgatattattttgttagaaattgatttaataagttcttctgaaaatagttcggtgattaggattagagtagaaaaaagtgatgggttgaatgatgatgataatgattcatctgatagtatagttccttttcaagtgagttatgcaatttcaatacataaagctcaagggttagagtttaattcagtaaaaattgttatatctgatgatttagacgaacaaatcactaacaatattttttatactgcaattacacgagctagagaaaatttaaagatttattggtcaccacgaactgaaaagaaaattattgataatataatttctaaaagaaacttgaaggatctttctatattaaaatctcgaataaaaaaacaaaatgcttag

SEQ ID NO: 420028 - DNA, 915 bp, Staphylococcus aureus
atgtataaaatcaatattattagatcagattccgtctataagaatatactcaaggcaccaataaacgaccgtgattcaattttcactaaagaaatattagtaccttttaaaaagaaatttgaggcacaacatatgcctatttataatgatgccaaacagacaatgaatgcaaatcattttttagatgcatttcaaaagtctcccaaagaactggttgaaactgaccaaatgtcaatacaatacctgaataatgatttctggagtaattgcgaaaaatatttaaaagttgctatagatcaattttcaaattatagtatctcatctcaagtttctaactatcatttcacagtattacttggagatagccaaaaaccacttatgtatctaaataaaaatcgcggtggtgatggtggcataccaggttatattatgatttatttagtgccgagtacaagtacaattaattctatgaaaagcttaattgcacatgaagtaaatcataatatgcgctatcaatatattgattgggatggcggaagtttgattgaattgattattgcagaaggattagctgaaaactatgtagaatcattgtatggtaaagcgcatattggaccgtgggtaacaaatactaattggagtcgtgataacgtaaaaattaaaaatactatttataatcatttacatttaaagcatatatttgaatcgatgccttatctctatggtgatgatattaataaacttcaaggtaggcctatcgttggcctatctcatgctgccgggtatgcatgtggctatcacttggtaaaatactttttacaaaaaacaaacatacctattgaagttgctacaacacttccagcacaaaaaataataaatgaggtgactgaattttggcatacacatacactttaa

SEQ ID NO: 420029 - DNA, 372 bp, Staphylococcus aureus; identical to SEQ ID NO: 411052

SEQ ID NO: 420030 - DNA, 699 bp, Staphylococcus aureus; identical to SEQ ID NO: 409343

SEQ ID NO: 420031 - DNA, 951 bp, Staphylococcus aureus
atgaaaaatatatctgatattgccaaattggcaggcgtttcaaaaagtacagtatctagatttttaaataatggatctgtcagtaaaaaaacaagtgaaaaattaacaaaaattatagcagaacatgactatcaaccgaatcaatttgctcaaagtttaagagcgagacaaacacaccttattggtgccattatacctagaatgaattcatatgcagtagatgaaacaatcaaaggattggcaaaacaatgccaaaaatatgaatcacaattaattttaaattatacaggattaaatatcgaagcagaaatacaagcgcttgaaacattagcacgcagtaaagtagatggtattgttttaatggctacagacataacagagagacatattgaagtcattaataaaatgaatgtaccaatcgttattgttggtcaacaacatgaacaacttcatagtattgtgcatgatgattataaagcaggtcaaattataggtgaatggattggtcaacagggatatcaacaagttgaagtgtttagcgtaagtgaaaaagatattgcagttggtatacatagaaaacgtggtttacttgaccagttagctaaataccaaattaaacctaatatacatgaaacaaattttacttatgtggaagcacaaaaagatgttgcaaatgttttggaaaatgtggagcaagtagatgcggttgttggagcaactgatacgattgcattagctgcctataaatattattctgataaaaaagatgttatgaaaccacatcaaatatatggttttggtggtgacccaatgacacaattagtgtctccatcgataaaaacaattcattataattattttgaagctggccaatgcgcgatggaagagatacaacagatgcttaaaaagcaagatatgccatatagcgtcacagtagatgttaatatttag

SEQ ID NO: 420032 - DNA, 450 bp, Staphylococcus aureus
ttgacaggtaatgaagttgtattagatacctattgtggtattggaacaatagggctatatatggcaccacatgcaaaacatgtatacggtgttgaagtagtaccttctgcaattgaagacgcacaacaaaatgcgactataaaccaatgcaataatacaacttttgtctgtgggaaagctgaagaagttattttacaatggaaagcacaagggattaaaccagatgttgtaatggttgatccgccaagaaagggctgtgacgaaacgtttattcagactttgcttacattagaacctaagcgtattgtctatatttcatgtaatcccgcaacacagcaacgtgatgcattattattagctgaaaaatatcaacttgaagaggtaacaccggtagatatgtttccacaaacaacacatgttgagacagtggcattattcaatttgaaatag

SEQ ID NO: 420033 - DNA, 666 bp, Staphylococcus aureus; identical to SEQ ID NO: 417687

SEQ ID NO: 420034 - DNA, 261 bp, Staphylococcus aureus; identical to SEQ ID NO: 405536

SEQ ID NO: 420035 - DNA, 798 bp, Staphylococcus aureus
atgaacaaagatgtatctttaggtcaaccaattgttagatatgaagatggaaaattattcaatacaacagatcaatatgtgacagaatttccacttacaattatggtgaatggtgaagaatttgcgactgttatatgcagtccaacaaaccttgaggagttagtcattggatttctggcttcggaaggtgccattttaaagcgagatgaattaaaatctgtgctgattgatgatagtaaaggttttgcccatgttgaacttaataaagatttaggcgatcgctttcaatattccacaaaacgaatgattgcatcttgttgtggaaagagtcgtgagttttattttcaaaatgatgctgctatcgctaaaacatctatgtctaaaatcactttaactccaatgcaaattattaacatgatgactcgattacaaagtgcaagtcatatttaccaagaaacaggtggcttacataatgctgctataagcgatggtttgacattttttgtacatcgacaagacattggtagacataacgctctagataaattatatggattttgtattcagcgacatattactgtccgagataaagtattaatttttagtggacgtatttcatcagaaattttaattaaagccgcaaaaattggtgttggcgtcattttatctaaatcagctccgacaacgcttgctgtaaccttagctaatgacctaaatattacggcagtaggatttattcgaaatggtggctttaatatatatagtcatccagaacgtatcatcgactctgaacaataa

SEQ ID NO: 420036 - DNA, 438 bp, Staphylococcus aureus; identical to SEQ ID NO: 405973

SEQ ID NO: 420037 - DNA, 369 bp, Staphylococcus aureus
ttgaaaacgattttaaaaacaataacatatcttgcacttactatcattggcgcttatgctgctttattcattttaaaaacaatagactctcatggtataacagatcaatttaacccattagtaaagaaggatgattcttatgttaaaacgacagaggtgtctactagaatggatgatcaactccgaagttatagtcaaagtgtttttaataaagaagggaaagagacgcaattaatgtatactgctacatttgatgttaaaccgcatagatacttgaaaattacacataaaggtcatcatgtagaaacttttgaagaagttgaaaaggaagaagtaccaaagaaagcattagacaaactgagtcgataa

SEQ ID NO: 420038 - DNA, 180 bp, Staphylococcus aureus
ttggcaggtggtactggtttaccaggttcagctggtacctctggtgttggcggtgttggtgtttctggctcactcggcacttctggtgtcggtggtgttggtggcacgattggtacttctggtgtcggtggcgttggtggcacgattggaggtgttgtatcttcttcaatcgtttgttga

SEQ ID NO: 420039 - DNA, 534 bp, Staphylococcus aureus
atgtgtataagagacagcaatgcatcttacaataactactataatcattcatatcaatacaataactatacaaacaatagccaaacagcaacaaataactattatactggtggttcaggtgcaagttatagcacaacaagtaataatgttcatgtgactacaactgcagcgccatcttcaaatggtcgttcaatttctaatagttatgcatcaggaagtaacttatatacttcaggacaatgtacttattatgtatttgatcgtgttggtgggaaaattggttcaacatggggtaacgcaagtaattgggctaacgcagctgcatcatctggctatacagtgaacaatacaccaaaagctggtgctatcatgcaaacaacacaaggctattacggtcatgttgcttacgttgaaggcgttaacagcaacggttctgttcgtgtttcagaaatgaactatggacatggtgctggtgtggttacgtctcgtacaatttcagcaaaccaagcaggttcatataatttcattcattaa

SEQ ID NO: 420040 - DNA, 519 bp, Staphylococcus aureus
atgagattatttcaacaagataataatgaaaaatggcttaacatagttaggaaattagttgatcagtttatttttaaagaatattttaaataccatgatcattggcttggatattgcacaaatgaacttgtccagatttatccggaagcaaaatactttgaatttggtataaaaaatgtgagtacttatttagattacataaataatcgtgaaacaacgtttccaacatttctagaaatgttaatggcaacatataaattaatacaaaaagctaaggttgaaggttatggtgaattagtagaatctttaattgatgaaaatgaattgttgtctgttattcataaacgtgcaaattatcaaagaacaggatatttttatcctgaaattgcgatgtattttaaaaatccatctagagtattagggagcttctttattaaacatcatggctatagagttagaatagatgacattgaacactatatttcagggtatgtacaatatcaaaaggtgtttaattaa

SEQ ID NO: 420041 - DNA, 303 bp, Staphylococcus aureus; identical to SEQ ID NO: 407250

SEQ ID NO: 420042 - DNA, 555 bp, Staphylococcus aureus; identical to SEQ ID NO: 407865

SEQ ID NO: 420043 - DNA, 309 bp, Staphylococcus aureus
atgtatccaaactgggggcaatataaacgcgctgatttaatcggacaatcttcttatattaaaaataatgatgtcgtaatattcaatgaagcatttgataatggtgcatcagacaaattattaagtaatgtgaaaaaagaatatccttatcaaacacctgtactcggccgttctcaatcagggtgggacaaaactgaaggtagctactcatcaactgttgcagaagatggtggcgtagcgattgtaagtaaatatcctattaaagaaaaaaatccagcatgttttcaaaagcggttgtggattcgataa

SEQ ID NO: 420044 - DNA, 360 bp, Staphylococcus aureus
ttggacaaagtagaagatgaaaatcttaaacaaaaaatagaaaattttaaatttttcgggcaatatgccgattttaaagacttgaaaaattataaaaatggaagaatatctagcaatgaaaatgttccttattatgaagcagagtacaaaaggaataatagtgatggaaatgtaaaaaaacttagagaaaagtacccaattacaaccaagcagtctccaatattaaaactgcatatagacggcgatattaaaggtagctcagttggatataaacagatagaatacacattttctaaggagaaagatgatgagacttttatgagtgattttttgaacttcggtccatcacacagtaaatag

SEQ ID NO: 420045 - DNA, 879 bp, Staphylococcus aureus
gtgtatgacccaacatgtggttccggttcattattgttacgtgttggtaaagaaacgcaagtgtatcgttatttcggtcaagaacgtaacaataccacttacaacttagcacgcatgaacatgttattacatgatgtacgttatgaaaatttcgatatccgtaatgatgacacgttggaaaatccagcctttttaggccatacatttgatgcggttattgcgaatccaccatatagtgcgaaatggacagcagattcaaaatttgaaaatgatgaacgatttagtggttacggcaagcttgcgccaaaatccaaagcagactttgcctttattcaacacatggtacattacctagacgatgaaggtaccatggcagttgtactaccgcatggtgtcttattccgaggtgctgcagaaggtgtcattcgtcgttatttaatcgaagaaaagaactacctagaagccgtgattggtttgccagcgaatattttctatgggacaagtattccaacatgtattttagtatttaaaaaatgtcgccaacaagacgacaaagtattatttatcgatgcatccaatgattttgaaaaaggaaaaaatcaaaaccatttaagcgacgcccaagtcgaacgcattattaacacatataagcgtaaagaaacgattgataaatatagctacagtgcgacattacaagagatcgccgataacgattacaacttaaacataccgcgatatgtcgatacattcgaagaagaagcaccgattgatttagatcaagtccaacaagatttgaaaaatatcgataaagaaatcgcagagattgagcaagaaatcaatgcatacctgaaagaacttggggtgttgaaagatgagtaa

SEQ ID NO: 420046 - DNA, 846 bp, Staphylococcus aureus
ttgttacgtgttggtaaagaaacacaagtgtatcgttatttcggacaagaacgtaacaatactacatacaacttagcacgcatgaacatgttgttacatgatgtacgatatgaaaatttcgatatccgtaatgatgacacgttggaaaatccagcctttttaggacatacatttgatgcggttattgcgaacccaccgtatagtgcgaaatggacagcagattcaaaatttgaaaatgatgaacgatttagtggttacggcaagcttgcgccaaaatccaaagcagactttgcctttattcaacacatggtacattacctagatgatgaaggtaccatggccgttgtactcccacatggtgtcttattccgtggtgccgcagaaggcgtcattcgtcgttatttaatagaagaaaagaactacttagaagccgtgattggcttaccagcgaatattttctatgggacaagtattccaacatgtattttagtatttaaaaaatgtcgccaacaagacgacaacgtattatttatcgatgcatccaatgattttgaaaaaggaaaaaatcaaaaccatttaagcgatgcccaagtcgaacgtattatagacacatataagcgtaaggaaacaattgataaatatagctacagcgcgacactacaagagattgccgataacgattacaacctaaatataccgagatatgtcgatacattcgaagaagaagcgccaattgatttagatcaagtccaacaagatttgaaaaatatcgacaaagaaatcgcagaaattgaacaagaaattaatgcatacctgaaagaacttggggtgttgaaagatgagtaa

SEQ ID NO: 420047 - DNA, 123 bp, Staphylococcus aureus
atgtcaattcaacaattagatggttacatttctatagaagatttttttaagcatatggatgaattatcgaagaaagaagaattagaaaaagaaattaatcaatcaaagtctaaatatcaatag

SEQ ID NO: 420048 - DNA, 1074 bp, Staphylococcus aureus
gtgagagatattgaagctataaaaatattaatagagacttcaagttataaaaaaccgtatttaagctgtgaagagcaattaatcttactagaatatcgtggagtaaagatagaaaataaaaagtttgcattagagcaattagaaacaatatcgtattactcgctgataaatgcttattcatctctatttataaatgaagatggggaatatgaaaaagatactacatttaacgatttttatatgtgttataaatacgatactcgtttaaaatatatactttttaaatacattatgttaattgagcaatctttaaaaacaaatttatctgctattgtagctaaaaattacggagttcaagaacccacacataaaagaacctttacaaataaaaaaaataaagaaattaaaggatatgatataagaaattcatatttagatgctaaaaactacgatggaaacaacggttatagatccggtcatttgcgccacctatctaaatatagagattatttaaaaaatgattcgattaatcattatagagttaaacacaatcacatccctccttggatattaataattcctcttaactttggagaaacaattaaatggttatcaatattaaaacctaaagataaacaagaagttgtatcaaaaatttctggattaaaagcagaagatgcattaaaaaatgtagctataccaatttttgaaattcttagacaatacagaaatgtaatcgcacatggccaacgattttattcgtataggtctgatgcagacagcgctcacctgtcctactcttttgtaaattctttgctggaacaagattttttagataaaactaaatataaaaaaggaattggtaaaaacgatttatattcattaattatttcaatattgatatttatcaaaccagcaaacattagaaaaaatctaatcgaggaaatcattgatttatataatgaaatagatgaatattctaaatataatttatttgaagtaataggaataaataaaggtgatttagataaattgagggttttagacagattaattaaagtgaagcaattgtaa

SEQ ID NO: 420049 - DNA, 210 bp, Staphylococcus aureus
atggcgagaaaagcaaggattgtaacaataaatgataaaccatataggtttaccaaatctgaaatggaattaatagaaagtcacggtataaccgctggaatggtttctaagagagtaaaagacggttgggaactacatgaagcagtagggattatgacggggcaagtggtctataaatatgaggaggagcaggaaaatgaaaaaatttaa

SEQ ID NO: 420050 - DNA, 162 bp, Staphylococcus aureus
atgaaaaaatttaatgttcaaatcacatacactggcatgattgaagagactatcgaggctgaaagtttagaagaagcagaaaatgaggcgcgtgatattgcgatgatggaagtaccatttgattgtgatgaatatgaaattaatgtagaggagaaagaataa

SEQ ID NO: 420051 - DNA, 648 bp, Staphylococcus aureus; identical to SEQ ID NO: 409262

SEQ ID NO: 420052 - DNA, 1125 bp, Staphylococcus aureus
atggaaattttacgtatagagccaacaccaagtccaaatacaatgaaagttgttttgtcatatacaagagaagacaagttatctaatacttataaaaaagtagaagaaacacaaccaagatttataaatcagttgttatctatagatggtatcacttccatttttcatgtcatgaacttcttagctgttgataaggcaccaaaagctgattgggaagtcatattacctgatattaaagctgctttttctgatgcgaataaggttttagaatctgtaaatgaacctcaaattgacaatcattttggtgaaattaaagctgaattattaacttttaagggtataccgtatcaaattaagctaacttctgctgaccaagaattaagagaacaattaccacaaacatatgttgatcatatgactcaagcgcaaacagcacatgacaatattgtttttatgcgtaaatggctagatttaggaaatcgctatggaaatattgaagaagtaatggatggtgtcctagaagaagtgctagctacctatccagaatcacagttacccgtattggtaaaacatgctttagaagaaaatcacgcaactaataattatcatttctatcgacatgtctctttggatgaatatcatgcaactgataattggaagactcgattacgaatgttaaaccattttccaaagccgacttttgaagatataccgctacttgatttagctttatctgatgaaaaagtaccggttagacgtcaagcgattgtattattaggtatgattgaaagtaaagaaattttaccgtatttatataaggggcttcgtgataaaagtcctgctgtaagaagaacagcaggggattgcataagcgatttagggtatccagaggcactaccagaaatggtgctactattagatgatccacagaaaatcgttaggtggcgtgctgctatgtttatctttgatgaaggtaatgcagagcagcttcccgcactaaaagcccatattaatgacaatgcgtttgaagttaaattacaaattgaaatggccatatctcgtattgaaaacggagatgaggcacttggttcagtatggaaacaaatggcaaacagaacaatttaa

SEQ ID NO: 420053 - DNA, 387 bp, Staphylococcus aureus
ttgattcaaatatctaatatcaacaagtcatttaataaaagatgtgttctaaaaaatatttcgttcgatattgaacaaggtaaatgtatcgctttaattggaaaaaatggtgctggaaagtcaacgttaattgatatattaattggtaatgttaatgctaattctggtgagatatttgataaagacaagttattacaaagtgaaaatcgcagtataatgttccaaaaaacgatgtttccagatcaattaaaggttattgagattatcaacttatatcaatcattttacgaaaatccattaccattggaagaaataatagaactgacgaaatttgattctagtcaactgaaccaatttgtaaataaactttctggtggtcaacaatga

SEQ ID NO: 420054 - DNA, 231 bp, Staphylococcus aureus
ttgttttcaatctatctaaagtgtgatagttttgataaagcagaaatttgcattttatccatagggctaggacatgtatgtgtcttagtcctttttatatttacgttgatgaaaaatgataatcatcaaatgaaagcacaatcattgtttaacggtcataaaaatgagtggagtaaatgtagctatcaatgtactattaccgcttacggtcacacgagtgtttcagtctaa

SEQ ID NO: 420055 - DNA, 390 bp, Staphylococcus aureus
atggggaaaaaacagagcagaaaaactggaaactctaaaaagcagagtgcctctcctcctccaaaggaatacagttcctcaccagcaattgaacaaagctggacggagaatgactttgacgagctgagagaagaaggcttcagacgatcaaattactctgagctacgggaggacattcaaaccaaaggcaaagaagttgaaaactttgaaaaaaatttagaagaatgtataactagaataaccaatacagagaagtgcttaaaggagctgatggagctgaaaaccaaggctcgagaactacgtgaagaatgcagaagcctcaggagccgatgcgatcaactggaagaaagggtatcagcgatggaagacgaaatgaatgaaatgaagtga

SEQ ID NO: 420056 - DNA, 219 bp, Staphylococcus aureus
atgagatgtagctgtagtccaggaatagtcagggaagcagataatttagttaaagtgtctcggcctaataagggaactgggcaggtggggataactaaaaaggagtgcttaaaagagtattgtctaagttggcaccagagttggggagttttaagaggtttagaagcctggccgtcaatacccacaacagttatggaggcaagggaaacaggcccttga

SEQ ID NO: 420057 - DNA, 561 bp, Staphylococcus aureus
ttgcagcctgacaatgtgatagaaaaggaaatcccattttctggggagaaattcaagccggctgcagaaatttgcataagtaacaaggagctgaatgttaatctccaagacaatggggaaaatgtctccagggcatgtcagagaccttcatggcagcccctcccatcacagacccagaggtctaggaggaaaaaatggtttcgtgggccaggcccagggtccccatgctgtgtgcagcctagggacttggtgccctgtgtcccagctgctccagctgtggctaaaaggggccaaggtacagctcaggctattgcttcagagggtgtaagccccaagccttggcagcttacatgtggtgttgggcctgcaggtgcacagaagtcaagaattgaggtttgggaacctccacctagatttcagagatgtatggaaatgcctggatgcccaggcaaaagtttgctgcaggggtggggccctcatggagaacctctgctagggcagtgcagaagggaaatgtggggtcagagcccccacacagagtcccactggggcactgcctag

SEQ ID NO: 420058 - DNA, 285 bp, Staphylococcus aureus
ttggagggctcagaagaagacaggaggatgtgggaaagtctgaaacttcctagagacttgttgaatagttttgaccaaaatgctgataacaatatggacaataaagtccaggctgaggtggtctcagatggagatgaggaacttgttgggaactggagcaaaggtgactcttgctatgctttaggaaagagactggtggcattttgcccctgtcttagagatttgtggaactttgaacttgagagagatgatttagggtatctggcagaagaaatttctaagtag

SEQ ID NO: 420059 - DNA, 309 bp, Staphylococcus aureus
atggaattgaatggaatcatcgaatggtctcgattggaatcattatcaaatggaatcgaatggaatcaccgaatagaatcgaatggaacaatcatcgaatggactcaaatggaattatcctcaaatggaatcgaatggaattatcgaatgcaatcgaatggaattatcgaatgcaatcgaatagaatcatcgaatggactcgaatggaatcatcgaatggaatggaatggaacagtcaatgaactcgaatggaatcatcatagaatggaatcgaatggaatcatcgaatggaatcgaatggaattatga

SEQ ID NO: 420060 - DNA, 384 bp, Staphylococcus aureus
atgagcgaacaaaacacatttgtggctagcgacgaaactgttgggcgaaaccgtaaacccaaccgtaaggagccaaaacaaattagttttcgtgtgagcgaatccgaatatttaaagttaaggcaatctgcggaaactttaaatatgagtgtgcctgctttcgtaaagaaaaaggcacaaggcagtcgattagtcgcaccaaaatttgataaagaaacgcgacaatcgattgctagagatttaagtaagttaggtgcaaacgccaatcagattgctaaatattgtaataaacatcaacatgaagcacccaattacatagcgttagaacataatatcaatgagttacgtgaaaggcttgatgagatatggcaacaactaaattag

SEQ ID NO: 420061 - DNA, 210 bp, Staphylococcus aureus
atggaatggaatggaatggaatggaatggaatcaacccgagtgcaggggaatggaatggaatggaatgcaatggaatggaatcatccggaatggaatggaatggaatggaatggaatggaatggaatggaatggaatcaacccgagtgcaatggaatggactggaatggaatggaatggaatggaacaacccgaatggaatggaatgtaa

SEQ ID NO: 420062 - DNA, 240 bp, Staphylococcus aureus
atggaatggaatggaagggaatggaatggaatggaatgtaatggaatggaatcaacccgagtgcaatcgaatggaatcgaatggaatggaatgcaatggaatggattcaacttgaatggaatggaaagaatggaatcaacacgagtggaagggcatggattggaatggaatggaatggaatcaacccgagtacaggggaatggaatggaatggaatgcaatggaatggaatcatccgtaa

SEQ ID NO: 420063 - DNA, 375 bp, Staphylococcus aureus
atgaacacgaatgtaatgcaatccaatagaatggaatcgaatggcatggaatataaagaaatggaatcgaagagaatggaaacaaatggaatggaattgaatggaatggaattgaatggaatgggaacgaatggagtgaaattgtatgcagtagaagagaatagaatggaatgcaagcgaaaggaaaggaatggattggaatggaatggaattcattggaatggaagggaatgtagtgtaatggacaggcctggaataaagtggaatgctacggtctcgaatggaataaaaatgtatggaatggaatgcaatgaaacggaatcgaatgtcatagaatgtaatggaatgcaaaaaaatggaatccaaaatcattga

SEQ ID NO: 420064 - DNA, 279 bp, Staphylococcus aureus
atggaatggaatcgaatggaatggaatgcaatgcaatggaatggaatcgaatggaatgcagtggaagggaatggagtggaatcaagtgcaatggaatggaatggaatggaattgaaaggaatggaatggaatcgaatggaatggactggaatggaatggattcgaatggaaggcaaaggaatggaatctattggaatggactgtaatggaatggaatggaagggattggaatggactcgaatggaatggactgcaatagaaaggattcgaatggaatga

SEQ ID NO: 420065 - DNA, 174 bp, Staphylococcus aureus
atgcttggcttcaaagcttcaaaggacaggctgagtttctggttaggggctaatgcagctggtgactttaagttgaagccaatgcttatttaccattccaaaaatcctaaagatgttaagaattatacgaaatctactctgcctgtgctctataaatggaacaacaaagcctga

SEQ ID NO: 420066 - DNA, 150 bp, Staphylococcus aureus
atggaatcaaatggaatggaccagaatgcagtggactggaataaaacggactcaatagtaatggattgcaatgtaattgattcgatttcgaatggaatcgcatggaatgtaatcgaatggaatggaatggaaggcaatagagttgaatag

SEQ ID NO: 420067 - DNA, 306 bp, Staphylococcus aureus
atgaaaaattttaagtgtttatttgtattaatgttagcagtcattgtttttgcagcagcatgtggaaactcaagttctttagataatcaaaagaacgctagtaatgattcggattctaaatcaggaggatacaaacctaaagaattaacagtacaatttgtaccttcgcaaaatgctggaacattagaggctaaagcaaaaccattagaaaaattactatctaaagaattaggaattccagttaaagtgtctgtatcaactaactacaatacaattgttgaagctatgaagtctaaaaaaagttga

SEQ ID NO: 420068 - DNA, 228 bp, Staphylococcus aureus
atggctcaaatcaaaaactatatcactcaagatgacggcacaacaacagtcgttatcgagggtgccgagctaggagacaaagaaacattattacttgataacggctacgaagtcgaatgtgatttgcgaatcgaagacccattcaaaataacagacaagcaacgaagaaaaatatttgcgctctgtaacgacatagagagccacacaggcaaccacgtgactatatga

SEQ ID NO: 420069 - DNA, 168 bp, Staphylococcus aureus
ttggattcagatacatctaaaattattatggacatatttacatcattaaaccgagataatcatactacaattattttagtcacacatgatcgtaaagtagcagaaaaagctgatcgaataattcatattttggatggtcgtatacaacatgaagaggtgattaaatga

SEQ ID NO: 420070 - DNA, 918 bp, Staphylococcus aureus
atgttcttaatttttggtgtatttattagacgagttactaacgctataataggtttagaacattttattatgcgtagaagtgctgttgaaatactattggcaacaataggtttaataatcggattacttatttctgttatggtgtcgtttatattggaatcaattggcaactctatttttaatcatttcattcctgtcataattacgatattactatgttatttcggtttccaatttggccttaaaaaacgagatgaaatgttaatgtttttacctgagaatatagcgcgttccatgtcacaacatactaaaagtgctacaccaaaaattatcgacacaagcgcaattgttgatggtcgtattttagaagtcattcgttgcggttttatcgatggcaatattttaattccacaaggtgttattaatgaattacaaattgttgcagattcaaatgacagtgttaaacgtgaaaagggtaaaagaggcttagatatcttaaatgaattgtatgatttagactatcctacaaaggttatacatccaactaaaacacatagtgatattgatacaatgctattaaaactagcaaaacaatatcatgcaagtattattacaacagatttcaacctaaataaagtatgtcatgtacatggtatcaaagcattaaatgttaatgatttatcagaagcaatcaaacctaatgtacatcaaggtgatcaacttcatattttactgacaaaaatgggtaaagagcctggtcaagcagtaggatatctagatgatggtacgatggtagttgttgataatgctaaaaatcttattggcagtcatgtcaatttagaagtagtgagcttattgcaaacatcttcaggaagaattgtttttgctaaaaaaatcgaagatacagtatcattataa

SEQ ID NO: 420071 - DNA, 342 bp, Staphylococcus aureus; identical to SEQ ID NO: 408510

SEQ ID NO: 420072 - DNA, 183 bp, Staphylococcus aureus; identical to SEQ ID NO: 408524

SEQ ID NO: 420073 - DNA, 288 bp, Staphylococcus aureus
ttgaaccaattagacatcacaatcgatcgtgtcacaaacaaaacaatcacttacagacacttgaaagaaaataaaaaagtgagaggtaaaaatttaggtgaacaattcgataagggggcattagaaaatgagtttgcggtcgcaaatgaacggagagaattcgagcaacaattatcagaatacgaaccaagagaaagtgagtacagaccaagagatacagaaaaaaatattaaacgtcctaaagaacttagagtccaatcacgagaaaacgactttgaacttgagtga

SEQ ID NO: 420074 - DNA, 666 bp, Staphylococcus aureus
gtgacaacacctccatcaacaaacacgccacaaccaatgcaatctactaaatcagacacaccacaatctccaaccataaaacaagcacaaacagatatgactcctaaatatgaagatttaagagcgtattatacaaaaccgagttttgaatttgaaaagcagtttggatttatgctcaaaccatggacgacggttaggtttatgaatgttattccaaataggttcatctataaaatagctttagttggaaaagatgagaaaaaatataaagatggaccttacgataatatcgatgtatttatcgttttagaagacaataaatatcaattgaaaaaatattctgtcggtggcatcacgaagactaatagtaaaaaagttaatcacaaagtagaattaagcattactaaaaaagataatcaaggtatgatttcacgcgatgtttcagaatacatgattactaaggaagagatttccttgaaagagcttgattttaaattgagaaaacaacttattgaaaaacataatctttacggtaacatgggttcaggaacaatcgttattaaaatgaaaaacggtgggaaatatacgtttgaattacacaaaaaactgcaagagcatcgtatggcaggcactaatattgataacattgaagtgaatataaaataa

SEQ ID NO: 420075 - DNA, 180 bp, Staphylococcus aureus; identical to SEQ ID NO: 408994

SEQ ID NO: 420076 - DNA, 177 bp, Staphylococcus aureus
atgtctttgagtttggtatttagtcgatggtggaatgaatttgtcgttttatggagatataaaaatgctgttttatggcagtttcaaaatggtgtttcgattaaaaagtcacagcaagacttagaactaactgtgacttatacatttcatacttatatttatcgattggttttatag

SEQ ID NO: 420077 - DNA, 429 bp, Staphylococcus aureus
atgtttacaagaaaacaacattattacccaagatgtttattgaaacattttgctaatgaaaacaagatgatatatgtacatattcgtcaggcgaataaaaaagcttttatgaattatgagaaagtatgtgtcgcaactgatgcatatgaaactgaagataaagttgataatattttagaaaacaaattaggggtatatgaatctgaaatagaaaagattattgattatattattaaaaatattaaatctaaggacttagatgtttcagtaaatatgcaaaacaagatttttcaatatattcatttacaatatttacgtactgacaccggaagaattaattttatgaatttaattgaaaatccgtttacatataaacttagaaaaaaacctatcgatctagatgaaatacaaaaaacaaaagtacaataa

SEQ ID NO: 420078 - DNA, 267 bp, Staphylococcus aureus; identical to SEQ ID NO: 417358

SEQ ID NO: 420079 - DNA, 222 bp, Staphylococcus aureus
atgtcattgcctggttctgatccttcaccagtgattttcttgctgcctgactctgtatccttaacttttggtgcgtctggtgccgtcgtatctaaatttccaagctggtttttcttattatttatttcatcaatcaaaacaggtacatctggtattttagttggtctttctagttcattttttattttttctaaatcttcttttatctcttcgccattttga

SEQ ID NO: 420080 - DNA, 186 bp, Staphylococcus aureus
atgataatgacaattggatcattagaaaaatctattaagttattcttaaaaagggcaaatccagcattattaaaagctgatactgatgtgaataagcttaaaaataatcctttgcctataccaaattttggtataaaagataaacacaaacaaatcataccaattaattcagtgactaaactataa

SEQ ID NO: 420081 - DNA, 216 bp, Staphylococcus aureus
atgtcattgcctggttctgatccttcaccagtgattttcttgctgcctgactctgtatccttaacttttggtgcgtctggtgccgtcgtatctatgacgttacctgtaccacttgatgattcattgcctgatggatctgtttcttttgctgtaactttgtctccaggttttatctcttcacctgctggtacgtcgacttcccattggccatcttga

SEQ ID NO: 420082 - DNA, 216 bp, Staphylococcus aureus
atgtcattgcctggttctgatccttcaccagtgattttcttgctgcctgactctgtatccttaacttttggtgcgtctggtgccgtcgtatctatgacgttacctgtaccacttgatgattcattgcctgatggatctgtttcttttgctgtaactttgtctccaggttttacctcttcccctgctggtacgtcgacttcccattggccatcttga

SEQ ID NO: 420083 - DNA, 216 bp, Staphylococcus aureus
atgtcattgactggttctgatccttcaccagtgattttcttgctgcctgactccgtatccttaacttttggtgcgtctggtgccgtcgtatctatgacgttacctgtaccacttgatgattcattgcctgatggatctgtttcttttgctgtaactttgtctccaggttttaactcttcacctgctggtacgtcgacttcccattggccatcttga

SEQ ID NO: 420084 - DNA, 144 bp, Staphylococcus aureus
atgaccaatccaacaagaacgaaacgttgtggggggatttgtcaattagaaactaaaactttttttgaatattttttaagaatagtaaataaaacgcatgattacgctattttagaaaataaaaaaatttgtatttctcagtag

SEQ ID NO: 420085 - DNA, 129 bp, Staphylococcus aureus
atgcgtcaattaatggggattttaggatggatagagaatttaagaccaataaaaaagcatcaaacagtaataagctgcttgatgcaaaatggtatggtattggttaaaatgtattgttttaaagattag

SEQ ID NO: 420086 - DNA, 660 bp, Staphylococcus aureus
atgatttcacacttgataacggatacttcgaagaagaaacatcagatagtgactcagattcagacagcgattcagactcagacagcgactcagactcagatagcgactcagattcggatagcgattcagatagcgactcagattcagacagcgactcagactcagatagcgactcagacagtgattcagactcagatagcgattcagactcagacagcgactcagattcagacagtgattcagactcagatagcgactcagattcagatagcgattcagattcagatagcgactcagattcagacagcgactcagattcagatagcgactcagactcagacagcgactcagattcagatagcgactcagactcagacagtgactcagactcagatagcgattcagattcagacagcgattcagactcagacagtgattcagactcagatagtgattcagactcagatagcgactcagattcagatagcgattcagactcagacagtgattcagactcagatagcgactcagactcagacagtgactcagattcagatagcgattcagattcggatagcgactcagattcagataacgattcagattcagatagcgattcagactcaaatgcaggtaaacatacaccggctaaaccaatga

SEQ ID NO: 420087 - DNA, 648 bp, Staphylococcus aureus
gtgtataagagacaggctgtaatcagtacgattattgtaacggttttaggtatttttatatctaaatggttgtatcgtcgtaagggttcgtgggttaaattattggaaagtttattgatattacctattgttttgccgccaacggtattaggttttattctattaatcatcttctcgccaagaggaccaatcggtcaattctttgcgaatgtactacatttacctgtagtgttcactttgacaggtgctgtgatagcatctgtcattgttagttttccactaatgtatcaacatactgtgcaaggcttcagaggtatagacacgaaaatgattaatacagctagaacgatgggagcaagtgaaacgaaaattttcctcaaattaattttaccattagctaaacgctctattttagcaggtataatgatgagttttgctcgtgcattaggtgagtttggtgctacattaatggttgcaggatatattccaaataaaacgaatacactacctttagaaatatacttcttagtggaacaaggtagagaaaatgaagcgtggttatgggtattagtgctagtcgcattctctattgtggttatatctacaattaatttattgaataaagataaatataaggaggtcgactag

SEQ ID NO: 420088 - DNA, 255 bp, Staphylococcus aureus
atgggtaaagattcaaatatccacgaaaaactttatgatttaattatgtgtcatttacaacgttataaaaatgaaaatgatcaaattaatggtataccattttcttatttcatgagttatgtttcaggtgcgggattgtcttttataagacattgggtagaagatccaaaccgtatagacaaagttgacttaataaggcattttaatacgattgtcaatcaagggccagcaacgataattaaaaatatacaataa

SEQ ID NO: 420089 - DNA, 408 bp, Staphylococcus aureus
ttgaaaaaattatgttcattaattgtagtagcattagtttgtatcattgcattatcagcttgtggtaaagaacaaaccaaaacatatgaaggtgatgttagtggtaaacatgtactaacttctatcacatataaagatgataaagttttaaaacagtctacaatcaacacaattaaatatgacgatctaggtatggataaagacgaagccaaaaagttattcgccaaatctgaaagtattttcaaagaccttaacttagacatagattacacagaagttgacatgaaaaaattaaataaacgtcttggtgtttcgactaaagaaaataaagatattagttttgaaaaacttgaaaagcaattaaagcacagaggtttaaaagaaaaagataaaatggacgacaaatag

SEQ ID NO: 420090 - DNA, 849 bp, Staphylococcus aureus; identical to SEQ ID NO: 405594

SEQ ID NO: 420091 - DNA, 210 bp, Staphylococcus aureus
ttggaaaaagatgatacactagcagaaattaagcctatgctcaattttgatgagcaaatagcgaaattaaaacagatgaatatattttttaatattattgacaccgaaaaagcaaatgaaattcttagaaaaaataattacttcttcaaactagcttatttccgaaaaaatttcgaaaaaaagaatggcggctttaactttagatattga

SEQ ID NO: 420092 - DNA, 216 bp, Staphylococcus aureus; identical to SEQ ID NO: 409121

SEQ ID NO: 420093 - DNA, 774 bp, Staphylococcus aureus; identical to SEQ ID NO: 406366

SEQ ID NO: 420094 - DNA, 210 bp, Staphylococcus aureus
atgactaaaagaaccagacctttaatgtcaaatttatttagagaaatcgatttagatttagtttcaggtgtgcctttaataagaaacagtgcaattaatgaaattataattgataggatgaaaatccaacgccaacctaaaagcgttgcaactgcacctccaaaaaatgaacaaacaccagagccgccccatgagccaattgaccaataa

SEQ ID NO: 420095 - DNA, 336 bp, Staphylococcus aureus
atgattaataatgaacctaatatatttaagataataccaatgttcgtgagtttaattctgccatatttatcagcaagaccacctgctcctactacaaacattcctgaaaataaagcagttatactaacggcgatattaaccgttccaatatctgtattgaaactatcttcaagtattggtacaacattaaccaatgattgtgcaaatagccaaaacgttattacacttagaacaattcctattaacaacttattattgccttcaaatgcctctcttgacggcttttccatctctatttgcctccctatacttttgaaaaacagacaaattccataa

SEQ ID NO: 420096 - DNA, 2580 bp, Staphylococcus aureus
atgagagataagaaaggaccggtaaataaaagagtagattttctatcaaataaattgaataaatattcaataagaaaatttacagttggaacagcatctattttaattggctcactaatgtatttgggaactcaacaagaggcagaagcagctgaaaacaatattgagaatccaactacattaaaagataatgtccaatcaaaagaagtgaagattgaagaagtaacaaacaaagacactgcaccacagggtgtagaagctaaatctgaagtaacttcaaacaaagacacaatcgaacatgaaccatcagtaaaagctgaagatatatcaaaaaaggaggatacaccaaaagaagtagctgatgttgctgaagttcagccgaaatcgtcagtcactcataacgcagagacacctaaggttagaaaagctcgttctgttgatgaaggctcttttgatattacaagagattctaaaaatgtagttgaatctaccccaattacaattcaaggtaaagaacattttgaaggttacggaagtgttgatatacaaaaaaaaccaacagatttaggggtatcagaggtaaccaggtttaatgttggtaatgaaagtaatggtttgataggagctttacaattaaaaaataaaatagattttagtaaggatttcaattttaaagttagagtggcaaataaccatcaatcaaataccacaggtgctgatggttgggggttcttatttagtaaaggaaatgcagaagaatatttaactaatggtggaatccttggggataaaggtctggtaaattcaggcggatttaaaattgatactggatacatttatacaagttccatggacaaaactgaaaagcaagctggacaaggttatagaggatacggagcttttgtgaaaaatgacagttctggtaattcacaaatggttggagaaaatattgataaatcaaaaactaattttttaaactatgcggacaattcaactaatacatcagatggaaagtttcatgggcaacgtttaaatgatgtcatcttaacttatgttgcttcaactggtaaaatgagagcagaatatgctggtaaaacttgggagacttcaataacagatttaggtttatctaaaaatcaggcatataatttcttaattacatctagtcaaagatggggccttaatcaagggataaatgcaaatggctggatgagaactgacttgaaaggttcagagtttacttttacaccagaagcgccaaaaacaataacagaattagaaaaaaaagttgaagagattccattcaagaaagaacgtaaatttaatcctgatttagcaccagggacagaaaaagtaacaagagaaggacaaaaaggtgagaagacaataacgacaccaacactaaaaaatccattaactggagtaattattagtaaaggtgaaccaaaagaagagattacaaaagatccgattaatgaattaacagaatacggacctgaaacaatagcgccaggtcatcgagacgaatttgatccgaagttaccaacaggagagaaagaggaagttccaggtaaaccaggaattaagaatccagaaacaggagatgtagttagaccgccggtcgatagcgtaacaaaatatggacctgtaaaaggagactcgattgtagaaaaagaagagattccattcgagaaagaacgtaaatttaatcctgatttagcaccagggacagaaaaagtaacaagagaaggacaaaaaggtgagaagacaataacgacaccaacactaaaaaatccattaactggagtaattattagtaaaggtgaatcgaaagaagaaatcacaaaagatccagttaatgaattaacagaattcggtggcgagaaaataccgcaaggtcataaagatatctttgatccaaacttaccaacagatcaaacggaaaaagtaccaggtaaaccaggaatcaagaatccagacacaggaaaagtgatcgaagagccagtggatgatgtgattaaacacggaccaaaaacgggtacaccagaaacaaaaacagtagagataccgtttgaaacaaaacgtgagtttaatccaaaattacaacctggtgaagagcgagtgaaacaagaaggacaaccaggaagtaagacaatcacaacaccaatcacagtgaacccattaacaggtgaaaaagttggcgagggtcaaccaacagaagagatcacaaaacaaccagtagataagattgtagagttcggtggagagaaaccaaaagatccaaaaggacctgaaaacccagagaagccgagcagaccaactcatccaagtggcccagtaaatcctaacaatccaggattatcgaaagacagagcaaaaccaaatggcccagttcattcaatggataaaaatgataaagttaaaaaatctaaaattgctaaagaatcagtagctaatcaagagaaaaaacgagcagaattaccaaaaacaggtttagaaagcacgcaaaaaggtttgatctttagtagtataattggaattgctggattaatgttattggctcttagaagaaagaattaa

SEQ ID NO: 420097 - DNA, 636 bp, Staphylococcus aureus
atggcaactgatcttgttagtccctctatagattgtccaagtcccaataatgttgcacctatatataatatcgccacacttggaaacacattaataatcgataagccaattccccaaactaaaacaccaatactaaatttaaagattaatcgcttttctgacagcaaacccataatcaatgacattaataaagatgctatacctaaacatgatgtagctagtccatatacaccaacgccctcttttaatatattggaaataaacaatggtaatacaacacgccaaaggccagtattaatcaatatgcaggcaaattggatgattataataaatggaatttctttagattgtttcaagaattcccaagtttcagaaaaatcttcttttgagtgtctatcaatcatgttgttatttgtatattttaaaagtgcattaaaaataaatcctaaaaatagcaatatactacaaataaaaaagacgccaacattaccaactagtattacaatgacaccaattaaagcaggtaaaataatatttgagcctctttgcaaactatcgattaacgcattacttgttgctaaatgctcctcatcaataatttcaggaagaattgccctaaacgcaggatccgtatag

SEQ ID NO: 420098 - DNA, 417 bp, Staphylococcus aureus
gtgatacatttaactggtaaaggattaaaagatgctcaagttaaaaaatcaggatatatacaatatgaatttgttaaagaggatttaacagatttattagcaattacggacacagtaataagtagagcagggtcaaatgcgatttatgagttcttaacattacgtataccaatgttattagtaccattaggtttagatcaatcccgaggcgaccaaattgacaatgcaaatcattttgctgataaaggatatgctaaagcgattgatgaagaacaattaacagcacaaattttattacaagaactaaatgaaatggaacaggaaagaactcgaattatcaataatatgaaatcgtatgaacaaagttatacgaaagaagctttatttgataagatgattaaagacgcattgaattaa

SEQ ID NO: 420099 - DNA, 1713 bp, Staphylococcus aureus; identical to SEQ ID NO: 405596

SEQ ID NO: 420100 - DNA, 1638 bp, Staphylococcus aureus; identical to SEQ ID NO: 404950

SEQ ID NO: 420101 - DNA, 1446 bp, Staphylococcus aureus
gtgtataagagacaggttttagcatcgcacggtttatctaaaggcgataaagtactcattatgatgccacgatctattgcgacgtatgaattatatattgctgctttaaaattaggtgttgcaatcattccatgttctgaaatgctaagaactaaagatttacaataccgtatcacacatggtgaaattaatgcagttattgcactagagccattcacagttgaatttgaaaaaattaaagaatatgatgcgttaactaaatttgttattgccggtcaaaaagatggatggatttcacttgaagctgaaaaagaaaacgcaagtaacaaactagaaatggcagatacgacgcgtgatgatatggcgattctgtcatatacatctggtacaactggcaatcctaaagccgttacacattgtcatggatggggatttgcacatttacaaatggcaccaaaacattggttatgtattaatgaagatgacttagtttgggcaacagcagcaccaggttggcaaaaatgggtatggagtcctttcttatctgtattaggttcaggtgcaactgcttttgtatttaatggaaggttcagtcctgaaacatacttagaattgcttcaaaaatatcaaattaatgttttatgttgtacaccgacagaatatcgtatgatggctaaattacagaacttaaatgattatgacttaacgcatttacatagtgccgtttctgcaggtgagccactaaatcgagaagtagttgaacaattcaagaaatactttaatttaactgtaagagatggatatggccagactgaaagtaccttgcttataggctttttaaaagatacaccacagaggattggatcaatgggtaaaggcattccgggtagttcggtcactgtagtagatgatgaggggaatagcgtacctgctaatacgaaagggaatattgcagtaccacttgatttgccagcacttttcaaagggtattataaagagccagaacgtacggcgaaagcgcaaacaggtaaatactacatcactggtgacttagctcatgtagatgatgatggttatttctggtttgaaggacgtcgagatgacattattattagttcaggctatacgattgggccttttgaagttgaagatgcgttaacgaatcatccagccgttaaagaatgtgctgtagtagcaaaacctcatgatatacgaggaaatattgttaaagcattcgttattttacaggaccatactgcgggtgatgatacgttagttaaagaactacaacaatttgttaaaaatgaagttgcaccatataaatatccgagagagattgaattcgttgacgacttaccaaaaacaaactcaggtaaaattcgtcgtgttgaactacgagatgctgaaatagaaaaatggcaacaacaaaaagatagcaatcaataa

SEQ ID NO: 420102 - DNA, 825 bp, Staphylococcus aureus
gtgaatcaaatattaagtctagaagagttagtattgtcaacaaaatttaagaagcctcaacattatgaaattgcttttaataatgttggattttcatataacaaagataaggacgatctggtctttaagcatttatcatttacagtaccagaaaataatttcacagctatcgtcggggcatctggtagcggtaagtcaaccattgccaagcttatatcacgatactgggatgtgacttcaggtgaaattacgattggcggtataaatataaaagatattgaatcgaaacaacttaacgatttagttggttttgttggacaagataactttttattaaatcttacttttaaagaaaatattaaacttggcaatccagaagctacggatgaggcagttgaaaaagctgccaagttagcacaatgtcatgaatttattgaaaagttgccagatggatatgatacgaatgttggtacagtgggagataaattgtctggtggtgaaaaacaacgagtcactattgcaagaatgatattaaaagatgcgcctatcattgtattagatgaagcgactgtttacgttgatccagacaacgaacaaaaaattcaagaagcattaaatgtgttgacgcaggataaaacattgattgttattgcacatcggttatctacgattcaacatgcagatcaaattattgttttaggtaaacaacaaattttagaaaaagggtcacatcacttattgctaaaattaaacggtaattataagaaaatgtgggatacgcacatgcatacaaaagattggggaatcaatactggacataattaa

SEQ ID NO: 420103 - DNA, 1422 bp, Staphylococcus aureus
atgtttaattcagaagaagatgaaagctataaagatcataataaagagaagcaacaattattaacacaacagttagagttagagaaatgtaaaaaaaacaaacatgaagaccttgttagcaaactaaaagaaaaagagaaattaattaaacaattaactaaagtacagttgcaattagacgagttaaattcacagttacaagagttagaagcatatcgtattgagtcaaaaattacaattccagaaaaagatttttggagtgacaacaattatgatgagcgccaagttactaatctgtggacgagtgacgaacttcaatacagacgtgccatgctctttttaagagcaatgatattgcataaattattattgattgctaataatacaactatttattatgcgattaatgattttaaagatagaaggaaattaattgatgcaaatccagataaagtacacaacgcatggaatgtgatgcatttaatatttccagtagttagtacgacgtttgcaagctttaaatctatgtatgggggcataccaaaagatttcatagactacttatttattgatgaagcaggacaagcaatacctcaagcagctgtgggagcattatatcgttcaaaaaaagttgtagctgtaggtgatccgattcaaatagaaccggttgtgactttagaaagtcatttaattgataacattcgtaaaaattatcatgttccggaatatctagtttctaaagaagcttctgtgcagtctgttgcagacaacgccaatcaatatggtttttggaaatctgatgctactgatagtaatcaaaaaacctggataggcatacctttatgggtgcacagacgatgtttaaaacctatgttcacgatagctaaccaaatcgcttataataataaaatggtgttgccaagtaatattacaaaagtaggtaaaacaggttggtatgacgttaaaggaaacgcagttcaaaaacaatttgtgaaagagcatggtgaaaaagtagtgggattattagctgatgattggattgaagcaattaaggaaggtaaaaatgaaccgagctcatttgtaatatcgcctttttcagcagtacagcaacagattaaacgtatgttaaagcaacaactaccgactagaattgatattgaacgtacaaaaattaatcaatgggtcgataaatccattggtactgttcatacttttcaaggtaaagaggctcagaaggtgtattttgtaataggtactgataatacccaagatggtgctgtgaactggtcatgcgaaaaaccaaacttgttaaacgttgcagtgacaagagctaagaaagagttttatgtaattggcgacatgcaaagaatgcagatgaaaccattttatgagacgatttttaaagaaagaaatgtaaaataa

SEQ ID NO: 420104 - DNA, 1062 bp, Staphylococcus aureus
atgtgtataagagacagatctaatataagttatgaaatagaaaacgcaaataacagtggtttaaaacaaaataaaattgataaacaaattaaaaagttacaagaaaaaaataaattccctaaaaatctttcatatcttaaaagttatacggaccccaaaacaggcacgactacaagcgcctttttaaataaagacactggcaaagttactttaggtatgacaggtactaatgtacacaaagacgcaatattaaaacaaacatttggtgttccttcttatcaaggatatatagatgtgagtgaaacgctaaaggatattggggccgatgtcaatattggccttcattccgtcacagataaagatccacattataaaaatacccaagactttatcaaaaatatcaaaaaagactatgatattgatattattaccggacattcgctgggcggtagagatgcgatgattttaggtatgagtaatgatattaaacatatcgttgtgtataatccagctccattagcgatcaaagatgtgagcggcctttatgccgatcaagaagaacttaaaaaattgattgaaaagtacgatggtcacattgtaagatttgtgtctgatgaagacgaattagatgcaggtgtccgcaatcatttatatgaaactgctggagaaaaaatagtacttaaaaatggagaaggccatgcaatgagtggtattttaatgagcagaacacaggctataatcttagctgaattaaacaaagttaaaggctaccaagacgaaaataataaagcattaaaatccgttcgtaaacaaacgaggcatagattacataaagtagagacgttaagagcgaattggattcaaacaacgggtggatcactctcttcctcccaacaacaattattagaagctttaacagcactaaccattgccgaaggcttaaatcaattagtgaatgaagaaagccaacatttgaaaaaatgtatcacgcgatggcacataaatttggagacaactggaaaaaagcgcaagaagttggaaatgaaattggtgaaaaattaa

SEQ ID NO: 420105 - DNA, 513 bp, Staphylococcus aureus
atgttgctttgcgatgtcagagtcatttataaaaatccgaaatacaaagtcattcaacataacggtgaatacttattagtcgatttagtaagcacttggttcgtgtacttttttcctttcattaattggttcattccaaaaaagtacgcgataattagcgaagaagaatttgaaaatttaaatgttgttaaaccaaataaaaataatgttttctggtcagttataggaagttcggttttgtttggagttactttaaggaaatacatacatgtttttgatgttcaattagataagctagttgtaatgatattgtgtgctctcgctttaatttgtgttatagttttttattttaacttaaatagaaagcttaagttaaaagtgtttgatacaaatattgaaaaaaataagagagttatattaataccaacgtttaaacttggctgttttttagttttcggatatattttcgctggaagtttttcaatattttcattaattgcccttatgacatga

SEQ ID NO: 420106 - DNA, 732 bp, Staphylococcus aureus
atgtgtataagagacagagataactacggttataatccaaacgacccaacatcatatagctatacttacactattgatgcacaaggtaactaccattacacatggaaaggtaactggcatccaagtcaattaaaccaagataatggctactacagctattactactacaatggttacaataactataacaattacaacaacggttatagctacaataactacagccgttacaacaactactcaaataataatcaatcatataactacaataactataatagttacaacacaaacagctaccgtactggtggtttaggtgcaagctacagcacttcaagcaacaatgttcaagtaactacaactatggctccatcatcaaatggccgttcaatctcaagtggttatacttcaggacgtaacttatacacttctggtcaatgtacatactacgtatttgatcgtgtaggtggtaaaatcggttcaacttggggcaatgcaagtaactgggctaacgcagctgcaagagctggttacacagtgaacaatacaccaaaagctggtgcaattatgcaaacaactcaaggtgcatacggtcacgttgcatacgttgaaagtgttaacagcaatggttcagtaagagtttcagaaatgaactatggttatggcccaggtgttgtaacttcacgtacaatctcagctagccaagctgctggttataacttcattcactaa

SEQ ID NO: 420107 - DNA, 429 bp, Staphylococcus aureus; identical to SEQ ID NO: 406088

SEQ ID NO: 420108 - DNA, 492 bp, Staphylococcus aureus
ttgttaaagacatatgcttttataggtttattaagtcatgatggcgtgattaatcaatttttccacttatttaatttaccatcattcaatttgttatttacaactggtgcgtttttagtagtggcaagttacatttatataccatttatgattttacctatatttaatagcatgaaagcaattcctaataatttattgcaggcctcaagtgatttaggtgccagtcctttctatacttttagaaaagtaatcatgccgttaacaaaagaaggtgttatgactgggattcaagtaacctttattccatcactttcattatttatgattacaagattaattgcaggtaataaagtcataaatataggtacggcaatagaggaacaatttttaacaattcaaaattatggtatgggatcaactatagctatattcttaattgtatttatggcattcattttaatcattacaaaatcatctaatgggagagggtga

SEQ ID NO: 420109 - DNA, 387 bp, Staphylococcus aureus
atgtttgatgaaggtattattgaagatgccaattataaagtagacgtttcaaattgtattttcattctaacatctaattttaatagtattgaagaagcaatagttaatattggagaaccggtattttctagaatagattcctgtattaaatttttatatttaacacaggaagaaaagcagaaagtaatagaaaataaattaaatgaaatactatcatctctaaatgaaaaagaaaaaagaatagttaccgcatataacttgttagagaaatataaagagacagaaatagatatcgataacattaggtatttaaagaaaataataacaaatgatatttatacaataatttttgaagatgaattatttaatacggatattatagattaa

SEQ ID NO: 420110 - DNA, 243 bp, Staphylococcus aureus
atgatgttttacgaaaaaaatgcagagtatatgagaatccttgcgtttgttatacattctgaatttaggaaaaaaggttatggaaagagattattagctgattctgaagaattttctaaacggttgaattgtaaagcaataacactaaatagtggtaatagaaatgaaagactatctgcacataaactatatagtgataatgggtatgttagcaatacatctgggtttactaaacaactataa

SEQ ID NO: 420111 - DNA, 753 bp, Staphylococcus aureus
ttgacgattaaaaatgaaaatatcgcttttcaaaacgtgaacttttcatatgatgataaacaagtgataaagaatgtgaattttgagatacctacacaaacatcaacagcaataattggaccttcaggaagtgggaaatctacattatgtcacttactcttgcgcttttatgatatcgatgatggaaatattcgcatcgatggtgttgatattaaagatatgacattaagtacgttaatgtcgaaaattagtgcagtatttcaaaaggtgtatttatttaatgatacgattgaaaataacatattgtttggcaatccaggtgcaacgaaagaagaaattattcgtgcagcgaagcaagcatgttgccacgacttcatcatgtcattacctgagggatatcaaacaatgctaaatgaaaaaggtagtaatttatctggcggagaaaagcaaaggatttctattgctagggcgatattaaaagatgcaccaataattattttagatgaagcaactgcaagtattgaccctgaaaatgaacagctgattcaaacggcaattaatgaattaagtaaaggcaaaacagtaattacaattgcacataaacttgaaactattaaaaatgcagatcagattatagtgctcaatgaaggtgaaataattcaaaaaggtagtcatgatgaattaattcgaaaaccaggaatgtatcaagactttataagaataaaaagtaaatcagcaggctggaaattataa

SEQ ID NO: 420112 - DNA, 444 bp, Staphylococcus aureus; identical to SEQ ID NO: 404796

SEQ ID NO: 420113 - DNA, 270 bp, Staphylococcus aureus
atgttaccacttattacagctccaataatcaacaatataccactcatttttttgtttttagatgctttaaacataccgattgcacctaaaataattgaaatgattccaaatatgaatagggataagaataatacagtgaaaattgctgctgctgtttctgcatcaactgggtcaacctcaccattaactgttgttgacacatctgtagtcattacacctgatgctgctaaaaccatcaatagtaaactaaataccgttgctaaaccctga

SEQ ID NO: 420114 - DNA, 540 bp, Staphylococcus aureus
atgaacatagggaataaaattaaaaatcttagaagaattaaaaatttaacgcaagaagaacttgctgaacgtacagacttatcgaaaggctacatttcacaaatagaaagtgaacatgcctcaccaagtatggaaactttcttaaatattatagaggtgttaggaacgacgccaagtgaattttttaaagacagtgaaaatgaaaaagtattatacaagaaggaagaacaagttatttatgatgagtatgatgaaggttatatattaaattggttagtttcaaagtcaaatgaatatgatatggagccattaatattaactttaaagcctggagcatcatataaaaattttaatccatcagagtctgatacgtttatttattgtatgtcaggtcagataacacttaatttaggcaaagagatatatcaagcacaagaagaagacgttttgtattttaaagcacgagataatcatcgtttgtcaaacgaatcaaacaatgaaacacgaatacttattgtagcgacagcttcatatttataa

SEQ ID NO: 420115 - DNA, 411 bp, Staphylococcus aureus
atgaagtcaaataaatcgcttgctatgattgtggtagccatcattattgtaggtgtattagcatttcaatttatgaatcatacgggtcctttcaaaaaggggacgaatcatgaaactgtacaagatttaaatggtaaagataaagtacatgttcaaagagttgtggatggtgatacatttattgcaaatcaaaatggtaaagaaattaaagttaggcttataggggttgatacgccagaaacggtgaaaccgaatacgcctgtacaaccatttggcaaagaagcatcaaattatagtaagaagacattaacaaatcaagatgtttatttagaatatgataaagaaaaacaagatcgctatggtagaacctgtctcttatacacatctccgagcccacgagaccgaggctga

SEQ ID NO: 420116 - DNA, 525 bp, Staphylococcus aureus
atgataaatactgaaagattaaatttaatgattccaagttcctcgcatttaattgaactttataatatttgtagtcatccacaagcaaatatatacactcccaaaggtttacataattccaaattagacacacaacggtggattgaaaaatggcgaaaccattggcaacaatatcaatttggttactttgtattggtaaaaaaaatagattgtagtgttattggtatttgtggatatgaatatcgacaattaaagcaagaaacagtattaaatttattttataaattacatccaagttttgaaggacaagggtacgcatgtgaggctattacagcaatcacaaattttgtgaattatatcgatcaagaaacagtaaaagttatcaggacaaataagtgtaaccaacgttcaataaatttagcagaaaggcttaaattcaagcgagacgatactatggacgacattatcaatcaaggagatatctgtctcttatacacatctccgagcccacgagaccgaggctga

SEQ ID NO: 420117 - DNA, 342 bp, Staphylococcus aureus
atgaaagatttcaaattaaacgatattcaaaaccatacattacttgttactgaaaaagggtgtagttacagagaacagttagaaatgattttatataaatatagcttttcaacaaaacaaatgattgaatttctaggaattgagtcattaaaaaaacacttgaaaaattcaggtgggattgcgctattgccggaatttattgttgcagatgaattagaaaataaaagtttgtttcaaatagacgtagatgtcgatattccgaatttagaaacaacattgataattaatcctgaatcgaataagcaagtacttgaatcttttgtaaaagatgtttttttataa

SEQ ID NO: 420118 - DNA, 237 bp, Staphylococcus aureus; identical to SEQ ID NO: 416220

SEQ ID NO: 420119 - DNA, 513 bp, Staphylococcus aureus
  misc_feature (491)..(500): n is a, c, g, or t
atgaaaaaagtaagtgttataatgccaacattcaataacggcgaaaaattacatagaaccattagttctgtattaaatcaaacaatgaagagtactgattacgaattaattattattgatgatcattcaaatgacaatggtgagactttgaatgttataaaaaaatataaaggattagttcgttttaaacaattaaaaaagaatagtggaaatgctagcgtacctagaaatacaggcttaaaaatgagcaaagctgaatatgtattctttttagattctgatgatttacttcacgaaagagcactagaagatttatataattacggcaaagaaaataatagcgatttaataattggaaaatatggagttgaaggtaaaggaagaagtgttcctaaagctatatttgagaaaggaaatgtagcgaaagctgatattattgataatagtattttttatgctttatcagtactaaaaatgtttaaaaaaagtgnnnnnnnnnngtgttatagataa

SEQ ID NO: 420120 - DNA, 723 bp, Staphylococcus aureus
atgaacaaaaacgtagtcatcaagagtttagcaactttaacaattttaacatctgtaacaggtattggaacaacattggttgaggaagttcaacaaactgccaaagcagaaaataatgtcacaaaaattcaagatactaatatttttccatatactggtgtagttgcttttaaaagtgcaactggatttgtagttggaaagaatactattttaacaaataaacatgtgtcgaaaaattacaaagtgggcgatcgtattactgcacatccaaatagtgataaaggtaatggtggtatttattcgattaaaaagattattaattatccaggtaaagaagatgtatcagtcattcaagttgaagagcgtgcaatagaacgtggaccaaaaggctttaattttaatgataatgtaacgccattcaaatatgcggcaggggctaaagctggtgagcgaattaaagtgattggttatccacacccatacaaaaataaatatgttttatatgagtcaactggccctgtgatgtcagtagaaggtagcagtattgtatattcagcgcatactgaaagcggaaactctggatcacctgtattaaacagcaacaacgaattagttggtattcattttgcttctgatgtaaaaaatgatgataacagaaatgcatatggcgtctactttacaccagaaattaaaaaattcattgcagaaaacatagataaataa

SEQ ID NO: 420121 - DNA, 147 bp, Staphylococcus aureus; identical to SEQ ID NO: 414010

SEQ ID NO: 420122 - DNA, 150 bp, Staphylococcus aureus
atgaattatttcagatataagcaatttgacaaagatgtcattactgtagccgttggctactatctaagatatgcattaagttatcgtgatatatctgaaatattgagagaacgaggcatctatgttcatcattcaacaatttatcgatag

SEQ ID NO: 420123 - DNA, 147 bp, Staphylococcus aureus; identical to SEQ ID NO: 414010

SEQ ID NO: 420124 - DNA, 369 bp, Staphylococcus aureus
ttgaaacgatcaacgaatcaagaaaaatttcttgatacactaattagacttaatactaagattgaagaactaggaaagataaatattttaaataatcatatatattccgaatatttttttagagacctgttaaatattgtatatgggtattcacttgagaatcataataaaaaacaaaaaaatgcaccagcatttgatcttatagataatacgaataaaattattattcaagttaccgcaacgtgtaaaaagcaaaaaatagaggacactctaaaaaaagagtatttaacaaataaaatggaagaaggttatcgattaaagtctgtctcttatacacatctgacgctgccgacgactccttacgtgtag

SEQ ID NO: 420125 - DNA, 207 bp, Staphylococcus aureus; identical to SEQ ID NO: 407405

SEQ ID NO: 420126 - DNA, 651 bp, Staphylococcus aureus
atgatttcacacttgataatggatacttcgaagaagatacatcagacagtgactcagactcagattcagacagcgattcagattcagacagtgattcagactcagacagcgactcagactcagacagcgactcagactcagacagtgactcagactcagacagtgattcagattcagacagcgattcagattcagatagcgactcagattcagacagcgattcagattcagacagcgattcagattcagacagtgattcagactcagacagcgactcagactcagacagcgactcagactcagacagtgactcagactcagacagtgattcagattcagacagcgattcagattcagatagcgactcagattcagacagcgattcagattcagacagcgattcagattcagacagtgattcagactcagacagcgactcagattcagacagtgattcagactcagacagcgactcagactcagacagtgactcagattcagatagcgactcagactcagacagtgactcagactcagatagcgactcagattcagacagtgactcagactcagatagcgattcagattcagatagcgactcagattcggatagcgactcagattcagatgcaggaaaacatacacctgtga

SEQ ID NO: 420127 - DNA, 222 bp, Staphylococcus aureus
ttgttcaaatggttaagaaataatggatatctcattaaaaagagtggagaaagttataacttaccaactcaaaagagtatggatctaaaaatcttggatatcaaaaaacgaataattaataatccagatggttcaagtaaagtatcacgtacaccaaaagtaacaggcaaaggacaacaatactttgttaacaagtttttaggagaaaaacaaacatcttaa

SEQ ID NO: 420128 - DNA, 966 bp, Staphylococcus aureus
atgctatttgcgcatttgaaaaactttagcaaatcaccacctagtggcacaatggtgaaaccgggtgatgttgtaggtttaactggtaatacaggttttagtacaggaccgcacttacattttgaaatgagaagaaatggacgccattttgaccccgaaccatatttaagaaacgccaagaaaaaaggtagattatcaataggtggcggtggagttacttccggtagtggtgcaacgtatgccagcagagtaattcgacaagcgcaaaatatcttaggtggtcgttataagagtaaatggattcacgaccaaatgatgcgagttgcaaagcgtgaaagtaactatcaagcgaacgcagtgaataattgggatattaacgcaagaaggggtgacccttcaaaaggattgttccaaattatcggttcaacatttagagctaatgcgaagtctggttatactaacttcaacaatcctgttcatcaaggtatttcagcaatgcagtacattgttagacgctacggttgggatggatttaagcgtgcgggtgattacgcatatgctactggtggcaaagtctataacggattgtatcacttaggggaagaaggatatccagagtggataatacctactgatccaagtagagcgaacgaagcacacaaattattagctttagctgctaacgatattgataaccgctctaaaaataagcgaccaaacaacttaccaaatccaagtataagtaatagtgatacaaactatattcatacattggagaataaactagatgcggttattaattgtttggttagtttggttgagtctaatcaagttattgcagataaggattacgaaccagttattaataagtatgtgtttgaagatgaggtaaataattctatcgataaacgagagcgtcacgaatctacaagagttagatttagaagaggaggcacgataatctaa

SEQ ID NO: 420129 - DNA, 972 bp, Staphylococcus aureus
atgctatttgcgcatttgaaaaactttagcaaatcaccacctagtggcacgatggtaaagcccggtgatgttgttggtttaactggtaataccggatttagtacaggaccacatttacattttgaaatgaggagaaatggaagacattttgaccctgaaccatatttaaggaatgctaagaaaaaaggtaggttatcaattggtggcggtggcgctacttctggaagtggtgcaacttatgccagccgagtaatccgacaagcacaaagtattttaggaggacgttataaaggtaagtggattcatgaccagatgatgcgagttgcaaagcgcgaaagtaactatcaatcaaatgcagtgaataattgggacattaatgctcaaagaggagacccgtctagaggattattccaaattatcggctcaacttttagagctaacgctaaacgagggtacactaattataataatccagtacatcaaggtatctcagcaatgcagtacattgttagacgatatggttggggtggttttaaacgtgctggtgattacgcatatgctacaggtggaaaagtttttgatggttggtataacttaggtgaagacggtcatccagaatggattattccaacagatccagctcgtagaaatgatgcaatgaagattttgcattatgcagcagcagaagtaagagggaaaaaagcgagtaaaaataagcgtcctagccaattatcagacttaaacgggtttgatgatcctagcttattattgaaaatgattgaacaacagcaacaacaaatagctttattactgaaaatagcacaatctaacgatgtgattgcagataaagattatcagccgattattgacgaatacgcttttgataaaaaggtgaacgcgtctatagaaaagcgagaaaggcaagaatcaacaaaagtaaagtttagaaaaggaggaattgctattcaatga

SEQ ID NO: 420130 - DNA, 309 bp, Staphylococcus aureus
atgacggtcaccttatcagatgaacaatataaaaacctttgtactaaattaaacaagttattaggtaaatttcacaaagcattaaaagaacgtgatgagtacaagaagcaacgtgacgagcttattggggatatagctaagttaagagagcgtaacgaagagctggagaagaaagcaagtgcatgggataggtattgcaagagtgttgaaaaagatttaataaacgaatttggcaaagatgttgaaagagttaaatttggaatggatttaaacaataaaatttttatggaggatgacactaatgaataa

SEQ ID NO: 420131 - DNA, 249 bp, Staphylococcus aureus
atgcctaaaaccgatagcgcatgtaaagaatacttaaaccaatttttcggatctaagagatatctgtatcaggataacgaacgagtggcacatatccatgtagtgaacggcacttattactttcacgggcatatcgtaccaggctggcaaggtgtgaaaaagacatttgatttagccgaagagcttgaaacatatataaagcaacatggtttggaatacgaggagcagaagcaactaactttattttag

SEQ ID NO: 420132 - DNA, 555 bp, Staphylococcus aureus
atgaaaatcactggtagaacacaatacattcaagaaactaatcaagaggcattcatgaaaggtggggactttttaggagctggagaatttacagtaaaagttgcaaatgtcgagtttaacgacagagaaaacagatacttcacgattgtttttgaaaacaacgaaggtaaacaatacaaacacaaccaattcgtcccaccattccaacaagattatcaagaaaaacaatatatcgagttacttagtagattaggaattaaattgaacttaccagatttaacttttgacacagatcaattaattaacaaaatcggaactattgtacttaaaaataaatttaacgaggaacaaggcaagtattttgtaagactctcatatgtaaaagtttggaataaagacgatgaagtagttaataaaccagaacctaaaactgatgagatgaaacaaaaagaacagcaagcaaatgggaaacagacgccaatgagtcaacaatcaaacccattcgctaatgctaatggtccaatagaaatcaatgatgatgatttaccgttctag

SEQ ID NO: 420133 - DNA, 360 bp, Staphylococcus aureus
atgatcagtaaaattgataaaaataaagtgcgtttaaaaagacatgctcgtgttcgtactaacttatcaggtacagctgaaaagccacgtttaaacgtatatcgttcaaacaagcatatctacgctcaaattattgatgataataaaggcgtaacattagctcaagcttcttcaaaagacagcgacattgctactacagaaactaaagttgaattagcaactaaagtcggtgaagcaattgctaaaaaagctactgacaaaggcattaaagaaatcgtatttgaccgtggaggatatttatatcacggacgtgttaaagcattagctgaagcagcaagagaaagcggattagaattttaa

SEQ ID NO: 420134 - DNA, 288 bp, Staphylococcus aureus
gtgcaagaaacgaacaaagtagaaagcgcaccggaagcgaaagctacagaaagtgtgcaagaaacgaacaaagtagaaagcgcaccagaagcgaaagctacagaaaatgtgcaagaaacgaacaaagtagaaagtgcacaacaacaagataaaggaaaatcagtagaggcaaatgaaaagtctttttatgatttaagtaaaaaaattgatcaagcagttaataaaaaagaagttgtggaaaagcaagttaaaaagcaattttcgagtgtattatctgaaaaaaaataa

SEQ ID NO: 420135 - DNA, 1101 bp, Staphylococcus aureus
ttgaaaaagaaattggactttttacctaataagttgaataagtattcaattagaagatttacagtaggtacggcatctatattagtaggatctactctattatttggtattgggaatgaggcacatgcagcagaagagcatcaaaaatcaaacactacagaaaatgtagctgacagtaatgcaagcgaagcaccaacaaaagaagaagcgccaagcaatgaagcaacaagcgaagcaccaacaaaagaagaagtgccaagcaatgaagcaacaagcgaagcaccaacaaaagaagaagcgccaagcaatgaagcaacaagtgaggcaccaacaaaagaagaagcgccaagcaatgaagcaacaagtgaggcatcaacaaaagaagaagcgccagcagctgaagaaacagacaaagcaacagaagaagcaccaaaaactgaagaaacagacaaagcaacaaaagaagaagcgccagcagttgaagaaacaagcaaagcagcaacagaagaagcgccaaaagctgaagaaacagacaaagcaacagaagaagcaccaaaaactgaagaaacaagcaaagcagcaacagaaaaagcaccaaaagctgaagaaacaaacaaagtagaaacagaagaagcgccagcagctgaagaaacaaacaaagcagcaacagaagaaacaccagcagttgaagacacaaatgctaagagcaattcaaatgctcaaccatcagaaactgagagaactcaagttgtagatacagttgctaaagatttatataaaaaatctgaagttacagaagcagaaaaagctgaaattgaaaaagtattaccaaaagatatttcaaacttatctaatgaagaaattaaaaaaatagctttaagtgaagtacttaaagaaacagctaacaaagaaaacgcacaaccaagagcaacattccgttcagtaagcagcaatgctagaacaacaaatgttaactattcagcaacagcattaagagcagctgcacaagacacagttactaaaaaaggaactggtaactttactgcgcatggagatataatccataaaacttataaagaagaattccctaatgtaagctaa

SEQ ID NO: 420136 - DNA, 225 bp, Staphylococcus aureus
atgtatcaatcaacaggaacagtactatcaattaatggggataaattagtatcagatgcatttgctgaaggtggcaattcagggtcaccggtctttaacaataaaaatgaagttgtgggcgttttatatagtggagaccaaattggtcattctaaaaaagagtcatacagcgtatatttaacgcctgaaattaagaaattcatcgcagataacacagaaaaataa

SEQ ID NO: 420137 - DNA, 345 bp, Staphylococcus aureus; identical to SEQ ID NO: 408518

SEQ ID NO: 420138 - DNA, 183 bp, Staphylococcus aureus; identical to SEQ ID NO: 408524

SEQ ID NO: 420139 - DNA, 267 bp, Staphylococcus aureus
atgaaacaatatgatcaagcgtttcatcgtttaaccaaaggcattacagcgatgttttttattattgctttagtcatggtcacatttttagtcttaagtcccttaggcgactggttaggtgtgcaacatttttatgaatggctgaactatgtcctgaaaacaggtcattcagcatggcgttatttcatacttattttctatcttgttccttatgctttatttggaggacttatatatgccattttaagcgtgtataagcgcatttaa

SEQ ID NO: 420140 - DNA, 429 bp, Staphylococcus aureus; identical to SEQ ID NO: 420077

SEQ ID NO: 420141 - DNA, 138 bp, Staphylococcus aureus
atgtcatctgacacaaacagtttagcacatacaaaatggaattgtaagtatcatattgtctttgcacctaaatacagaagacaagtgatatatggaaaaataaaaaaagatatagggattatattgcgtcaattatga

SEQ ID NO: 420142 - DNA, 1860 bp, Staphylococcus aureus
gtgattaatataaatttcaatgattgggaaaaagtatgtaaatcattctttaatttaaatgggtcaaaactagaaagttacattcagtggtacccattttcgaagttaacagaaaatagtaagaatataatatcaagtgaaaaattttttgaaaattttattaaaaatggagctatttttaaggaatataacacttttaattttccatctcactactctcaaaagacaagtgcttcttttagaaatatgtctcttgtttctccgtttgtatatctttacatagaagcaataggttatcatatcaatcaagaatacactcgtaagtcgaaaaatgttcggtgttattattcaggtgatttaaatgaaaatcaattttcttataagaatagttatgataaattttttgcagatataaacgcactttcaagtgtatatgataatttttataaatttgatattagcaatttttttgatgctattgatatgaacttattatttaaattaataaacgaacgagaagaagtacttgatacacgtagtagtttgatttataaaagattattacaacaaatcggtggaaacaaatttcctactgtagaaaatagtgcaagtttatcttatttagcaacttatatatatttggataaggttgattatgaattagagacagtattacagaatgaacctcaaatagaaaatttccaaattattcgttatgtagatgatttgtatatattttttaactctatggaagatgaattaaatttagtatcatcaaggattaaaaatgcagtaattgatgcatatagaaaagttaaactaaatttaaatgaaaataaaacaaaactaggaaaatctaacgaagtaaatgagacattgaatgctgcattgtataatcattacgttaataaaaaagaaattgacattgcttatttctatgataaatataatataggttattttttagatgatttatataacttagcgtattctcacaaccatgaaaattttaaaaaaatattagataaatattttactaaagaaggtattacatactcttcagatgaagtacttagatatttagcatattatgaagatgagttatttcaagatgaagcaattatttgtaaaataaaacgacttattttaactgattacaattttataaattataaaatcaatatatttttaagaattatattaaagacgaataatggtgagttaatcaaatttttattaaatgagttatttaataaggaaaaatttaattcttttgatgtatcaataagtattaattacttattgttgagaaattttcaacataatgacttaatgagtaaagttaaagatgtagattcagaaattattgattacattgatagatattgtaaacaggattttttaaaagagctagataaagaatataactatattttaaacttaaatttaaagaatgcattttcagataatagttcaaaagtatggtatctttactttttatataaatttcatgacaaaaatggtgatacactagaagcatttgcttattataaaacttattttgatagaatagtttcattactaatgtgctataaaggtatttcatatactaaaagaaagttaccagattatcatagacattataaagtaaataatgtaaaaaaggattttgaagaactaaatccaaattattataaaaaacaaaacattgataattttttgagtgaattatatagattacgccaatacaatccaatcaatcattcttcggctgaaataattgaagaccaaatgttgaaagaatcccaaataattaatttaataagacaatcggaaactttactaattaatagcttttga

SEQ ID NO: 420143 - DNA, 1326 bp, Staphylococcus aureus
ttgagtaaatctaatttcaaagaaagaattcaaaaaacatatacaaagaaagatctcgagaaagctttaggtcttaaaaacaaagctcaattgcagaaaagaattgataaattagttgatatttataaggttgatatgaagaaatttcaaaaaaattctggtgaaagtgaaagagctgcttatagtttcaatgggattgcttttgatatattatgtgtcctattaaataatatgacagatgataacataccaaaagcaattacagataaagatgtaaggctgagaaaagatgcgatagaaaatattgatattacccaatatgcgaattttattaaaaatgttaagaatgacatagataaaattgaatttaaaccattaaagttacatatacatgcacaaaaagcataccaagatgtaaaaaaggtgtttgattcagggagtaaaataaacgataagttacaattagcttctgaagtaatgagtcaattacctatagataaacaagtggaattaagtgacaaaattgcacttgctatacacgaaactatttattcatcattttcagaaagcaaatataatgaacgaattaatgaacatcatcaaacgagtgaaaggtcaagtcagcatgattttcgatataattattttgtaaatcaattaacagataatgtaataactgaaggtatagatgaagagagagcatttatttatgatagagatgaacaattagattggttattagttaacatactaaataaagttcaacgagctgcggatggatggggaatgagaaatgctaaacctcatcacagaacacaaacatttagagatatggagcactatttccttagagatgtatcgaaaatgatagataaagagcttaacaaaaaggaaaacttaaataagcaatctaaaaaatatgacttcgataataagataaagatcattaatgataatattgagttttttaatgaagatgaacaaattagaaagcatttactagagttacgtaaacgattagactttcattctgcagcagtattagataagaaaaatcattcacacataggcaatgaaatgttccgatattttatggatgatatgcaacaagttgtaacattgatagaccgatacattaataagactgaacattataatgatatgaaaaatggctatattaatgaatataaatcattttataattcatataataatgaaattgaagggactaagacgcacgaaaataacatcccaatggcaatgttaatgaagcaatttaagagtcaactgttaaaaagaaggaataaccggaaaagctctaattga

SEQ ID NO: 420144 - DNA, 369 bp, Staphylococcus aureus
atgaataatgatagaggtcaaagtttacaaattccaaaatgcaccccactaacagaaggctatatatacgttgcttcattatattctgtaacccaaacagatttcaatggtgatgttaaacaccagtttacgtatgaaataaagatagatcagaaagttatttatgtgaatcgtagtatttcgaaagatgctaccgataagcagttatcaattactgattggcttaaacgtcatagtaattatagttccactcatgagaattatgacccttacattgatagaaagcatttaatctatgtgggtcaatataacggaaactattatgttcaagatgtagcaccattagatggatttggaggggtattgtaa

SEQ ID NO: 420145 - DNA, 669 bp, Staphylococcus aureus
atggaagaaacaattgatttaagtaaactatttgcaatattaaagaaaaacatgaggtatttaataattttaccgatattttttcttgttttaagtatggtgatgacattcttatttatgacacctaaatattcttcttcaacacaagtacttgttaaccaaaaagaaacagacagccaaatgatggctcaacaagtgcaatcagacttacaactagtcaatacatactcagaaattattaagagtccaagaatcttagacaaagtatctaaaaatttaaaaggtaagtattctagtgaagaaattgcaggcatgcttacagttagcaatcaagcagaatcccaaattttaaacatagctgttgaaaatgaaagtcgtgaagcagcaggtaaagttgctaatgaaatagcaaacgtctttagtaaagatgttaataaaattatgaacatagataatgtttctattctttctaaagcagataataatgggaataaagtttcacctaaaccgcttatcaatgcagtgttcggtgtttttttaggcttaattgtcgcacttattataatattcttgaaagaaatcttagataagagaataaaaacagaagaagatgtagaagaattattggatttaccagtattaggcactatacaagactttagtaaataa

SEQ ID NO: 420146 - DNA, 690 bp, Staphylococcus aureus
atggctaaaaatgaaaatgtaaaaccacttattacagtagataaacctaaatcagtaattagtgaaaaattcagaggtattcgtacgaacatcttattctcaacagcagataacgatgttcaaactgtcgtatttacttctgaaaaaccatcagctggcaaatcaagcatttctgctaacgttgcaatcacatatgcacaagctggatataagacattgttgatagatggtgatatgagaaaaccgacacaacattatatgtttaatacgacgaatattgacggtttatcaaatttaatcgttaataagacggactattctaaagcaattcacaagacagatattgcaggtttagatttacttacagcgggtccaattccgccaaatccttcagaattaattggttcagaaaacttattagaaatatttcaatatgtaaaaaaagaatatgattttattattattgatacgcccccagtaaataccgtaacagatgcacagttgttctctgaaattgctaaatatgttgtctttatagtagatgtacaaaagaatgatcgaaacgcagtgaaaaaaggtaaagaactcattgaaaaagctggtgcgaaaattttaggagttgtgttaaacaaagcgcctgaagataaatcatctagttactattattactacgggaaagatgaaaaatga

SEQ ID NO: 420147 - DNA, 765 bp, Staphylococcus aureus
atgatcgacatccataatcatgttttagtaggagttgatgatgggccacaatctttagatgaagccattgctctattaaagcaagcaagaaagcaagggattaaaggtattgttgtaacaccacatcatttacatcctagatatgataatacttttgaaacagtgttaaaagggatcgatgaactaaacaacatcgaagagattgcacaattaaatttacagctttatccaggtcaagaaatacgtataacagataaaattttcgaagaaatcgagcaacaaagaatttacgggattaataaatcaagatacttacttattgaactaccttcaaatgaagtaccacactacactaagaaacttctatatgaaattcaaactaaaggctttatacctattattgcgcatccagaacgcaataaagctattgctcaaaatataaatttactatatgaactgatcaatcacggagcacttagtcaacttacatcatcatctttaacaggtgaacttggtaaaaatatacaaaaattatctatacaaatgttagaacacaatttagtacattttgttgcttcagatgcacaccattcagaaagtagaccatttagtttggatgttttgtttagcacgcctaaattaaaaaatattgaatctgatataagcgtgttactagataataatgaggcaatgattcaagacaaaaatatagttacgggaaggcccattgaatttaagaagaataaattttttggtctattttaa

SEQ ID NO: 420148 - DNA, 1818 bp, Staphylococcus aureus
ttgaaatatatatcaactaagcagaaacttttaatgttgttgttcatagactcgctaattgtaactttttcagtgtttttaggatattacatcttagaacctttttttaagggctactcaattaatgtattgattttatcatcactcatcttgctgatatcgcatcatgtattcgctcaaatatttgatttgtatcatagagcttgggaatatgcgagtgttagcgaattaatattaatcgttaaagcggttacgggatccatcgtcgttacgggaataattgtttcaatatttacacagcaagcaccatttttacgattgtattttataacttggatgatgcacttattgttaatcggtggatcaaggttgtcgtggagaatatttagaaagacatttattagtaaagaaggcgaaaagaaaccaatacttatcgtaggtggtggtagaggtggttcattacttattcgtcagatgatgaatacaccatatatgggaatggaacccgtacttgtagtggatgatgatcctaataagcaaaaaatgtctatcgcatctggcgttaaaattcaaggttacattgcagatataccagacttagtaaaaaaatttaatattaaaaaaatcattattgcgattccgacactttcacaacagagattaagagaaattaataaattgtgtgaaggcgcaaatgtagaagtatttaaaatgcctaacatagaaaatgttatgtcaggtgaaattgaagttaatcaattgaaaaaagtagaagtcgaagatttactaggaagagatccagtagagctagatatggcatccatttcaaaagaattaacacacaaaacgatacttgtaacaggagcaggtggatcaatcggttctgaaatatgtagacaagtatgtaagttcacaccggataggatcatactacttggtcatggagagaatagtatatatcacattcatcaagaacttattggactatataaagaagaaatagaagtaatacccattattgcagacgttcaagataaagagcgtatgaaagaagtgatgcaagcttataaaccatacgttgtttatcatgcagcagcacataaacacgtaccattaatggagtacaatccacaagaagcaattaagaataatgttttaggaacaagaaatacggcagaagcagctaaattagcagaagtaagtaaatttgtaatggtatcaacagataaagccgtaaacccaccaaacgtcatgggtgcttctaaacgagtagcagaaatggtcatacaaagtatgaacaatgaaacaagtaagacagacttcgtagcagtacgattcggaaatgtgcttggttcaagaggatcagtaataccattatttaaaaagcaaatagaagcgggcggtccagtaaccgtgactcacccagatatgacaaggtactttatgacgataccagaagcatcaagactggtcttacaagcaggagcattagcaacaggtggggaagtatttgtattagatatgagtaaacctgtaaaaatagtagacttagccaaaaatcttatcagattaagtggttataaagaagaagatatcgggatagagttcagtggaattagacctggtgaaaaattgtttgaagaactattaaataaggatgaaatacatccggaacaagtgtacgagaagatttatagagggaaagtaaggaatgatgacgaaaatttacaactttttgtagatgaagtaacaaatatcaaagatagttcaacgataaagacgaaaattttaagatacgtaaatgaaggcttattatga

SEQ ID NO: 420149 - DNA, 1224 bp, Staphylococcus aureus
atgaataaggtcataaaaaatttgtcgtatgtatttttagctaatatatctaatgcaatatcaaaatttttgtttattatattgatatcaaaatttttgacgaatgttgaattaggtcaatatactttggccttagcagtaactgctccaattactttattatttaatatgaagttacgttcttatattatttctgaagataaagtaaattatattcacttaaaaaaaataaggaatataactaattttatagcaatgataattgttattatagtaagtttaacattttataaagaattctttttagtttttatattagtagccgtaataaaagttttagaaatgaatagtgaattttaccaagggtttccaaacaaagaaaaattatttcaaacaccagccaaattaatggttctacgtacagtatcgatcaccttaatatttggagtatatatttatgaaactaagagtttaattttagcattaatagctcagtgcatattacaattcattattttactttttgaaaaaaaaataaatatgggattagtaagccacaagaaatataaagaacagaaaaatgtcaaagctatacttttaacaatcattccattggggatagtacaatttttaatgagtttttcttcatcaattcctaaatatatattaaataattttgctgatatagcaataataggtattttttctgggattatatatttgataactatagttaacctatttatgtctacattgaatcagactttactaccttatataaaaagtaaatataaaagaaataaaaaagaatttaataaaactataaatgtttattgtaatgctctatttttaattattagcgtattattagtgatttgctcacatgtatttggggagtatttactaagagtaatttttaacgaagggtttgtaaaatataaatttttattagtaattagctcattcataatcttttttaatatgtcaggttggatgtatgattctggattactaattgtaaaaaagataaaatatcaacctttatttctagtaatatccatgattataacatttgttttaggattatttttaattgaaaaatatatgttatttggtgcagggtatacgttattaatattcaactttttaaatactggatttaaggcattatattttaatttaaataactttaaaagtagtagaaaagaaggtggaatttattaa

SEQ ID NO: 420150 - DNA, 1383 bp, Staphylococcus aureus
gtggaatttattaagatattatatggttcgacaatctttatctcgttatttgtcacaatatatgttattcaaaatgtaaatcatacaggttataaatatctttttatcttacctctattttacgcattaattatgactattagagtgatatacactcctagaggatttgttataaaaataattgatttgatttattttataagatttatattgttaagtttcatggttgtatattcaggatggtatgaaggtaggtcctcattccctcctttaaattcatcatatgataaagcaattttctatatgttgtttgaatacttatttattaatgttttttactaccttttttttaaaaaatatgatgtagatacattacgaactaatttagatttaaaagttcttaatcattctaaagatactatttataagttatttattgttataaatattctttttctatttatagtatttgataatgtgagttttttaggaataggtcataaagacacaacagacaatcaaagtcagctggttacgttattaacaataagcatatatatttcaaaatatcttgtgatgggatatataatacgatatttttatatgaaatataaatctaaaaataataaagtttatttgttttataccgtattttggatattgattattagttcaatttttgttggcaataatagaatggatgcaatattacccattttatccacatttacacttttgaattatttatacaaaaataaaatgagaatttacaatttaataatttccttttttatgtttatatcgatttatataatatctatattacgaaacacatttgattacaaaattactgaaagtataagcgggttgataacagataatattcaagtatacatagctggtgtctataatgtggcattaagtttagaagtgcattcaataagtgaaaaaaacgagtttttaacattcttttatgatttaattcggccgtttttgggtttaaacttactttggagatctgagacaataaaaactagttcagaattatttaattttaaaatttttggtgtaagtaatcatgtaactcaaataataccacttataggtcaatttaatcatgcatttggatggttaggtattccaatttcagtagcagtaattactattcttttaattgtattcctcagaatattaagaggaatatatattattgaagcaatgttgattttacctttaataataaggctttgcataacattttcacaaaatataagtatttttattaatgaattatcttcaattataattatatttagtattttgaagttagtatcaatatttttagcaaaaatgtctaaaagaagaaatggagatttaatatga

SEQ ID NO: 420151 - DNA, 1017 bp, Staphylococcus aureus
atgaaaattctaatcacaggaacagcaggatttataggttcacatttatcaaaaaaattaatatcacaaggttatgaagttgtaggtattgacaatattaatgattattatgatgtgacaattaaaaaggatcgattgaaatcaatcggcactgagaatttcacattttacaaaataaatcttgaagatgacgcatcaatgaatgaaatattcaaaaatgaaaaaccgcatgtagttgttaacttagctgctcaagctggtgttcgttatagtttggagaacccaagagcatacattgattcaaatatagtaggattcacaaatatattagagtgttcaagacatcataaagtagaacatttaatttatgcttcatccagttcagtttacggtgctaacacttctaaaccgttttcaacttctgataatattgatcatcctttaagtttatatgcagctactaagaaatcaaatgaacttatggctcacacttacagtcatttatataacttacctactacaggattaagattctttactgtatatggtccgtggggaagaccggatatggcattatttaagtttactaaagcaattgttaatgatgaagcaattgatgtttataatcacgggaaaatgatgagagatttcacgtatgttgacgatatagttgaagctataagtaggttagttcaaaaaccagctcaaccaaatcctgaatggactggagacaatccagatccaagttcatcttatgcaccatataaaatttataatattggtaataatagccctgttagacttatggaatttgttgaagcaattgaaaacaaattaggaaaagtggctaaaaaggattatatggacttacaaccaggggatgttccagaaacatatgcaaatgtagatgacttatataataatattgattttaaaccagaaactacaattcaagatggagttaataagtttgttgattggtacttagattattataaagagattgaaaagcaatga

SEQ ID NO: 420152 - DNA, 1137 bp, Staphylococcus aureus
atgaaattagtatttattcatgatcacaagtttataaaaattaatgactcttattattccactggaaaattttctgaaaagacgcttaataattataaaatacctcctattaaaaaaatagaatttatatctcgtatacaaaaaaataattattcagaaaaaaatttagttaaagcttcatcaaatcatattgaaattcgacccataacttttttgaagaagaaagtggactttttattaaaaagaaaacaaatagaaacttttattgatgaacatataactggtaatgaaatagttattatacgattacctagtgaaattggatatatagcgatgcatcattttaaaaagaggaatatagattttggaatagaattagttggagacccatgggaagctctttggtatcatggatcaattctagggaaatttatggcagtaataaataaatataaaacaaaacattatatatataatgctaaaaacgtaatgtatgtcacacaaaagtatttacaagaaaaatatccaactaacttcaagtcttacacggcctctaatgtttttataaataatataaatagtgattataaagtgaaaactaaccaaatatataaaataggtttaataggtagcttagatacggagtataaaggcatagatacagcattaaaaagtttatcactaatagatgaaaattttatctttgaaattgttgggaatgggccgcaagagaaatggttagaaaaaataaagaaatacaatttagaggaaaaagttgtactaaaaggtgctgttcaaggtggtgaccctataaatgagtggttgaaagaattagatttatatatacaaccaagttatacagaaggcttacctagggcacttatagaagcaatgtctaatggtataccatgcctaggttctaatgcaggaggaatacccgaacttttagattctaaatttattcacaaagttaaagattataaaacattttcttatcaattagaagaagttttacataatacaagactcagaaaagaaatgtcagaaattaatttaaaaagagcagaaaattatttgagtggaaatattcaacgtcaaagggaagcgtttattaaatctatatatgaggagaaataa

SEQ ID NO: 420153 - DNA, 1275 bp, Staphylococcus aureus
atgaatagaaaaattgctgttgttggattgggttatgtagggttacctgtagctgttgctttcgggaagcaacaaaaagttgtggggtttgatattaataaaacaagaattaatgaattgaaaaatggttatgatcgcacgaatgaagtgaatgatgaggatttaaagaaaagtaatattaagtttactaatgaacctgaagaattaagtaaagctgattttattattgtagcagtgcccacgccgattaataaaaataatcaacctgatttaacactattgattaaagctagtgaaacagttggtaaagctttaacacaagatactatagtagtttatgaatctactgtatatcctggtgctacagaagaagattgtgtcccagtacttgaaaaattctctggcctaactaatggttcagatttctttgtcggatattctcctgagcgaattaatcctggtgataaagtacatacatttgaaactattacaaaagtagtttctggtcaaacacctgaggtcctagaagttgttgcagaagtttatagcatggtagtaaaagcaggtgtgcataaagcatcatctataaaggtagcagaagcggctaaggttatagaaaatacgcagcgtgatgtcaacattgctctaatgaacgagattgctattatttttgataaagttggaattgatacttcagaagtgttagatgcatcaggaacaaagtggaacttcttaaacttcaaacctggattagtaggtggacattgtatcggtgtggatccatattacttaacacataaagcacaagaattaggacatcatcctgaagtaatattagctggtagacgtatcaacgacaatatgtctaagtatttagcttctaatattatcaaagaattattaaaaaaaggtatagaagtacaaggcatgacaattaacttattgggactaacatttaaagagaattgtcctgatttaagaaatactaaagttattgatattgttcgagaactagaagactatggtatgaatgttatcgttaatgatgtagaagcagataaagaaactgccaaaaaattatatggtattgaattaaaagataaaaatgaaatgacaaaaacagattcattaattttcgcagttcctcacaatgattatattgaagataaaaatagctatttagaattattgaatgataatgggctagttattgatatcaaagggctaattaagaataatgatttaaaatacaatcagactgtatggagattataa

SEQ ID NO: 420154 - DNA, 249 bp, Staphylococcus aureus
atgaaagatgctagaagaggagtaggctacaaagctgaaatcgaattatatacaacactgttttcgaaaagtagaaacttttcaaaggacaagaaattagatgatgctatagatttatccgaaagcgtgaaaaagttaaaccttaatttagaaaacacgaaaatatttttacaactaacgaaatctaccattaatactaaacgagtaaattatagtgataacaaacctattaagattgaggttgagtga

SEQ ID NO: 420155 - DNA, 588 bp, Staphylococcus aureus
atgaagaatgaagaaacaagagctggcagtggtgtagaaattagaagtgatgacgaaaaaggcatgttcattgaaggatacgcattaaaatttgatacatggtcagaaaacttaggtggtttcaaagaaacgattactaaaagagctttggagaataccgatttatcagacgtccgttgtttagtagatcacttaccatcacaaattatcggacgaacaacagcaggtacgttgaagttagatatagatgacgtcgggttaaggtaccgttgtcaattacctaacacaacgtttgcaagagatttatacgaaaatatgaagcttggaaatataaatcagtgttctttcggttttatgcttaatgaaaatggtgatgaaatacgttttgacgaaaacgatggtgtgtataaaagaacgcttacgtctattagtaagttgacagatgtatcagttgtcacttatccagcttacaaggacactgatgttaaaccagcgctacgtagtattgaaaatattgaaaatgagcaacgaaaaaaagtgttggaaataaaattaagaaaacatgagattgctaataaaatttggtga

SEQ ID NO: 420156 - DNA, 333 bp, Staphylococcus aureus
atgcaattaacagctaatgaactcaagttattaaaaaggcattgcaaaatagatcacaattcagaggatgagttattagaaacgtattactcttgggcattctatgaaatagctagtgctgttacggatgagcctagtaaacatgttgattggtttaaagaacatcctctatttactcgtgctatctatccattagcaagttactattttgaaaaccgtattgcttatatggatagagatttatcacttgcaccacatatagttttaagtacggtgcataaattgagaggttcatttgagcaatatttggagagtgaagaagatgaggtttaa

SEQ ID NO: 420157 - DNA, 1356 bp, Staphylococcus aureus
atgtcagctgcaggtagtattgttttccaaaatttaccagtcatctttgcagttggtgtcgcaatcggattatctagaagcgataaaggtactgcaggtttagctgcactgctcggtttcttaattatgaacgcaactatgaatggcttattaactatcacgggcacattagcaaaagatcagcttgcacaaaatggacaaggcatggtgctcggtatacaaacggttgaaaccggtgtttttggcgggattatcacaggtattatgaccgcaatacttcacaacaaatatcacaaagtggtattaccaccgtatttaggtttctttggtggctctagatttgtccctattgtcacagcatttgccgcaatctttttaggtgtattgatgtttttcatttggccaagcatacaagccggcatttatcatgttggtggatttgtaacgaaaacaggtgccatcggtacttttgtttatggcttcatcttaagattgttaggtccactcggtttacatcatattttttacttaccgttttggcagacggcacttggtggtactttagaagtcaaagggcacttagttcaaggtacgcagaacatcttctttgctcaacttggtgatccagatgtgacgaagtattattcaggtgtgtcacgctttatgtcaggccgttttattacgatgatgttcggcttatgtggtgccgcacttgcaatttatcacacggctaaacctgaacataaaaaagttgtcggcggtttaatgttatccgctgcactcacttcatttttaacaggtattaccgaacctttagagtttagtttcttgtttgtcgcacctattctttatgtaatccatgccttctttgatggattagcatttatgatggcagacattttcaacattacaattggtcaaaccttcagtggaggctttatcgatttcttactctttggtgtgctacaaggtaatagtaaaacaaactacctatacgtcatacctattggaattgtgtggttctgtttgtattacatcgttttcagattcttaattacgaaatttaatttcaaaacacctggtcgtgaagataaagttgcagcacaacaagttgaggctactgaaagagcacaaactattgttgctggtttgggaggcgaagataacattgaaatcgttgactgttgtgcaacgagactacgcgtcacacttcatcaaaatgacaaagtcgataaagtattactcgaaagtactggtgccaaaggtgtaatccagcaaggcactggtgtgcaagtaatttatgggcctcacgttacagttatcaaaaatgaaattgaagaatttctcggggattaa

SEQ ID NO: 420158 - DNA, 990 bp, Staphylococcus aureus
atgaaaagaaaaagtcctaaaactactgatggtttaatgaggcatataagagacaataaaggaattaaaataagtggtagtaaacaaaaaagagaattgcgaaatataggttattttcatggttacaaaggttatagcttttttcagaataagaagaatgaattaaactttaacaattttagtgaagttaatgcattatatgaatttgattcagatatcaaaaccctattttataaacatataatgtttgctgagactgctataaagaatagacttttggaaattattcatagagaatctggtatagaattagaaaacatttttgatagcattctaacagattataaaaaatataagactggatcaagtgactatgccaaaaaattccaacatacaatgatattaaaaagcgacatctatgaaaaaattcattcgaactttaaagagaaaccctttataaatcacttcgtatatagcgatagacctgtgccattatacgcagtttttgagctttatactctaggaaacctagtattttttataagatgtatgaattcaacctttaaaatcaaaatcgctaaagatcttggattatatttagactcatttaaaaagaaagaggatatcgttgcccgcttaatagattgtcttaagggtctcagaaatgcaatagcacacaacggagtactgtacgactgtagattcaaggatagcaatgtaggaaaacaattaactgaatatttcaatataaaaatgcatgtcaaaaacttggaatttgatagaatagttgattatttagcagtaataatcttaataagctcttcattaggttacaataaaacagaattaagaaaaatagttaaaacttttgaagatagacttaatgaattgagacaaaaccttaatgtaagtacttatgataaagtaattggaactgatgtacgtaataaattacgacaaataaaccaatacataaacaattttacttga

SEQ ID NO: 420159 - DNA, 255 bp, Staphylococcus aureus
ttgaaattatctttagacataaatatggattttgaagttaatactcttacagatttaccaaaattaaaaattgttatggagaacttaaacatgaaaataaacaaaagtgaaatagcaagacacatgggtgttgatagaagaacagttgataaatatttaaatggctttgagccaaccaaaaagagaaatcgtcagtctattattgacaagtattaccctatcatcgaaaaattactttcagactctagtgaataa

SEQ ID NO: 420160 - DNA, 165 bp, Staphylococcus aureus
atgaagaagaatttcaagttacgcatttcaacgctactattgatagttattttagttgtttttgctatattactcatcgtgaatgaaactaaattgtttaaaaatgatgtgaattactcttttgatgaggctgtttcaatgcaacaagggaaaggtattgtatag

SEQ ID NO: 420161 - DNA, 1377 bp, Staphylococcus aureus
gtgactaaaaatgagtataaaatcgatcccggaaaaataactagtaatacagaagcaactagcgcaatagctaatattagttatgaaattgaaaatgcaaatgataatggtttagaaaaagaaaaaattaatgggcagattaatagtttgaaaaatgatggggattttcctaaaaacttagactacatagatagttacacagatcccagtacggggaccacggcaacggcatttttaaataaagatacaggtaaagttactgtaggaatggctgggacaaacattcacggcgatcaaattaaaaaagtagcttccagtttggtggcgccatcatcaattcgaccctctaatcaagatttgaaagatgtactaggcactatggaggatggtgctgcggatcttgctattggagttggattggtcaattataaaggaaaacattttgcaaatacacagcagtttattgagaatttacaaaaaaagtacgaaattgataccgttactggtcattctttaggagggagagatgctatctttcttgggcttcgttataacatcaaaaatgttgtggcatacaatcctgctccgttagaagtaaaaagcattcgtaataaacttggtggtcaattgtttagaaatacgacatttccagatgaaaaatatttaaaagagttaatggataattatgatggagatattactaaggttataactcaaaaggatggattagactatttagtgaagcatacagatcatttaacttgtggtgatgtgttacgtataaacaatggtcagggccatgcgatggagaattttttaggagaaaaagaacaacgtgaaataatcgaagaactaatgttagtaaaaggatatcgcgatgcaaatgacaaagcatttaaggctttgaaaaaaaatactgagaaaaaactcggtaaaatagatgaaatcaaatcgaagttactgcaaacgaacggtggtgccctctcgtcttctcaacaaaaattgcttgaaactttggtggcattttcggtagctgaaggactaagtaaaatggttgaccaagaacttcagcagttgaaaaatatgttcaatcttatggatgagaaatttgaagcaaattggaaagacgcacaagaagctagtgatattgtaggtaaacatctttcatacccagaaaaggtaagtgcattagataacggtggtgtcaatgaaagtaaacttgcgaccgaaccacataatgaaataaaagaaaaactaaataaaattacggacttatctaagaaatataattcgtatttacagcaaatcgaaaaaagtattaatgaaatagttgctaaggatcaacaattggcagggcaaataggtgatttaatatga

SEQ ID NO: 420162 - DNA, 177 bp, Staphylococcus aureus
atgaattatttaatgtacctgttttgcatgtttatatggggattaaactttatagcggtaaagatacaaggagatagtttgcctttagaagttgctttattgtatagatctttaattgctttttcgctattcggtgtaatgttcatatttatttttaaaaaaactgaaattaaataa

SEQ ID NO: 420163 - DNA, 438 bp, Staphylococcus aureus
gtggaaaggaaactttttgtgagagatattgaagctataaaaatattaatagagacttcaagttataaaaaaccttatttaagctgtgaagagcaattaatcttactagaatatcgtggagtaaagatagaaaataaaaaatttgcattagagcaattagaaacaatatcgtattactcgctgataaatgcttattcatctctatttataaatgaagatggggaatatgaaaaagatactacatttaacgatttttatatgtgttataaatacgatactcgtttaaaatatatactttttaaatacattatgttaattgagcaatctttaaaaacaaatttatctgctattgtagctaaaaattacggagttcaagaacccacacataaaagaacctttacaaataaaaaaataaagaaattaaaggatatgatataa

SEQ ID NO: 420164 - DNA, 405 bp, Staphylococcus aureus
atgagtataaagattagtggtgataagtctttagataaagaattagaaaagcgctttggcgtgaaagaaatggtgaagattcaagatagagcgttgattgctggagctaaaattattgttgaagaggtgaaaaagcaactcaagccgtcgaaaaaaacaggcgcattgataaatgaagttactttcactgaccccgaatggataaaaggtaaacgtacaatcacgattcattggcgtggacctaaagagcgttacagattggtacacttaattgaaaatggacatgttcaaaaaggaacaggtaaatttatcaaacctaaagctatgggcggtgttaatagagcaataagacaagggcaaaataagtattttgagacgctaaaaagggagttgaaaaaattgtga

SEQ ID NO: 420165 - DNA, 411 bp, Staphylococcus aureus
atgactttaaaaaaccagtgtagcccccttactaataggggggtagagcgtacaaataaaggtgccgtggaggcagttgttgactgggttcaggtcactttccatatagcccctatttcagcagtaattgaggacgttatcggtttgcctataacgttgttcaaaaaacgaaatagtggcatttacttttataatcgtggttatgaattttcaaacattaaattgtattactcaagtgatgatgaatcaatgggcattcacttacagttaactggtacaggttgtagagagtttgaacatcatttacagcagttgaataaaacttggcaagattttttgacaaatgtttatcagttaatgcaaattttacaagaattgatattgcaattgatgattataaaacatatttaa

SEQ ID NO: 420166 - DNA, 453 bp, Staphylococcus aureus
atggagctatctattttttacaatgggcaattttttgtagcattagtagaatatagaatgagaaataaatctaaatttatccaatacacatttgggaatgaacctgatgatatagaagtattagattttattcatcatcaattaatggaaatgattgatgatgtgcaaactattgtttatacaaaaaataattctagaaaagtaaatccgaaaaagctacaaagacaaattgctaaggagcaaaagaaacctaaatactctacccaagcacaaattgctaaggagcaaaagaaacctaaatactctacccaagcacaaatagctattaagaaagaattagaattaaagaaaaagcaaaagcggaagaactataaagaaaaacgtgatgcatttcaaaaaagaaaaagagaaattaaaaaggttagagcaaaagagaagcataagggacattag

SEQ ID NO: 420167 - DNA, 744 bp, Staphylococcus aureus
atgaaaaacaaattactttttaaaatttttttgagtttatctttagcattaagcgtttattcaattaatgataaaatcatagaagtatctaatacttctttagcagccgatgttaaaaatttcactgatttagatgaggcaactaaatgggggaataaacttataaaacaagctaagtatagttcggatgataaaatagctctatacgaatatacaaaagatagttctaagataaatggtccattaagactcgcaggtggagatattaataagctagattcaacaactcaagacaaagtaagaagattagatttatctatttctaaatctactactcctgaatctgtatacgtttatagacttttaaatttagattatttgacaagtatcgttggatttacaaatgaagatttatataaattacaacagaccaataatggccagtatgatgaaaatctagttagaaagcttaataatgttatgaatagcagaatatatagagaagacggatactctagtacacaattagttagtggagcagctgtaggtggtagacctattgaattaaggttagaattaccaaaagggactaaagctgcatatcttaattctaaagatttaactgcttactacggtcaacaagaagttttattacctagaggcacagaatacgctgttagaagtgtagaattgtcaaatgataaaaagaaaatcataataacagctattgtttttaaaaaatag

SEQ ID NO: 420168 - DNA, 786 bp, Staphylococcus aureus
atgataagtcagaaatcattaaaaaaaagagatagttttaacgcaccacctactgacccagagctttactcgcatgtcattaataatacaaaaagcctttataattctgttggtacagtattcgttaaaggggaaactttagctactggagtcttaattggtaaaaatacaatgattacaaactaccatatatcacgacaagctaaaaaggatccatctaaaattatatttacaccaggccaaaacagagatgtagaaaaggttgaattccctaagccttatggttcatttgaagctgaagaaattaatgaatatccttatggacaaggaactgatttgtccataattaaattgaaacctaatgataaaggacaatcagcaggagatttagtcccacccgctgtaattccagattctatagatgtacaaaaaggcgataagcttactttattaggatatccttataattattcaacttcctctttataccaaagtcaaattgaaatatttagtactacaaatgcccattattttggatataccgaggtaggaaattctggtttaggtatatttgatttacaaggaaaattagtaggtatacaccaaggtaaaggcggagaatatggtcttccatcaggtatattatttaacaaacctatattagcaagaacaatcaattttttaaacttcataatatcactcctcattcatattttttatctacaaaaacagaataaatattttcttttaatgataaaatatcatataattaaattatataaataa

SEQ ID NO: 420169 - DNA, 339 bp, Staphylococcus aureus
atggttttagggggaactttattaacttcaaattttaatgtatatgcggaagaagctataaatacttctgtttctaaaagcttagatttggatcaaagtgataaattagaccacggcatattacatccagacagaacagtaacaaactctaatgtatccccgaatcacgatatattagaagtggagaaatctatggggtttcaagatacgactaatagtaatgaacaaagtgctatatcgcacgatcataatttacctgagacaggtgaacaatcatctaacttatcgataataactttattagcttctttaacattggctatagggattaacatttag

SEQ ID NO: 420170 - DNA, 723 bp, Staphylococcus aureus
atgagaacttttatagaaaatgaatttataaaagtgagaagcgaaagatttacattagtagttttattattgagtttaataccctttattatgaacttaacaaactatttattgaatgacaaaaacatttctcttgattccggtttttatttcagattctataatcaatactttatgttaatccctattgttataggtatcataggatgttctattttctatatagagttcaaaaaccataccatcttaaattggttgtcttattcaaaaagtaattataaattatatttttccaaaatttttgtatcagttgcttattgtagtattatttatgccgtaaatttatctctaattactgtgttttattttatattcgatactaatattaaaaacttgtatttaatattagtaagtttttcgttgttacatttctttttgatattattcatgctaccactagctataaccattgtaatattattccgtaataacataatctctatcgtagtaagtattggaatatctatgttttctatgatattaatagcggcaccctttgcttatttgatccccactacattaagttatagactagcgataagtgtcgtagattcttcgatgggcattgatactgtaagtcaaactataataggtatttctttaatactaataagttcttctatcctaacaattataggatctaaaaaacttaaagtagattaa

SEQ ID NO: 420171 - DNA, 819 bp, Staphylococcus aureus
atgttaacttttaaagatgtgttcgtatcattaaatgataatagaattcttgaaggtgttaattataaatttaaaaaaaatactatttatggattactaggacctaatggagcagggaaaactacgttttttaaatctattcttggagtaattaaatattcagggagtattgaaataacatcatcaaatattggacatttaattgagtatccagctttttatgcaaatttaacttgtgaagaaaacctaaatatgcatgcaaaatacattggtcatattaatctagatgttgatcaattgttgttaaaagtagacctactagaagtaaaaaacaaaaaattcaaaaatttgtcaatgggtatgaaacaaaggctaggaatagctagatcgttgattgggaattcagatttaatcttgttagatgagccttctaacggattagatccttttggaataaaagatattcgaaacattatcttgaatgatgtaaagaaaaaaaataggattactattgtatctagtcacattttacatgaaatatctgaatttactgatatatttatttttattaaagatggtcgcattatctcacatttaaaaaatactggctgttattctatgattaaaactaaggatttacattcaattaatattaaacaaaaagatgaattttctgttataaaaggtaacggttattattatataatcggagattatgataatttggtgctacatgataaaaatattaataaaatgactattgaagatatatatatatatatcatgaaattaaatatagaggaggtttttctaaaatga

SEQ ID NO: 420172 - DNA, 2937 bp, Staphylococcus aureus
ttgttaactacagatgatatactaagcaatataatagatgaggtaaattctgaacatttagataaagttgcaaatgaagtttttttaacttctactgataagataaaacgacaaattaattctgaacttaactcatatagtttaaatgaaaagataagtaaatatgattttaactttcaaattcacaatcttgaggatttaatgcttttttttattcaagccaacaacatagattatatggatttattacatagcataagcaaaacaaataataacgaagatataaataacagtattaaaactcaattttctcaacatctaatgaaactagcatatagaactataatatttgatttaaatcgtcatagaataaacaaaacatttaaaacagataccgagacgtcgcaatttaatgaatatatattaatgttgaatgataaaaaatacagaaaaaaatttattgaaaaatataaaaatttagttgaattaatagaattgaatataaaacaagtaaataattatataataaggtttttggaatgtttaatagttgacttacctgatcttaaacaactaataaaacatagtagcactttagtatctatacagctaagtttaggagatacacataataatggcgagtttgttgtaaaatgcaactttgaagattcctcgatttactataagccgagaaatggtaatatagataaattgtattctgttattataaaacatataaacaaatcaatgaataagaaacttaaatatccaaaaaatttaatgaaaaatgattatttttggtctagtgaagttgctaatgaagagtgtgaaagaatttcagatgtacacaatttttatcgtgaactaggtgttcacttgtgcttgttatatatattaggtgcaactgactttcattcagataatttaatcgcttctcaaagccatccagtcttagtggatttggaaagtgttttggggaataaattaacaaataaaatgtttgaagatgcaactgcatttaatagatataaattatcgtcttcggtgaaaagtactggtattttaccttttgtttttggcagccttgaaggaagtgattttagtggcgttggcggaaaagagaggacttcttctttcaaagttcctgccattaaaaatggggcaacatctcatatgaaagttcaatcagaacatataactttaccagaagctaaaaatcatccaaaatacgaaggtgagtttatagatgaaaagaaatataaaaatgatttaatactaggctttaaagaaacatatgattttatactaaaaaacaaagagaaatttagcaacttcctgaatacccatatgaaaaatatcaatgtcagatatattaacaatgccactatgcattatgggaggattttaaacttaagctatcatccaatgatattacaaagtctaaccttaaggaagttatttatttcttattatctttacaacgattatgacaagttgtctttaaacgaaattgatgatgtaataaatatgaatattccgtatttttattttaatttagatacaaaacatttatatcatttgaacgaatgtcataaaaattatttcgactataaacttaaagacagtatattatttaagcttaattcgttatccgctgaagacaaattatggcaaactgaattagttctggattctttaaaagaggatgatatggaattcgtcccccatatgtctcagcattccataaaagactacaggtttcctttagaacgagataaatcagataaatcaattaaatttgacacactgattaaagatattgaagatattgtggaatcagaacaaatagatcttaataatagctatagttggatgactaaagaactttatggaaaaaaaggatcccgaagagttgaaagagaagtaatggatgttaatttatatcgcgggctaagtggaatggctttgtattatttgagtttatacatctacacaaataacaatttatttttaataaaatctcaaaaaatcattactcaaataaaaacagaaatagagcaacatgatgactttcctcttggtgcttttgatggcatatattcttacgtttatgtatgtgcaataatgtataaaaatactaaagatgtttattatattgaagaatccataaaatatattaataaatctaagaatagattaaaaatagatcgatacaatgattttataagtgggaatgcgggagctttaactatcttaataaacatatataacttgttggaaaaatcaatacataaaaaagatgttcttgatgctattgaaataagcgttaacagattgataatgaactctaccaaaaacgataatggattaatcacttggaaaaccggagaaagtgatgtagatttaggttttgctcacggaaattctggtattgcttacgcactacacttatatactgaaaaaattaatcgcgattacaatataaagcaaacagttctattagcaaatcgatttgaagatatgcacagagtaaaaaattattggccacatccgtatagtaaagaatctaaacctccatttgcttggtgtcatggttctcccggaataatgttaaatagagaaaatagtaaatattttactaaaaataaaagcgatataataaaccacattttttataaaggtttctctagaactcactgtttatgccatggtgatttaggaaacgccatgattttaaaagatattttaaatgatgataagcaaatatcaaatgtaatatttgatattttgaaagattttaaaggggacgatttgaagtgtggtgtaggaaataatatccatacagtcgatttacttacaggtatcacaggaatatcttatggattaatctatataatgaactataatattcccaacatcctcaaattggaaatatag

SEQ ID NO: 420173 - DNA, 204 bp, Staphylococcus aureus
atggacaattcgcaaatcgagacatttagatgtgcaggagatttattacaagagttacaggatggtaattttgattattatatgtctggatcttctgaaatcagaaagaaaaaaagcttctcagaaaaaacagggaatgacggtcaccattgtacaataacttgggaatgttcaatctgtcctacgcacacatgttggtgttaa

SEQ ID NO: 420174 - DNA, 165 bp, Staphylococcus aureus
atgaataaaatcacaaaagacgatttaaaacaattaactcaaggccaaacttcacctcgaactcacccaaccgtagcggcagtaagcgcagtaatttgcttaccagccacagtattagtacctacatcaaaatgcgcatcagtaacacgcccatgtaataaataa

SEQ ID NO: 420175 - DNA, 2634 bp, Staphylococcus aureus
atgaatactttaatagaacgtttatacacaaaatatagactgcaatgtataactctagccgaaaaactcacttcggaattcaaaaatgttttaacagaagaatttcataaaaatttaataactaatgaggcggagtatttcaaaagcttagttatgagatatttggttgtcgacttccaagaaaatattacaacaaaccagaaaaagatagatggtaataagaacttaaagaaatatacacataatttcaacataaatgatcacttcgatttaaaaatgaatatcgaagaaaaaatcagaaaatatagaaattacatcttagaaatcatttcattattcgataaagataaagatttaattatatttgataataatagttcaatgcgtataaataatataacattgaatctaggggattctcataataacggtaagagtgtagcgcttatacactttcaagatggtaataaaatattattcaagcctaaaaatttgattcaagataaactatatttcgattgtttaagaatattaaatgacgaattaaacataagctatgattatctccaaattactataagagatggttacagttggcagtcttatgtacaacatacaaaatgtcaaaataaacaagatatagataaatattattattctttaggtatacaaacgtttttattatatgttttaaatggtaatgatatgcattttgaaaatttgatagcaaacggttgtaacccggtttttatagatttagaaactttactacaaacctccgcaagtatgattttgaatggtacaatttacgacaataataatgttaatgataatgtattaaatacattattatttgatttttctgatcaagattctattatgaaatttttgggtggaaccactaatcgcaaaaatttacctatttacaacatatctatggtgaatgaagataatgataacatacagctagtagagagtaataagaaaattatgaagaccccacctaatattcccataaacatattaggtgactctgttgaaatatatgaaaaatctgattgttttttagatggttttattgatagctataatatagttttaagaaaccctaatataattcttaaagcattaaacaattataatgattttgatattcgtatagtcttacgacccacaaccgtttattcaaattatgtagaatatttcaaacaaatggaacaagaaaatgagagagaaatattaaacattctagaggaaagtatatatttctataagcaacataacgaaatagctcttcatgaatttaaagctctaaagaattttgatattccttactttaaagtgaatctgaattcagttaacttaaaatctattgatgagcaactagtaatttctaacttttttcaacatagtcctcgagaaagcttgaatattaaactagataaactttctaaagaagatatggtaaggcaaatagatattttaaaattagctatatcagcttataaagagaaatttgacaattctcctatcatcgaccctagaaaaagatcaaatgccagcaatatacatttagaaataaacaaaatatatggctacatagatgtcgagcaacctatttataatattcaattaaatatggatggagaaacagatttaacccccatatcttatgatatttatttcggattggcaggaacgagcctactttttttacaatataacaaaaaatataatattaatatgtatagggaaaaatccatatccttacacaacattatttataatatgtggttaattgatagctcgagtaatttttctgcttttcatggccgcttttcgtattttaaatatatcttgattttgaataagcattttaatttcaatattatttttaaagaggatttagaaaaaacattaaaagcttatgtagaatacctggaggaaaacgaaaaataccctatagactacctaggcggtttaagtggagttatatctttagttatagaactctacaattttaatagtagtctatcttttttagaacaatatattaatattctaatgagaatattactgaaacatattgatgtccaagaagaaagtgtatattgcaaaagtgatataaaagatgaaaatatgactattggattagcacatggtatgtctggaatcctactaactttagctaaatacaacagagtatttaaaagtaataatattgaaagatacattcaaaaaataattgaatatgaaaataaaattattgacgatagcttaccatacatatggtgtaacggattaacaggtctgatacttgttcgaaatattatatctgaaattttacccaaccccgagaatattaagattgacagtcttaattataaattacaaaaaaattataaattaaatataggggttgaatctgtttgtcatggtacaagtgggaatatactagtattaaaaactttaggttttaatactagtaatgaaaaaatatttcaatacgaatggtgttctggatataattttccgaacgaaagcctaagtttctttttaggcaaagtgggacaactctttaattcattaagttcggatatggataaggcaattatcacagatatattaacctag

SEQ ID NO: 420176 - DNA, 1293 bp, Staphylococcus aureus
ttgcattctccgatgccgcttagccaaaataaattaactagtaattctatctataccataatttttcatacatgctatcactataagttttctactaatattattttaaaaaataaaatgataatatctactaaaatagatgaaatattaactatacaagtaataggatgtctggatcctattatttcactattaaactcactaggcgctataatatcgccatcttcaatagggtgtaaagtattaaataaaaacagcattggaattgatgaaaacacaaaacctaaagacatacaatgggatgttttgagaactacttctaattattccacacataaaataattagtggtagtcacgatcattgtgtggctttaatagattcaggtatcgatgttaatcaccaagatttaatggataatattattaatgtaaagaattttgtacctaataagaaaatagatcaccaagaaaaaaacatatcagtagaccctctttatatgaatgattacttagaccatggaactcaagtagcaggacagatatgtgcaaatggagaaataactagcgttacaccaaatactggaataagagtgtaccgagtttttggagaagataaagcttataatatttggataatagatgctattatccatgctgctaatgatggtgtagatgttatcaatttaagtctaggtagctatcttatagatgagtattatagtattaattcaaaagaatataataacaaagctgagatagtagcttttaaacgggcaattgaatacgcttatagtaagggttgcgttgttgttggagccttaggtaatgatgatatcataatagacaaccaagagatatttttaaaaaatattaaagataatttaagtatttcacatattaataaaaatgctctcgtttatgatttccctagtcaattaccaaatgttataggtgtggcctctgctaattattttaataatattgcaaactattcaaacaaaagcgataaatacacagacattctttcatacgcaggagacactacgcttttagaaaaacacggtatggaaaaatggttacagaagaaattaattttaaaagattgggttttaagtacatcaaatagcacagtatatacatatactactggtaactctttagctacaggaaaggtttcgggtgctatagcggctatgaatgattattataatatccataaagacccttttagaagtcttcaactatttaaatgtaagacttcaggtatccttaatatggataccttaatttaa

SEQ ID NO: 420177 - DNA, 1722 bp, Staphylococcus aureus
ttgaaagataattcttttaaatttttacttagaaaaatagaaatacctaaatgtttatttttaatttctattataatctctactattggtgctttaagtagtttaattataccttttctcgctggcaagttagttgattcattttctctagaaacaaacaataatgatattattataatattaactttattgtttgttacaacaggagtttttagtggcctagggaacttttttatgggcttagtaggggaaaaaataatttattctataagatctaattttttcgacaaaataatacggttggaaattaaattttttgacaataatgataccggaaagcttatcagcagaactgtagaggataccaatattataaatgactttctttcaaacaaattccctacaattttccctgcctttcttacctttataggatcacttgtatttctttttttaatagactggaaaatgactgttttatccttaataactttatttctttttgtactatttattattcctattggtaaaatagttcataatatatccttgcaaactcaaaatgaaactgccaattttagctcttttcttaataagatatttactgaaataagattagtgaaaacgtctagtactgaatttgaagaaataaaaaatgcaaaggtaggtttgcaaaaattatacaatctaggtgtcaaagagactaaagtacagtcaattataaaccctatttctcgtttaattatgttactaacaataggagtaattttaggtgttggtggagttagagtctctctaggcattataacttcaggtcaattaatggcaatgattttttatgtatttcaattatctcatccaattaatgagctgctaaatttttttacaagttataaaaaaacaactggagctagtcaaagaatatatgatatttttcacgataaagaagaagatattagtatttgtgatggtcctcaattaccaacatcaactataacttttaaaaacgttagttttaaatacaataataaaataattcttcaaaatttaaattttgaaatacctaaaaataagataactgctattgtcggtccatccggtgcaggaaagactactatattaaatattattgaacgcttttatccaatagacacaggagatatactgtatggagaaaaatcaatttataaacttcctttaagttattggagaagaaatattggatatgtaatgcaagataaccccatgttaaacaatagtataaaggataacttgctgtatggaacatctagaaatttatctattaatgatttggttagttatacaaaaattacagaaagttatgattttatatcacaggctccagataaatttgatacgataatcggggaaagaggcattaggatatccggcggtcaaaaacaaagattagatttaacaagaaatctgataaaagatcctcctgtattattatttgatgaagcaacctcgagtttagacagtaaaacagaaagaaagattcaacaagctatttctcaattgaatggatataaaacaatcgttatagtagcacatagattatctactattcaaaaagcagcgcaaattgtttttgttgaaaatcaaagtatcacaggtattggaactcatgaagaattattaaataaacacaaaacatataaattatttgttgaggcacaggacatttacaaaaatatttaa

SEQ ID NO: 420178 - DNA, 291 bp, Staphylococcus aureus
atgaagtattttagtaacatttatattatattttattctgtgataattgctttaatagctttctttatttttgaatttactggttatagagttcacagtggaaacggattcacaacattcattatttttgtcatactttcattgtttataactattgtgaacggaatatataaagttaagaaaggtgataatcatcttggatactctttctaccaaagtaatgattgcactaccatgacgacgaccaacaatagtatctcctttggtagtgtaagttgggtcatgttataa

SEQ ID NO: 420179 - DNA, 702 bp, Staphylococcus aureus
atgacacacaaatatatatcaacgcaaatgttgatcatttttactgcattaatgattattgccaatttttactacatattttttgaaaaaattggctttttactcgttctattattgggatgtgtattagtttatgtaggatatctttattttcataaaatacgtggccttttggcgttttggataggcgcgctattaattgcattcacattattgtctaataagtatacaatcatcatcttgttcttctttttattactacttattgtgcgttatttaatacacaagtttaaacctaaaaaagtagttgcgacggatgaggttacgacttcaccatcttttattaaacaaaagtggtttggtgagcaacgtacaccagtttatgtatataagtgggaagatgtacaaattcaacatggaattggcgacctacatattgacttaacaaaagctgcaaatattaaggaaaataataccgttgttgttagacacattttaggtaaagtgcaggttatattgccggttaattacaatattaatttacatgtagctgctttttatggaagtacttacgtgaatgaaaaatcatataaagttgaaaataacaatattcatattgaagaaatgatgaaaccggataactatacagttaatatctacgtatcaacgtttatcggagacgtagaggtgatttatcgatga

SEQ ID NO: 420180 - DNA, 453 bp, Staphylococcus aureus
ttgcaaattcaatcagggacaagcacacgtgcatatgctggaagagattattttgaaaatattgttttttcagatggaggtaatcagcaattttatacagaaacagaagatgccatcgatagtttgagagataaattagaagaaaaaaatatagaatctaccgcagatttaaaaagtacgctaagccgatcgatatctgaactaagagaagtaagttcttcatataacaaagttgtaagcaaaagtaaacgagatgctaatgtggaaagttttattgataatattaaatcaatatctgaaagcctaagcgatatggaaaaaggcaatgggttaccaagtagccttaattttgaacagtttgatttaaaacaattaaaagaaattagagaaatgctaataaaaataaataattgtagtagagagttgatagatatttatgaacatgaaatctga

SEQ ID NO: 420181 - DNA, 2025 bp, Staphylococcus aureus
atgaaaatattcttagaagaactaattcaccaacaacaagcagttaaaaaaataatagatactttcacaggaatcgaaaagtatttaacttcaaaaaattgtgacaatgagttcgctaataatttaataataaatagatattcagaagaagctaacatagatataaaaatggagacggggacaggtaaaacttatgtttatactaaaatgatgtatgaattacataaaaaacttgggatttttaaatttatattagtagttccaagtcctgcaattaaagagggagcaaagaattttttaactagtttatcaactaaaagacattttcaagaaatatacggaaatgttgaaatcgaaataaatacaataaataaaggcgattttaatactagatcaggcagaaaaatttttccacctcatttgagtaactttattgaaagcagtaatttaaatgctaatcaaattcaagtattacttattaatgcaggtatgttgaattcatcaaatatgacaaaggttgattatgaccaaactttattaagtaattactcaaaccctatagaagctttaaaagctaccaaatctgtagttataatagacgaaccccataggtttccgagggataagaagaactacaaatctatagaaaaacttgcacctcaaatgattgttagaattggcgccacttttccagaaataaaaaaaggaactggaaaaaaagctatatatgttaaagattattatcgtaaaaaacctcaatttgaattaaatgcaatagatagctttaatcaaggtttagtaaaaggaattgatatattttatcctaacttaactccagaacaagcaaataatagatatacaattgaaagtgtaaaaaataaagagatagttttgaaaaaaggaaagaataaatggacattaagtataggtgagaatttagcgaatattgattcttcatttgaaggagatttaagctattcgggctctaaaattttatctaatgatttagaggtaagtaaaggtatggatttattgcctggcacatatacaaaaagttatcaggagttaataattaatgatgctatcaaccaacattttgagcatgaaatcaataattttatgagaaataacctaaaagaaaattttcaaccaaaagtaaaaacactttcattattttttattgattctattaagtcatatagaaataaagatggatggttgaaaaagacttttgagagacttttaaaagctaaacttagaaaattaataaaagaatttgaagttaaaaaattaccacgagagatcgaatacttagattttttaaaagcgacatacgagagtcttaattgtgagaatcaaatggttcatgcaggttactttggtgaagacagaggttccggggaagaagcaatacaagctgaagtatatgacatacttaaaaataaagagaaaatgttgagctttaaggattctaatggtaaatggattacaagaagattcttattttcaaaatggacgttaagagacgggtgggataaccctaatgttttcgttattgcaaaactaagaacatctggatcagaaaatagtgaaattcaagaggttggcagaggattgcgtttacctgttgatgagactggtcacaggttaacacaagatgaatttccaagtagactttcatttttaattggatatgatgaaaaggatttcgcagaaaaattaattggggaaataaattctgatgtagaagttaaattaagtgaagataaattaacagatgaaatgattaataaaatagttgaatataggaaaaaaatgaatccttattataatgatgaagtgttattagaacaattagatgaacgaaatctaattaataggaaaaatgagtttaaaacagatgttgaaattgatggagttaaaaaatcaggatttgaatggttgttagaattatatccagaagttaatgcatctaaattgaatgcagataaagttagagatatgaaaaaaatccacccaatttaa

SEQ ID NO: 420182 - DNA, 1455 bp, Staphylococcus aureus
ttggttagatttaaatcaatacaaggaaaatctaatcattctgcatggctagcatttatgtatcctaggttattattagctagaaagctacttacagaaactgggaaaatcagtgtctcaattgacgaaaatgaatttgcaactttgaaagtattattagatgaaatttttggtgaatcttcatttgttggtgatattataagaaaaactaaatctactacaaatgattctttgacgggttttaaccaacaacatgaacacaccttgttatatgctaaaaatattaataaggtaaaaataaaaggtgatgctaaagaatttggaatttataaaaatattgataatgatcctaatggtccgtgggcgccagataatccgagtgccagaagtggtagtaaaaatacattatttgaaattaaaaatccctatacaggtactatcgatcttccgccaaaaggtagatattgggctttttctaaaacaacatttgagaactgggttgaatcagggaaagtaaaatttaagaaggaagttaagggttcagaaagaggatttattgtgaaaaaatatttgaaagatgtaaaaagtaaatataatccagtgaattcactctttggtgttgataataaatttatgaatcaagtggctactaagtatttagtgaacttatttgatggcgagtctttatttacaagtcccaaaccagtgaaatttgttgaaaaattggttagatacttttcagatgaaaattcaataatattagatttctttgggggatcaggtacgacagctgaagcggtaattgaagctaacataaaggaagaaacaaatagaaaatatattatcgttcaaattccagagaaaacttatagtgttactgaaaacaatgtgaaagttcctgtttcttctaatgaaaggctatttgaattaggttataagagtattgatgaattaactttaagtcgtataaataaaatttatgaaaaaaatagtgaaaaaaaactagaattatatagacattactttgtagttactcccccaatcagtgttttggaaaaaattgataattttgaaaatattggtcttgatttatttgataatatgattgatattttttctagtgataacttaaggttagaaggcggagcaacaggtgaagaagttataatggaaaattggctagtacaagatagctatgattttaatacaaaagtatctaagttaaccatttttgactacgaagctaattatattgagaattcaaggttgtatttaattaaagaaggttggagtagtaaaaatataaaagaattggttaatttaataggtaataataaattattattgcaaaatattataatatatggttattcttttggattagaggaaactagagaattagaaatagctttgaatcaattagatagtaaagttaatttaataaagaggttttaa

SEQ ID NO: 420183 - DNA, 393 bp, Staphylococcus aureus
gtgattaaagataacgaaagatttaatagtacagtaagtgaaaatagtgtttttttggaagaattgagagagaaaatacctaattattttagaagtaatgtttatgacgaagaaggaaatttaatagaattgggtggttttgactttgagaaatttaataataatattaaaaattcacagcagtcattgtttagttcaagttattctttaaattttgtaggcaaaaattatgcgaaaaagcaggctggggaaaagccaacatctattatagtgccaaacaaaaagattaattttgaaaacaaaaatgaaaatttaattttttcaggtgataatttagaagttttacgtcatttacaaaataattatcagggcaaaatagaatatatatattga

SEQ ID NO: 420184 - DNA, 921 bp, Staphylococcus aureus
atgcaagagtataattattggaaaaaagttataaaaatgttagtgacatgtgttatatttttgatacttatattgtttagcaattttttaagaacggttaatatacgatttggttcagaagttgtccttttatttgccggtgctattatacctgggatctggggaagtacgattgaattagctgataatagtaactggaagacatctcagagaaagttagaaagagcaggagtgttacaagatgacactttaatcagaatttcctttgcatatctttttagaattaaagtagatgataaatattttttagtattgaataataggtcaaagaaatatcaacctgtaggaggagcgtacaagttttatgaagaagaaagagaatatctgtcaagacatatacctgctgaaaatgataatcgtatcccagtagatgaagtaaccaaaaaagactataggttactagttaagaataaagatttaaggagatttgtaaaacgtttcaataaaacatcatgcagagaaaatgtaaataatcttagtcgtgaatttgaagaagaaatatttaaaactggaatcttgaataaagatatttttggtaatttatcatacagatatattggtagacatataacgaaggtagaatacggacgagtgtttaatcattttgaactcctcttggcagatattcttgaagtaaaacttacagaaaaacaagaagaattattcagggaacttatgtatttaagttctgacaaatattgttttgcatcagctgatacaattaaaactcatggagttaaatatggaactcaagaactaaaagacgatattgctaatcatacaccaaaaatattgaccgaaaatacagacgatttgactaatagaaataaaatcaagggcattatcactgttcgattataa

SEQ ID NO: 420185 - DNA, 681 bp, Staphylococcus aureus
atgtatgattgttcaaaggagttcaataatttttatcgtgaaaaggttgtgctatctgctaaggaacagaatgaactaaggcaaaagcgtaaactgaatattagaagattaaaagaagggttaaaggaatataataaagagaaaaaaacgagttataaaattgctgaggactgtatacaaggtagcatggcgatgcataccattacgcagaatgacgagaaggattatgatattgatgttggcattgtttttgaatcggattgccttaataaattgggggctcaagctactcgtaatatggtagcaaacgcccttgaaagaaaaactagacaatttgcacaaccacctgaagtaaagactagctgtgtacgtttgaaatatagttctgatggttatcatatggacttggcagtattccaacggagtaaagaaaatgaatgggatgatgaatacatatatgagcatgcagggtcagaatggtcagaaaggggcattaaggcactagaagagtggttcattgatcgagtaaagtattctcacgatgatatacacaaagtggtcagattgtccaagatgttctgtaagtcaagagataattggaaaaacatgccaagcggtctagttcagactattttatgtgacgaaaacctaagaaacaaacaactattcgcgcttagatga

SEQ ID NO: 420186 - DNA, 885 bp, Staphylococcus aureus
atgggaaaaacaattttaatcactggtaagaatggatatgttgggaatcgtttaaacggttatttaaaagcacaaggtcatgttgttgatcaaattaatgttagagagaatcagtggaaagcattagattttagtaaatataacatcgttatacatttagccgcaattgtacacaataataacccaaatattactatggtagattatatgaatgtaaattaccatttaactaaagagctagctgaaaaagctaaaaccgaaggcgtaaatcagtttatattctttagtacaatgtcagtatttggacttgatggcgatgtaggtaaacaagttattatagataataacactttaactaaaccaacaacttcttatggaatatcaaaactacgtgcagaagaaatgttacgtgaaattcaatcaaatgaatttaaggtagctgttttaagaccaccaatgatttatggtgaatcagcaccaggtaattttagcaagttaatcaaaatatctaaaattttacctctatatcctcggattgataatcaaagaagtagcatatatattgaaaatctcgagatttatattaatgaacttattgagaatgaaggttcaggtatattacatcctcaaaataatgattacttaaatacaaattatgcaatttttaaaatgagagaattgcaaaataagaaaagtatgagtattaaattaccaaacagtttattaaaattatttggtaaagtatcaatctttaataaattatatggaaatttaatttattcaaaggatattgatgactttgaatataccgctagattcacaaatgaaattgaatcttacagaaagacaattaataaacaaaaagatgttattaaagaagtgtga

SEQ ID NO: 420187 - DNA, 558 bp, Staphylococcus aureus
ttgaaaagactatttgattttacaagttcattatttgctattcttattgcctctccttttttaataattacatcgattattattaaattagaatctaaaggtccagtcgtttttaaacaaaaacgacctggtataaataataaaatttttaatatttataaattcagatctatgaaagttgaaacacctgatgtagcaactgataaaattgatgctaatatgtacattactaaatcaggacgtttaattagaaaaacttcaattgatgaattacctcaattatttaatattattaaaggtgatatgtcggtagttggtccaagaccggcattatacaatcaatacgatttaattgctaaaagaacaaataaaaatgtgcatacggtaaagccaggtttaacaggtttagcgcaagttatgggtagagatgatattacagatgatcaaaaagttcaatatgataaatattacgttgaaaaccaaaccttcattttagatatgtttattatatacaaaacgattagaaacacgataacatctgaaggtgtgaaacattaa

SEQ ID NO: 420188 - DNA, 1041 bp, Staphylococcus aureus
atgcatctgatttcttcagaagggaaggaattagaacaatatccaaatgatataattcataaaatagaaatgaatagagaaatttctattttaaaagatataaaatctttgttaaatttaatttgtttatttataaaagaacgaccatatattgtgaatgcaggaacaccaaaagccggtctgttagggatgattgcttcatatattaccagaagaccacacagagtatatacggtacgcggtcttcgattagaaacagtttcaggcattaaatataaaatattatttttaatggaaaagatagctatgttttgtgccactgatattatagcaatttctgaaagtttaaaaactcgagtaattgagttgaacttaaataatggtaaaaatataatagtctttggtaatggaagttcaaatggtttgaatttaaaagaatatagtaaaaataataacaaaatagaaaacgatatactgaaaaaacttaatggacaatttgttattggttatttaggtaggttagttaaagataaaggcattgaagatttaataaaagcttttaagataatagagaaaaaatatagtaatgtaaagttattagttattggctcgattgaagatggtgattctataagtaaaaatgatttaactttcatattggaaaataaaaatgttgtttacaaaaaccatgttgataatccagttaattattacaataatatggatgtttttatttttccaacatatagagaaggttttgggaatgttagtatagaggcccaagcattaggaatacctactataacttataacgtcactggtgcaaaagatacagttataaataatgaaactggatttatagttgaaccaggagactatgtaaaaattgctgaaaaaatcgagctattattaataaatgaaaaattaaaagctcgtatgggaacaaagggtgaggaatgggtaaataataatttttccaatgaaataatatgggaaaaaatgatgagattttacaattttaaactaaaggaacgaaaatga

SEQ ID NO: 420189 - DNA, 303 bp, Staphylococcus aureus
atgacaaaagtaacacgtgaagaagttgagcatatcgcgaatcttgcaagacttcaaatttctcctgaagaaacggaagaaatggccaacacattagaaagcattttagattttgcaaaacaaaatgatagcgctgatacagaaggcgttgaacctacatatcacgttttagatttacaaaacgttttacgtgaagataaagcaattaaaggtattccgcaagaattagctttgaaaaatgccaaagaaacagaaggtggacaatttaaagtgcctacaatcatgaatgaggaggacgtgtaa

SEQ ID NO: 420190 - DNA, 1467 bp, Staphylococcus aureus
atggctgttgatgaaataaaaagaaaaataaaaaataaagatataaatgtagttgatatcatagaaaaagatattaataatgaaaagaacttctctcgaaaagctcatttgaacaaacaaagaagtaaaagagttagaagagaatcgggtgttatttctgaggagccaagaataactttgaaagctaaatattccataggtaaattaattgtagcaaggtcagataaagaaataaaatacgaagattatgttgattatccaactggatacactgtacaagcctatattttaaaaggggggaaatacttaccgccagaagaaatagctcaaaaaaaactcacagaaaaattgaaaattaattatatgttattagataataacaatgaacctgtaaagaaatcaaatggacaagtggttactaataatttggatatatatttttatgatcctacgcctgtattaaagaaaatagaggaagtgactaagaaaatagagggtggagattatgaaaatgaagaagaagttataggtaatttagaaaaaataaaagaaaaagtggaacaaccaaaagagttacctaaaattcctgaaattttgatggaagtgcaagaggaagatggtaaattattaaaaaaacaaccagaaaatactaagtacagcccatcaacaaaacctgttgagaaaccatttggagaagcgccaagtgaagaagaagtaacaagtaaagtgacagtaccaggatatccgacagatgcagcaaaacaaccgacatttaaagtcacagatccaagtactttaccagatggaaaaacagcaggaaaaacagatgtttcagttacggtgacgtacccagatggaacaacagaagaagtgacagtaccagtaacagtaggagaacaaccagaaaatactaagtacagcccatcaacaaaacctgttgagaaaccatttggagaagcgccaagtgaagaagaagtaacaagtaaagtgacagtaccaggatatccgacagatgcagcaaaacaaccgacatttaaagtcacagatccaagtactttaccagatggaaaaacagcaggaaaaacagatgtttcagttacggtgacgtacccagatggaacaacagaagaagtgacagtaccagtaacagtaggagaacaaccagaaaatgagaatccaaaaatatcaaaacaacaaaaagttctagacccagataaacgtaatccagataatggagtggtcaaaggaactgataaatttgctagcgattctaaacatcatgttacacaggtggaaaaagcatcacaggtaagaaatgcttcagtgaagaaaaaatcaacagaacaaaaacgtggtcaattacctgaaacaggtgatgaaactaatgcaccattatttgctacattgtttggcgcattaggcgcaacgttattatttactaagcgtcgcaaaacagatgagcaataa

SEQ ID NO: 420191 - DNA, 402 bp, Staphylococcus aureus
gtggatgaaggttcgtatcagccaagtagatgttttgcgttaccagttattcaaaaaggacacatatttattaagcgagtgaatgactgtccaattatggatgttgatatgctcgaacagtggtcaaaggagtataaacaatcaaatggtagtcctaatatcaaagggtacacacgacgtgatagtgcgtattggcgagatatagcttttggtgtaagtgagggagagcgcaattcaacattggcttcaattacaggttatcttttgcgtaggtatgtagatccaaacttagtttatgggttagtgagtgcgtgggcgagtgtatgcaaaccacctattaatcaaagtgaagtaaataatacttttaaaagtattttgaaaaaagatagtaaaaacagttag

SEQ ID NO: 420192 - DNA, 657 bp, Staphylococcus aureus
atgattcgaatcacaccatttgaaacgagacaatcacctaatataagtagtcaattgatggaaacatttataggtgtatggatagatggtatgagtgacgctgatttgcaacaaatgatgcaacgacttgtggattatatcgcacaagaagataattaccgtttaattttattatcacgtcatcaaaatgacataccaatgtggcttcgtgaatgtattacgtcggtaaatgaggaataccaagctaaacagaatgcggatgttaatgtttcagcattaatgacacctgaagatcaagatgacattattgctgttaagacgatacatgctgaacatgatgttgtagaagcattgcggacgttgcgacttgtgatagatatgtcaaaagaacctgacttgtatttacaaattagtgcaattagcgctgggattccacaaattaatggtcaacaaacagattacgtctctgattatgacaatggccgtattataaatacagttgatgaattagatgatgcgttaaattattatttattttatttgaaaaattggaattatgcgtacgcctattctttaaaattaatagatgcatatgcttctaagaatattattaatcagctcgatgagttaatagaaggtgaaaatgatgccacgtaa

SEQ ID NO: 420193 - DNA, 153 bp, Staphylococcus aureus
atgaactcggtggtcaaggtgttggcaaaaaaactagttaaagcagttgttgaacatgctcgcgaaaatcatttaaaaatcattgcctcatgttcatttgccaaacatatgttagaaaaagaagattcatatcaagatgtatatcttggttaa

SEQ ID NO: 420194 - DNA, 150 bp, Staphylococcus aureus
atgacaagagaaagaagatcatttagttcagagtttaagttacaaatggttagattatatgaaaatggtaagcctaggaatgaaattatacgcgagtatgatttaacaccttcggcgttaggaaaatggataaagcaacatcaaaaataa

SEQ ID NO: 420195 - DNA, 150 bp, Staphylococcus aureus; identical to SEQ ID NO: 411733

SEQ ID NO: 420196 - DNA, 282 bp, Staphylococcus aureus
atgacaagagaaagaagatcatttagttcggagtttaagttacaaatggttagattatatgaaaatggtaagcctaggaatgaaattatacgcgagtatgatttaacaccttcggcgttaggaaaatggataaagcaacatcaaaacacgggtacattcaatcatcaagataacttaacagatgaagaaaaagagctgattaaattacacaaagaagttcaacatttaaaaatggagaacgatattttaaagcaagcagcgctgattatgggacgaaaatag

SEQ ID NO: 420197 - DNA, 249 bp, Staphylococcus aureus
atgcctaaaaccgatagcgcatgtaaagaatacttaaaccaatttttcggctctaagagatatctgtatcaggataacgaacgagtggcacatatccatgtagtgaatggcacttattactttcacgggcatatcgtaccaggctggcaaggcgtgaaaaagacatttgatacaaccgaagagctcgaaacatatataaagcaacatggtttggaatacgaggaacagaagcaactaactttattttag

SEQ ID NO: 420198 - DNA, 249 bp, Staphylococcus aureus
atgaataaccgcgaacaaattgaacaatcaattatcagtgctagtgcctataacggtaatgacacagagggattactaaaagaggttgaagacgtgtataagaaagcgcaagcgtttgatgaaatacttgagggtttacctaatgctatgcaagatgcactcaaagaagatatttatcttgatgaagcagtagggattatgacgggtcaagttgtctataaatatgaggaggagcaggaaaatgactaa

SEQ ID NO: 420199 - DNA, 276 bp, Staphylococcus aureus; identical to SEQ ID NO: 412438

SEQ ID NO: 420200 - DNA, 1626 bp, Staphylococcus aureus
atggataaaatgaagaaaaagcttgtaggaggctacattcgcgtgtccacagagagacaagtagagggttatagcatcgagggacaaattacacaaatagagcaatattgccaattcaacggctatgaactcgttgatatatatgcagatcggggtatatcaggaaaatctatgaaccgtcctgaattacagcgcatgttaaatgatgctaaaaatggaaaattagactgtgttatggtttataaaacaaatcgtttggcacgtaatacttccgatttacttacaatcgtcgaagaacttcatcgtcaaaatgttgaattttttagcttgtctgaacgtatggaagtcaaaaattcaacaggcaagttaatgctccagatacttgcaagtttttccgaatttgaaagaaatacaattttagagaatatttacaacgggcaacatcaaagagctttaaagggctattatcaaggcaatcttccattaggatataataacatacctgataataaaaaagaattaatgattaatcaacatgaagctaacatcgttaaatatatctttgaatcttatgccaaaggtcatggttatcgtaaaatagccaatgcactcaatcacaaaggctatgtgactaaaaaaggcaatccatttagtatcaattcaataacctatatcttagtcaatccattctacattggtaaaattcaatttgcgaagtacaaagattggaatgaaaagcgtcgtaaaggactaaatgataaacctattatagctgatggtaaacaccctcctattattagtcaagaattatgggataaagtccaatcacgcaaaaaacaggtcagtcaaaaacctcaagttcatgggaaaggaaccaatctattaacaggtattattcactgcccacaatgtggtgcaccaatggcagctagtaacacaacgaacacattgaaagatggtactaagaagcgaatacgttattattcttgtagtaacttccgaaacaaaggctcaaaagtatgttctgcgaatagcgttagagccgatgtcattgagaaatacgttatggatcaaatacttgaaattgtcaaaagcgataaagttctcaaacaagttgtcgaacgtgttaatcaagataatcaagtcgatgtagctgcactcaatcatgatattgcttataaacaacaacaatttgatgaagtaaacatcaaacttaaaaatctcgttcaaaccatcgaagacaatccagacttaacatctgcactcaaaccaaccattcatcaatatgaaacaaaactgaatgatattacaaaccaaatgaatcaactcaagcagcaacaaaatcaagagaaaccatcttatgatacgaaacaaatcgctgccctattacaacgaatatttcaaaatatagaatccatggataaatcacagctcaaagcattatacctaacggttattgaccgtattgatattcgtaaagacgagaatcataaaaaacaattctatgtcactctcaagctcaataatgaaattattaaacaactttttaataataacaatctagacgaagtgctcctcagcacttcgtctttgtttttgcctcaaacactctactttcaaatataa

SEQ ID NO: 420201 - DNA, 222 bp, Staphylococcus aureus
atgaaccatgaaactacacaatcagactggcgaacggttcctaattgcttagcatctcaaaattatatatctatcgtaaaaggactagtacatcattttacagcgattgaagatgaagaaatacttgataaaatctatgacgattttatggatgatgactctataacaacggtccttaataatgatttacagacaattattaaccattatctattaaaatga

SEQ ID NO: 420202 - DNA, 1788 bp, Staphylococcus aureus
atgagcgaatttaaaagacatcaacaaacatcaattaatgttcaaaaacaagcaaaccttatttggaatgttgcagacattttaaggggtttatacaaacctcatgaatatggaaaggttatcttaccaatgactgtcattaaacgtcttcacgatacattactaaaaacgcgagacaaagttcttaagactgcagaaaatacccaatcaataaatgacgtaatgcgagaacgccttttgaagaacgcttcagggtattcattttataatacaagcttatatacttttgaaacattactcgcagacccagcaaatattgaatcaaactttagagcttatctcaatggtttctctgaaaacatgcaagatattctcaataactttaagttcgacgttgaaattacgacaatggcagataatgacgtgctattttatgtgattcaagaatttaacaaagcagatgcatatctaggtccagacaaaatgacaagcacagatatgggatacgtgttcgaggaacttgtacgaaaattttcggaaagctataacgaggaagcaggtgcacacttcacgagtcgagatatcatttatctcatgactgatttattgcttatcgaagataaagatactttgtttaaagaacatgttttcaaaactgtctacgaccaaacaatgggaacttcccaaatgctctcagcaatgacagaacgtattcacgatatgaatgatactgccgaagtagctacctttggtcaagagctaaatcctgaaacttatgcgatttcgaaagcagatacaatgattcgtgggggagatcctgaaaacatggcgcttggaagtacattaacgagcgaccggtttgaaggatttacatttgattactgtatctccaacccaccatttggtgtcgattggaaaaaggaccaaaaagcagtaaaagcagaacatgaacttggtgaactcggtcgctttggtgttggattgcctcgagttagtgatggacagttgttatttcaactcaatggtatttcaaaattaaaggaaacaggacgcatggcaattattcacaacggttctgccttattctctggaaacccaggtgctggcgagagtttaattcgtcagtacgtaattgagaatgattggttagagggcataatccaacttcctaacgacttattctacaatacaggaatttcaacgtatatttggattattactaaagataaatctccagaacgtcaagggaaagtacaactcgttgatgcgtccaatatgtatgaaaaacgtcgtaagaatattggtgaaaaacgcgtagatatttctgaagcatgtcgagaaatgattgtgcaagcttatggagaatttaatgataaagaatactatctaggagatggaactgtagagtcaaaaatacttaagaatgaatcatttggttttactcgagtgactattgaacgaccgcaacgagacgaaaacggagatatcgtttataaaaagaatggaagcaagagtgtagacacgaaccttagagatacagaagatattcccttaacagaagatattaatgaatattttgaacgtgaaatattaccatttaatcaagatgcatggatggatcgtaaaaaagataagatagggtatgaaattccatttactagattgttttacaaatatacaccaccagaaccatctgaagttatttcagaacgtattaaacaactcgaagagtctattattaaaaacttccaagcattatctggaaaggaagtggatacaaatgagtag

SEQ ID NO: 420203 - DNA, 1311 bp, Staphylococcus aureus
atgagtagagaaatgaaatacagcggaattgagtggattggatatataccaaagtattggactattactaagcttaaaaatattattgactttataagtggttatgcctttaaaagtgaacttttcacgatttcagataataataaaaaagtaataacaattaagtcatttaataccaaggagattattctcgataacctttcttactcaaacgaatctctcaaatttccaactaaatatttattaaaaaataatgatattctttttgctatgagtgggggaacaactggaaaaaatttattgatagaacaagtagacgatttatattatataaatcaaagagtgggaatcataaggtcttcttttagtaagtttatttattattatataaatactggtttatttagcgaatatattaacttattctcatcaggatcagctcaacctaacatatctgctacagatatacaaaattttatcattgcgttacctgagaaagaaactattaaaaaaattgaaatatacattaattaccaattaaaaattatctcaaatatcatagacacaacatatcaatctatcgaagaacttaaaaaatacaaacaatcactcatcacagaagcggtgacaaaaggcatagacccgaatgtggaaatgaaagaaagtggtaatgattggattggtagtatcccttcaaattggagtgttcgaaaaattaaacatgatttcaatttaaaagggcgtattggatggcaaggtttaacttctaacgaatatcagactgtaggaccctatctcataacgggaactgatttcaaaaaaggcataatcaggtgggattcttgcgttagaattagtgaagaacgttttgaagaagctccagatattcatattaaagaaaatgatttattaatcactaaagacggcacgattggaaaagtcgctttagcaacaaatgttccaaaaaaagtttcattaaattcaggtgtactactgattagggaaaaattaaaaaatactattaataaaaaatttatgtattataatttgttatcaaatatgttttggaattggtacaattctaataatcaaggtgctagcaccattaaacatctatatcaaggtcaattctataattattcttatgcgatccctctattgcatgaacaacaacaaatcgtccaatatctagatgataaagtttctactatcgataggctcattgaagataaaacaaaagttattaaagagttagagaattataagaaatcattaatttatgagtatgtcacaggtaaaaaagaagtgtaa

SEQ ID NO: 420204 - DNA, 3030 bp, Staphylococcus aureus
gtgataaaaaataaagaaattaattttgaacaagatatagaagcgagtctagttcagtacgggggatgggagtcagtaagatttcaagatactcattacgatgcaaatatcgcactcgatccaacagtattattagaatttgtaaaacaaactcaaccaaaaaattggaagcgatacgtatcaatctatcgtacaaatgcagaacagaagtttttaaaacgactaaatgaagaaatcacaaatcacggcatcttacatgtccttcgtaaaggtatcagagatcgaggagtctcttttaaagttgtttactttcaacctgcatcatctttaaatacagaaaatataaaaaattatgaagctaatcgttttcaatgtgtgcgacaatttcaatatagtaataagtatagaaacactattgatatggtgttaatgattaatgggattcctcttgttgcattagaacttaaaaatcaatatacaggccaaaatgtggaacatgcgagattacaatttgaacaagatagagatccaaaggaattaatttttcaatttaactctcgattcttagtctattttgcagtagatcattttaatgtgttaatgacaacaaaactcgcaaaagggaacacttactttctgccattcgatcaaggatctaatggtcctggtcgtgttggaggtgcaggaaatccatctaatccatctggataccctacttcttatttatgggagaatgtactcacaagctatcaattattggatatttttgaaaggtttatgaatttagaagaaaagaaaaaactactaatttttccacgttatcaccaactggatgttgtgaaaaaattaatatcagatactcagcaccatggtcctggaaagaattatctcattcaacattctgctggttcgggtaagtctaatagtattgcttggttggcataccatctcgcttccttgcatagtaatgaggatcaaccaatctattcatcggtcattgttgttacagaccgtactgttttagatcgccaacttcaaaatacattaatgagtttcgagcatactgttgggcaagtcgaaactattggagataataaaacttctcaagatttaaaaacagctataaatgaccaaaagaaaattattattactacattacagaagttcccagtaatttatgatgaaatagataatacagcaggtagaagttttgcgattttggtcgatgaagcgcattcttctcaaacaggaagcagtgcacaaaaattaaaacatgcgttagcagacaaagaagcttctttaaaggaataccaagaatttgaagaaagcgttgaagatcaatcgctagatgaccaagatcaaattgttcaaacattactgtcccaaggtcaacacgacaacttaagtttttttgcttttacagctacaccgaaagagaaaacgattgaaatgtttggaacaaaacaagcagatgggtcctatcatccatttcatatttatagtatgagacaagccattgaagaaggatttattctaaacgttttacaaaattatatgacatacaacacttcctataaaattgcgaaatcgattgaagaagacccagaattgccaaaaacagaagcagttcgagctatcgctaaatatcaatctcttcatccttgggtacttagacaaaaagccgagattatgattgaacaatttagatcagtgacacaaaaagcagtccaaggtagaggaaaggcaatgattgtgacagcttcacgactccacgccgtacggtatatgcaagagttcaaaaagtacatcaaagaaaaaggatacacggatatggatgtgttagtcgctttttcaggtactgtagaagatgatggaattgaatatacagagccgaagatgaacttaacacattctggagaacgcatccaagaaaatcaactgaaagaagcatttcatagtgaagactttaatttattaattgtcgcagaaaaataccaaacgggatttgacgaacctttacttcatacaatgtttgtcgataagagattacgcggagtaaaggcagtccaaacattgtctcgcctcaatcgtactatgcctggaaaaacagatacttttattcttgattttgtaaatacagcagaagaaatatatgaagcattccaacctttttacgaagcaacttctctaaaagaagaaattaatattaatttaatttatgatacacagagtaaactacgtaaattccatatatacaatgatgatgatattcaaacagtaatgaaattaaatcgtcaagcaaaacaaaagcaaaatgatcaattacttggtcgattgagtagcgtgttacgccccgttattagtagatacagtgacctaccagaagatgttcaatacgatttcagagttacactaaggaacttcaacaaatggtataactatatcgctcaaattgatcgtacttttgataaagagttactagaagaaagtattttcactggtttcttgttaaaatttattcctgaaaaacaacgcaactatatcgatattgaagacaaagtaaagttagaatactataaattgcaggaagatttcaaaggagatatagcactcgtcaatgaagatgtagaaaatgggcaattggctcatccttcagaagtgaatgcaactgttagacctgaagaagaatacgattctttaaatgaaattatacacaaaatcaatgaacgttttccaaatgattttactcaaggcgatagagtactcgttaaaaacatgcgagaaacattgataaacaatacagatgcgaaacttgtaaatatggctcaaaacaacagcgaagaaatgtttgcgaatagtttattccaacaacaattccaagacttcttgattgatcaatataatcaaggagaagctgcatactctaaaatgtttagcaataatagagacttttatgacactgtctatcaactactagcaaaagattattatagatggctacgatcacaaaaagcagataattttgcttaa

SEQ ID NO: 420205 - DNA, 2403 bp, Staphylococcus aureus
atgagtttggtttatttattaattgctatacttgtgattatggcgatgatacttctaatgtctaaacgtagagcattggctaaatatgccgggtacatagcgttggttgcacctgtaatttcatctatctattttttgattcaaataccatcagtagctaaactgcaatatctttctacctctattccatggattaagacattagatattaatttagatttacgtttagatggtttaagtttaatgttttctcttattatttcacttattggaattgcagtattcttctatgcaactcaatatttatcctctcgaaaagacaatttaccaaggttttatttttatttaacgttatttatgttcagtatgattggtattgtattatcagacaatacgatattgatgtacattttttgggaattaacgagtgtatcatcatttttattgatttcatattggtataacaacggagatagtcaatttggtgcgatgcaatcatttatgattacagtatttggtggtttggcattattagttggttttatcatgttgtatattatgacaggaacgaataacatcacagagatattaggacaagcagatcatattaagaatcatggattgtttatccctatgatttttatgtttttattaggtgcatttacaaaatcagcacaatttccatttcatatttggctacctagagcaatggctgcacctacacctgtaagtgcttatttacattcagccacgatggtaaaagctggtatctttttattacttcgatttacaccattattaggtcttagcaatatgtacgtatatatcgttacgtttgttggtttaataacaatgttatttggttcaattacagctttaaaacaatgggatttaaaaggtatcctagcgtactctacaatcagtcaacttgggatgattatggctatggtgggtataggtggcggatatgctcaacaccaacaagacgcaatagcatctatttatgtatttgtattatttggtgcgctatttcatctaatgaatcatgccatctttaaatgtgcgcttttcatgggagtaggtattttagatcatgaagcaggttcaagggatatacgaattttaagtggaatgcgtcaactatttcctaaaatgaatctagtcatgacgatagcggctctatctatggctggagtaccatttttaaatggatttttaagtaaagaaatgtttttagatgcattaacacaaactggacaattatcccaatttagtttgatttcaatgatagctatcgtgtttgttggtgttattgcgagtgtttttacattcacatatgcactatacatggtaaaagaagtattttggacaaaatatgattctaaggtttttactaaaaaaaatatccacgaaccatggttgtttagtttaccatctcttatattaatggtgctagtacctgtaatcttttttgtaccaaatatatttgggaaggggattatcgttctagcattaagagctgtatcaggtggtaatcatcaaattgatcaattggcaccacatgtttcgcaatggcatggatttaacataccgcttcttttaaccatcatcattattttattgggtagtgtactagcaatcaaagtagattggaaaaaagtgttcacaggtaaaattagacagatttcagtttcaaaaagctatgagatggtatatcgacattttgaaaagtttgctacgaagcgatttaaacgtgttatgcaagatcgtttaaaccaatacattattatgaccttaggcatatttatgattatcattggatatggttatattcgaattggacttcctaaagtacatcagttacatgtttctgaatttggggcattagaaattatattagcaatcgtaactgtcacaattggtatttctttaatttttatacgtcaacgactgacaatggtcattttaaatggagtcatcggatttgttgtgaccttattctttatagcaatgaaagcccctgatctagcattgactcagctagtagttgaaacaataacgacgatactatttattgtcagtttttcaagattaccaaacgtgccaagatctaacgctaacaaaaaaagagaaataattaaaatttctgtatcactcttgatggcacttattgttgtatcattaatttttattacacaacaaacagatggtttatcatcaatatcagacttttatttaaaagctgacaaactaacaggtggtaaaaatattgtaaatgcgatacttggtgactttagagcattagatacattatttgaaggattagtgttaattattactgggctaggtatttacacattattaaattatcaagatcggaggggacaagatgaaagagaatga

SEQ ID NO: 420206 - DNA, 276 bp, Staphylococcus aureus; identical to SEQ ID NO: 409377

SEQ ID NO: 420207 - DNA, 501 bp, Staphylococcus aureus
atgactttcgaagaaaaactaagtcaaatgtataacgagattgcgaatgagattagtgggatgataccagtagaatgggagcaagtatttacaatagcttatgtaactgatcaagctggagaagtcatttttaattatactaaaccaggtagtgatgaattaaattattattcagacatacctaaagattgcaatgtctcaaaagatatttttaagaattcatggtttaaagtttatcgaatgtttgatgagttaagagaaacttttaaagaagaagggcttgaaccatggacatcatgtgaatttgactttacaagagaaggtaatttgaaagtatcgtttgattatatagattggataaatacagagtttgatcaattgggccgtgaaaattattatatgtacaaaaagtttggtgttttaccagaaatggaatacgaaatggaagaagttaaagaaatcgagcaatatattaaagagcaagatgaagctgaactatag

SEQ ID NO: 420208 - DNA, 390 bp, Staphylococcus aureus
atgactaataccctacaagtaaggctattatcagaaaatgctagaatgcccgaacgaaatcataagacggatgcaggttatgacatattctcggctgaaactgtcatactcgagccgcaagaaaagacagtgattaaaacagatgtagctgtaagcataccagagggctatgtcgggttattaactagccgtagtggtgtaagtagtaaaacacatttagtgattgaaacaggcaaaattgacgccggctatcaaggtaatctaggtattaatattaagaatgaaaatgaaaccttagaaaactgggttacttataattttagtcgaaacgttgctgggatagacggaaaatatgccccaccacctgtaacagataaaatttatttatga

SEQ ID NO: 420209 - DNA, 279 bp, Staphylococcus aureus
gtgtataagagacaggtttatattgaagcgcttagtcgaaatttacctatcctttatactaaaggagaaggaatatataactattttgatgaaaaaaaatacggtattgctgtagagccaggaagtataacagatataagaaaagggattagttttataattgataattatgatgaaattcaggaaaatcttaaagataaacatttcttaaataattttaattgggaaaatattggaaaagtttatgaaaaactatacttaggtgagtataatgaataa

SEQ ID NO: 420210 - DNA, 411 bp, Staphylococcus aureus
ttgtatcgtgccattgacacagatggtcatatattagatatttggttgcgcaaaaaacgagatcatcaatcagtatatgcgtttattaagcgtcttattaaacaattcggtaaacctcaaatgataattacagatcaagcaccttcaacgaaggttgtaatgactaaaatagtgaaagtgtttaagctgaaccctaactgtcattgcatatctaaatatctcaataacctcattgaacaagatcatcgtcatattaaggtacgaaagacaaggtatcaaagtctcaatatggcaaaaaatacactcaaagacattgaatgtatttacggattatataaaaagaaccttaggtctcttcagatctatggattttcgccatgccacgaaatcagtcatatgttagctagttaa

SEQ ID NO: 420211 - DNA, 225 bp, Staphylococcus aureus
atggattatgaaaaatgtattaataaatttgacggtatagacaaaatattatgtaaatcacttatttcaggaataaatgacggatcacattttataagcgatgattttgttattacctttgatgaagcaagtatgagaaattataaaagagtctttaagttagtctttgaaaaacttggacatatccaacactttgaaatgatgagtaagaataagattaaataa

SEQ ID NO: 420212 - DNA, 1050 bp, Staphylococcus aureus
atgaaaaaaaagcaaataattaatttgataagatatcattctgaaaataatgaaattagttttaaaaaagaagctttcgatattgctaattcattcgaaagaaacggagatgctcaattggcagaatatattatgtcattattatcggacaataatgtttttactcctcaaatgcaaagtgaaaatttcgaatatataaaaaaaatggatataagtaataagtcgttaccattaccagatgtcataaaagaagatattattggaatcgttaatgcagtaggacataatgcaggagtaagcaaatttttgtttgaaggagatcccggcacaggaaaaactgagactgttaaacaaatatcaagaatattagatagggagctatattatgttgattttgattcgttaatagatagtaaactagggcaaacatcaaaaaatgtttcaaatttatttaatgaactgaatagtatagtttatccacaaaatgtggttattctattcgatgaaatagatggaatagctatgaatagaatgaataatagcgatataagagagatgggaagagccacaactagtttgttaaaaggtttagatagtgtcaatgaaaatttagtaattataggtacaacaaatttatttaaagaatttgataaagcattaataagaaggtttgatgcaacaatcaattttaaccgttataagacacaagatcttatagaaatagcattatttataattgatgaactggtaaatgtttttaagtttactagtagaaataagagattattaaaaaaaatacttgaaactgctcaaactctaccatatccaggagatttaaataatattttaagaacatctgttgcttttagtaatccaaataatgagttcgactatattaaaaaaatttttattagaattattggtaaagaatatttaactgtggaatttttaaaatcaaaaaaatatactgttagagaaattgaagtacttactggtgtttcaaaaagtcaagtttccagaggaatgaaggaggaaaagaacgatgaatga

SEQ ID NO: 420213 - DNA, 183 bp, Staphylococcus aureus; identical to SEQ ID NO: 419585

SEQ ID NO: 420214 - DNA, 246 bp, Staphylococcus aureus
atggagacattagtaagtgatttaacatatgtaaaagtcgcaggaacatggcattacatatgtttatttatagatctatttaatagaaaaattgttggttacagtgcaggtaaaaataacgacgcaaatatagtatcaaacgcaatcagcagaataaatcaaactatccacaacgatagaggcaaagaatttaataatcatttgatacatgaagtcctagaaacctttaaaataaaacgttcatga

SEQ ID NO: 420215 - DNA, 348 bp, Staphylococcus aureus
atggagacattagtaagtgatttaacatatgtaaaagtcgcaggaacatggcattacatatgtttatttatagatctatttaatagagaaattgttggttacagtgcaggtaaaaataaggacgcaaatttagtatcaaaagcaatcagcagaataaatcataatcttgaacaaatcaaactatttcacacctatagaggcaaagaatttgataatcatttgatagatgaagtcctagaaacctttataatcaagcgttcattaagtttcgaaggttgtccttatgataacgcagttgcggaagcgacgatgaaagcaatgaagactgaatttgtaaaacaaatgtaa

SEQ ID NO: 420216 - DNA, 321 bp, Staphylococcus aureus
atggagacattagtaagtgatttaacatatgtaaaagtcgcaggaacatggcattacatatgtttatttatagatctatttaatagagaaattgttggttacagtgcaggtaaaaataaggacgcaaatttagtatcaaaagcaatcagcagaataaatcataatcttgaacaaatcaaactatttcacacctatagaggcaaagaatttgataatcatttgatagatgaagtcctagaaacctttataatcaagcgttcattaagtttcgaaggttgtccttatgataacgcagttacggaagcaacgatgaaagactaa

SEQ ID NO: 420217 - DNA, 285 bp, Staphylococcus aureus
gtgacagtaccagtaacagtaggagaacaaccagaaaatactaagtacagcccatcaacaaaacctgttgagaaaccatttggagaagcgccaagtgaagaagaagtaacaagtaaagtgacagtaccaggatatccgacagatgcagcaaaacaaccgacatttaaagtcacagatccaagtactttaccagatggaaaaacagcaggaaaaacagatgtttcagttacggtgacgtacccagatggtgtctcttatacacatctccgagcccacgagacgtag

SEQ ID NO: 420218 - DNA, 210 bp, Staphylococcus aureus
atgcatttgaaactgaatgatgaagatttaaattatttagtaaatctaagtaaagaaatacttgaacaatacaatattaaattagacgaaacttgtaagggagatattaacataacatcatgtaattctgaatacttttttcactttaagctattttttaaagcctggaaaagcaactataaatttcagagaatgccgttacaactatag

SEQ ID NO: 420219 - DNA, 444 bp, Staphylococcus aureus; identical to SEQ ID NO: 409337

SEQ ID NO: 420220 - DNA, 300 bp, Staphylococcus aureus
atgaaatgggaaattaaaaatttaatgtatgatttaaagttattgaaagataattttgaggatttaaaggatattcatggttggcattttgaagagttttatcaacatgagccaaatcatatcttaaataaagacgatgttattgaagaagggctttcatatcatgagagacgtattcacaataatcaaatgtttggtttattccatctatatatagagcagttcgataatattatcgaaaaatttcatgaattagaaaaagcgtcatctttcgccgaccaaagccaagataacgcataa

SEQ ID NO: 420221 - DNA, 321 bp, Staphylococcus aureus
ttgaaagcgaatacaatgaaaaagaatagtaaattttatattgataaagtgattgaattttttataattttgatcgcggcaaattttgcaaattatttctctatattaaagttctttaaaattacaataccttttgatcagtatttttcagttgatttagcaattaatatcattttgatacagatattttataaattcttatcttcattactccatagaacacatattaaagttaatttttataaaaatgagtcttctttatctgatgaagtaataaagtataaatttaatagtgatgttacaactatttttttaatgtaa

SEQ ID NO: 420222 - DNA, 222 bp, Staphylococcus aureus
ttgaaaaaagtaaattttaaaagtaataacttaaatgtagtagctaatatgtatttcccagaaaattttgatgaaaataatcaatatcctgcaattgtcgttaatcatccagcaggaggcgtgaaagaacaaacagctggtttatatgcagaacgactagcaactttaggttatgtcacgatggcttatgatgcaagttatcaaggtgaaagtgaaggataa

SEQ ID NO: 420223 - DNA, 717 bp, Staphylococcus aureus
atgaaatacgctggtattctagctggaggtataggctcaagaatgggtaacgtacctttacctaaacaatttttagatttagacaacaaaccgattttaatccatacattagaaaaatttattttaattaatgattttgaaaaaattattatcgcgacgccacaacaatggatgacgcatacaaaagatacacttagaaaattcaaaatttctgatgagagaattgaagtgattcaaggtggtagtgatcgtaacgatacaattatgaatatcgttaaacatattgaatcaacaaatggtattaacgatgacgatgttattgtaacgcacgatgcagtaagaccatttttaacgcatcgtatcattaaagaaaatattcaagctgcattagagtatggcgcggtagatacagttattgatgctatcgatacaattgttacatctaaagatgatcaaacaattgatgccattccagtgcgtaatgaaatgtatcaaggtcaaacaccacaatcattcaatattaatttattaaaagaaagctatgcgcagttaagtgatgagcaaaagagtattttatctgatgcttgtaagattattgtagaaacaaacaaaccggttcgacttgtaaaaggtgagttatataacattaaagtaacaacaccttacgatttaaaagtagcgaatgctattattcgaggtggtattgccgatgattaa

SEQ ID NO: 420224 - DNA, 1026 bp, Staphylococcus aureus
atgattaatcaagtatatcaattagttgcacctagacaatttgaagttacgtataacaacgtagatatttacagtgactatgtcattgtacgtcctttatatatgtcaatttgtgctgccgatcaaagatattatactggtagccgtgatgagaatgtcttatctcagaaattgccaatgtctttaattcatgaaggtgtgggtgaggtcgtatttgacagtaaaggtgtgtttaataaaggtacaaaagtggttatggtaccgaatacgccgacagaaaaagacgatgtaattgctgaaaattatttaaaatcgagctacttcagatcaagtggacatgatgggtttatgcaagattttgtgttgctaaatcatgatagagctgtaccactacctgatgatattgatttaagtattatttcatatacagagcttgtaacagtaagtttgcatgctattcgtcgttttgaaaagaaatctatttcaaataaaaatacatttggtatttggggtgatggtaacttaggttacattacagccattttattacgtaaattatatccagagtctaaaatatatgtctttggtaaaacagattataaattgagtcacttctcatttgttgatgatgtcttctttattaataaaatacctgaaggcttaacatttgatcatgcatttgagtgcgttggtgggcgtggtagccaatcagcaataaatcaaatgattgattatatttcaccagaaggaagcattgcactgttaggtgtaagtgagttcccagtagaagttaatacacgtctagtattggaaaaaggactaacgttgattggtagtagtcgaagtggttcaaaagatttccaagatgttgtagacttgtacattcaatacccagatattgtagataaattagcgttgttaaaaggtcaagaatttgaaattgcaacaattaatgatcttacagatgcttttgaagcagacctgtctacatcttggggtaaaacagtattaaaatggattatgtaa

SEQ ID NO: 420225 - DNA, 441 bp, Staphylococcus aureus
atgcatattttagaaaaaaaagagaattatataactcaagaagaatgggttaatttatggcaaaaagcattacaagttgattatcgacctgttgtaaatattaaagcaattaaacctaatcaaaaaggcgataaagatattgaatcggcaatcaaagagacatcaaaatattcggttaagtcatctgattttttaactgacgatgacgaaaaaaatcaagaaattgtaagtgatttagaaaaaggtttatatcgaaaacgtatgttaagttatggtggattgcttaaacaaaagcataaaattttaaacttagacgatgccgaagatggtaatttgattaatacaagtgatgaagataaaacgacagacgaagaagaaaaagcacattcaattacggcaatttggaattttgaaaagcaaaattattatttaagacattag

SEQ ID NO: 420226 - DNA, 324 bp, Staphylococcus aureus
ttggaaaatagaaaatttattaaaaaaattgataatctatttaaaaattctaaggatgattatcctgcaacagtaggtgtaatgtcgcaaaatttatggtatttcagatactttatttactatttaataaaagaaaatgtgatttcaaaaaaagaaattaatagttattgcatgagtcaaaaatatggttcaaatcagaaaggatataagagcgatttaaactggaattatattaattcaaaagataatgtggatgaattttttagtgaattattagaagaaaaagtaccactcatagatttaaattatgtaaatttaatataa

SEQ ID NO: 420227 - DNA, 312 bp, Staphylococcus aureus
atgaaacgtttggaaaataaagttgcagtcgtaacaggagcaagtacaggtatcggacaagcttctgcaatcgctttagctcaagaaggtgcgtatgtattggcggtagacatagctgaagcggtatcggagactgtcgataaaattaaaagtaatggtgacaatgcgaaggcgtataatgtggatatttcagatgaacaacaagtggtagactttgtgtctgacataaaggaacagttggaagaatcgatgtgttgtttaataatgccggtgtggatgatgcgtctggtagaattcatgagtatccaatag

SEQ ID NO: 420228 - DNA, 153 bp, Staphylococcus aureus; identical to SEQ ID NO: 412239

SEQ ID NO: 420229 - DNA, 660 bp, Staphylococcus aureus; identical to SEQ ID NO: 406400

SEQ ID NO: 420230 - DNA, 1311 bp, Staphylococcus aureus
atgactaaacctatagtagctattgtaggtaggcctaatgtaggtaaatctacaatttttaatagaatagttggagaacgtgtttcgattgtggaagacacgccaggtgtaacacgagatcgtatttattcttcaggtgaatggttaacacatgatttcaatattattgatacaggtggtattgaaattggtgatgcaccattccaaacacaaattagagcgcaggcagaaatcgccatagatgaagcggatgttattatttttatggttaacgtgcgtgaaggattgacacaaagcgatgaaatggtcgctcaaattttatacaaatctaaaaaaccggtcgtattagcggttaacaaagtagataatatggaaatgcgtacagacgtatatgatttctattcattaggatttggtgaaccgtatccgatatcagggtcacatggtttaggtcttggtgacttgttagatgcagttgtttctcattttggtgaagaggaagaagatccttatgatgaagatacaattcgactatccattattggacgaccaaacgtaggtaaatcaagtttagtaaatgctattttaggtgaagatcgcgttatcgtttctaatgttgcagggacaacgagagacgctattgatacagagtatagttatgatggacaagattatgttttaatcgatactgctggtatgcgtaaaaaaggaaaagtatatgaatcaactgagaaatattcagtattaagagctttaaaagcgattgaacgttcaaatgttgttttagtggtcgtagatgcagaacaaggcatcattgaacaagataaacgtgttgcaggatatgcacatgaacaaggtaaagcagtcgtgattgtcgtaaataaatgggatactgtggaaaaagatagtaaaacgatgaagaaatttgaagatgaagtacgtaaagaattccaatttttagattatgcacaaattgcttttgtgtctgctaaagaacgcacaagattacgtacattattcccttacatcaatgaagcaagtgaaaaccataaaaaacgtgttcaaagttcaactttaaatgaagttgttactgatgcaatttccatgaaccctacaccaacagacaaaggtagacgtttgaatgtcttttatgcaacacaagttgctatagaatcaccgacatttgttgtatttgttaatgatgtagaattaatgcatttttcttataaacgctatttagagaatcaaatccgtgccgcttttggttttgaaggtacaccaattcatattatagctcgaaagagaaattaa

SEQ ID NO: 420231 - DNA, 999 bp, Staphylococcus aureus; identical to SEQ ID NO: 417108

SEQ ID NO: 420232 - DNA, 273 bp, Staphylococcus aureus; identical to SEQ ID NO: 406404

SEQ ID NO: 420233 - DNA, 573 bp, Staphylococcus aureus; identical to SEQ ID NO: 414740

SEQ ID NO: 420234 - DNA, 726 bp, Staphylococcus aureus; identical to SEQ ID NO: 417111

SEQ ID NO: 420235 - DNA, 960 bp, Staphylococcus aureus; identical to SEQ ID NO: 417112

SEQ ID NO: 420236 - DNA, 450 bp, Staphylococcus aureus; identical to SEQ ID NO: 417113

SEQ ID NO: 420237 - DNA, 201 bp, Staphylococcus aureus; identical to SEQ ID NO: 406409

SEQ ID NO: 420238 - DNA, 318 bp, Staphylococcus aureus; identical to SEQ ID NO: 410927

SEQ ID NO: 420239 - DNA, 201 bp, Staphylococcus aureus; identical to SEQ ID NO: 413950

SEQ ID NO: 420240 - DNA, 480 bp, Staphylococcus aureus
ttgtttaattatgctttgttattctttttatttctacgtaataacgctaaacctagaatgctgaataatccgccgaacaacatacctttgtttgttgattcttctccacctgtttcaggtagttcagatttcttagattgtgcttttttagttggtgccactgctttaaccttttcattgatttcaataacaggtgttactaccttaccttgttccactggtttagaaggctttttaggttcttctttggcaggtggtactggtttaccaggttcagctggcacctctggcgttggtggtgttggtgtttccggctcacttggtacctctggtgttggcggtgttggtgtttccggctcacttggtacttctggtgtcggtggtgttggtgtttccggctcacttggtacttctggtgttggtggtgttggtggtgttggtggtgttggcggcgttgtatcttcttcaatcgtttgttga

SEQ ID NO: 420241 - DNA, 1023 bp, Staphylococcus aureus
atgagtaaaagacagaaagaatttcatgacagcttagcaaacgaaaaaacaagagtaagactttataaatctggaaaaaattgggtgaaatccggaattaaagaaatagaaatgttcaaaataatgggactaccatttattagtcatagtatagtgagtcaagataatcaaagcattagtaaaaaaatgactggatacggactgaaaacgacggcagttattggtggtgcattcacggtaaacatgttgcatgaccagcaagcttttgcggcttctgatgcaccattaacatctgaattaaatacacaaagtgaaacagtaggtaatcaaaactcaacgacaatcgatgcatcaacatcaacagccgattccacaagcgtaacgaaaaatagtagttcggtacaaacatcaaatagtgacacagtctcaagtgaaaagtctgagaatgtcacttcgacaactaatagtacaagcaatcaacaagaaaaattgacatctacatcagaatcaacatcctcaaagaatactacatcaagttctgatactaaatctgtagcttcaacttcaagtacagaacaaccaattaatacatcaacaaatcaaagtactgcatcaaataacacttcacaaagcacaacgccatcttcagccaacttaaacaaaactagcacaacgtcaactagcaccgcaccagtaaaacttcgaactttcagtcgcttagctatgtcaacatttgcgtcagcagcgacgacaaccgcattaactgctaatacaattacagttaataaagataacttaaaacaatatatgacaacttcaggtaatgccacttatgatcaaagtaccggtattgtgacgttaacgcaagatacttacagtcaaaaaggtgccattacattaggaacacgtattgactctaataagagttttcatttttctggaaaagtaaatttaggtaacaaatatgaagggcatggaatggtggagatggtatcggttttgccttttcaccaggtgtattag

SEQ ID NO: 420242 - DNA, 807 bp, Staphylococcus aureus
atggaaataattacttttgctgctataaagggcggcgttggaaaaacaacattatcttataacttttcggaatatttagcttctgtaggaaaaaaagttcttcttattgatatggatcaccaatgtaatctatctcaactattaaatgtgtatgagcaagaaaatacggtattatcaatttttaataaaattgatgggcttaatataaacgaagaagtaaaaattcataaagttaaaacaaatatagatttaattagtggttttttaagattagatgagtatgaaagagtaatgagtacagctgatggtaaagatatgcaattatatatgtggttagatgataactacgataaatataatattgaaaagtatgattatataattatagatacacacccagattttagtacatcaacaagaaatgcaatagcagttagtcacaaagttatttctccaaataaacctagtggttttagtgatgattcaaattctaacattgaatacagaatagataagttgaaaaatgatttaattgatttcagaacaagagagagttatgtaacagctaaattatattatgtcggcaatatggttaagcataatactaaatcatctaatcattttattgaagaaatgaattcgaataataaatatataacatattttcctgataaagaattaattactaaaagtgtaatggaaaaaaaaccaatagttgatttttcgaaagataaaaatatacttagtaaaaacagaacgttctttaaggactttgtaaaaagctgtgaagtgattaaaaaaatgtaa

SEQ ID NO: 420243 - DNA, 243 bp, Staphylococcus aureus
atggcttttaataagagagaaaacaataaaggaaaagatattaatacagcattagaagaagcaaagtcaccagaatttaatgctagaagttttggtatattaaaacgaaacaacaaagaaaaaaaagagaggtttcaatttacgttagaaccatctgtaagaaagaaaatagagcgattagcaaatgaaaatggatatgcatcatcgtcagaatttataaatgagctaattaagaatatatag

SEQ ID NO: 420244 - DNA, 297 bp, Staphylococcus aureus
atgatgactgtatatattgcaaaacaaaatgatggaactatcttatcgaaagatatagatgttagcttggtaattcaagatgttattgaacagagaatagaaaactttgaaaggtattataatcactataaagagaatttggaaattaactactatatttatatagggaatttaaataaactttataacaatattgaagattatactaacgaattatctttaatagatgatttttataaaacttataataatgaggattatgtagatagctctcaaatagtgagaatagaaacatag

SEQ ID NO: 420245 - DNA, 213 bp, Staphylococcus aureus
atgaatgaaaaagtcaaaaaatacgaaagtccctctcataaacatagacgcacagtgcagttgtataaaaacgtggacgacatagcaaacgaattgaaatttgatttaaaattaaatagtaagcaagaagtctatacgaaagctattgagttactttataaacaaataagaggcgaggaaattaacttgtctcaaaataaaactaacaaatag

SEQ ID NO: 420246 - DNA, 240 bp, Staphylococcus aureus
atgacggtattaaaaggtatatattatttactagtaataatctttttaggatcactattaatatttggatttgtagatattttcggaagtgctatcagcgagtttttttctggatttataaatgatatgactgctctttctttaaaatatccagtagcttggcatataggattgtttacatttagtatcattttattaataatcggtttaataatgcttttttcaacgactcgaccatag

SEQ ID NO: 420247 - DNA, 834 bp, Staphylococcus aureus
atggataaaaatatgtttaaaaaaattattttagcagcgtcaatttttactatttccttacctgtgattccttttgaaagtacattacaagcaaaagaatacagcgcagaagaaatcagaaaattaaaacaaaaatttgaggttccacctacagataaagagctttatacacacattacggataatgcaagaagtccttataattctgttggtacagtgtttgtcaaaggtagtacattagctaccggagttttaattggtaaaaatacaattgttactaattaccacgttgcaagagaagcagccaaaaacccatcgaatattatttttacacccgctcaaaatagagatgcagaaaaaaatgaattccctactccgtatggaaaatttgaagctgaagaaattaaagaatctccgtatggacaaggactcgatttagctataataaaattaaaaccaaacgaaaaaggggaatcagcgggagatttaattcaaccagctaatatacctgatcatattgatatacaaaaaggagacaaatattctttattaggatatccttataattattcagcttactctttatatcaaagtcagattgaaatgttcaatgattctcaatattttggatatactgaggtaggaaactctggatcaggtatatttaatttaaaaggagaattaataggtattcacagtggtaaaggcggacaacataatcttccaataggagtgtttttcaatagaaagataagttcactctattcggttgataatacttttggagacactttggggaacgatttgaaaaagagagcaaaattagataaataa

SEQ ID NO: 420248 - DNA, 417 bp, Staphylococcus aureus
atgtatgtggttaatacagaactacccgagcgatataaatacgaaactgactatagaaaaatacccagagagtaccttaatagcaatattcctaagggaagatataaagtcaaatgggctccatttaagacggtatctaaccaatataagttgttagacgaatatatagaagaacaaaacaaagttgatatgcttttgttatctgacgatcaattacagatacttaacgaaacagtttacttcaacagtatgaacaacattcttactgaattatgttattgggataacggctatatacattcaattcaatgctatataaataaaatggatattgtagaatgtgtcatggttattaccactaaaaatagtgaaactaaaattaaaattccgattaataatattattagtgttacttaa

SEQ ID NO: 420249 - DNA, 315 bp, Staphylococcus aureus
atgaagtgttatgcaattgaatattttattaaagaaaacgagaaagatgaaaagatatctgaagtaaaactataccgagcaaataagaatggaggaacatttaagtttgctagtaaacctatatattgtgatagagataagtttgtcgaaatgataaattctcgtgaagtatttactttaacgagaatggttaatagcggattatttagtgtttcatcgacatttaatataaccattaataatttaggttatattaattcgaaacaaaatagtagagaagattttttgccatatgtagaatttaaaattaaatag

SEQ ID NO: 420250 - DNA, 831 bp, Staphylococcus aureus
ttgaatgttctattagctttattattaatacctattttggttattatttattttaaattaagaaaaggtgcatacaacaacaaattaagattattatttcttctgtgtgctattattttgattttttgcttacctatattagctatattattctttttaggcggttcaatcttccatattttgtttgttcgcaaaaatattaagaatgatttaataaagaaatctgaaattactactacagtatgttttgtaatagcctgtttattatcttctctatttgttattgtcgtatcttataatgacattgacaataaagaaaaaatcaaacaaaccacgagcaaacctgtaagtaataacaaaaaagaaaatgatgatgaaaaagaacgtattaaccaagagaataaaaatcaaaaagtaattgaacaacccacttattatgatgatccacaaataaatcaacaggtatataacaatatcactaagtctatggagaaactaaacgctttgactggtcaagatattaaaaagtataaagtcaatactcaaatatataatcaagataaaaaacctaacgcaattgttacagttgatttaaaaggtgtagatgtaaaaggcgaaagtaaatatagagatgaagatttagaatataatgcaagtcatataagttcaaattttgtaggaaggaatgagatttcgggcggatttcatggctactttgaaaaattaattgttagatttaagaaagatgatagagaaataggtgaagctacagtaacttttgagggttctgattctttggatgagaaaatcaaattaataagatttgattaa

SEQ ID NO: 420251 - DNA, 744 bp, Staphylococcus aureus
atgaaaagaaaattattttttaaaattatttttgttttatctttagtattaagcattcattcaattaatgacagaactacagagttatcaaacattgctttagcagatgatgttaaaaattttaccgatttaactgaagcaactaactggggtaataagcttataaaacaagctaattacagttcaaaagacaaagaagctatttataattatacaaaatatagctcgcctataaatacgccattaaggtctagtcaaggtgatataagtaatttttctgcagatttacaagaaaaaatacttcgattagatagactcataagcaaatcaagtactagtgattctgtatatgtttatagattgctaaatctggactatttatccagtgttaaaggtttttcttctgaagatttggaattattatacaaaacagaaaatggtaagtataatgaagaattagttaaaaaacttaataatattatgaatagtaaaatttatactgagtacggttattctagcactcaattagttaaaggagctgcattagctggaagacctattgaattgaaattacaattaccaaaaggtactaaagctgcctatatcgattctaaaaatcttactgcatatcccggacaacaagaaatattgttgcctagaggaacagactacactataaatacagtcaaactttcagatgatcataaaagaattttaatcgaaggtatcgttttcaaaaagtaa

SEQ ID NO: 420252 - DNA, 207 bp, Staphylococcus aureus
atgaaaactattaaaatggttgctgatgaattgaatgtaactaaacaaactattgttaataatgctaaaaacttaaatatatcttttaaaaaagaaaatggaattaattatattaatgataatgattgtttaaaaattatagaaaagatcactaagaaagaaaggacaatgcaaaataaagaatcaataaaaaaaagaaagatttaa

SEQ ID NO: 420253 - DNA, 426 bp, Staphylococcus aureus
atgaaactaaaatcatttgttactgccactttagcattgggattattatcatcggtcggagctgcattacctagtcacgaagcatctgcagatagtaataacggctataaagaaatgacaatggatggttatcacactattccttacacgatttcagtagatggtattactgcattacatcgaacttactttgtttttccagaaaataaaaaggtactttatcaagaaattgacagtaaagtaaaaaatgaattagcttctcaacgtggtgttacaacagaaaaaattaataatgtgcaaacagcaacttatacacttactttgaatgatggtaataaaaaagtagtgaatctaaagaaaaatgacaacgctaaaaattcaattgatccaagtacaatcaaacaaatacaaattgtagttaaataa

SEQ ID NO: 420254 - DNA, 981 bp, Staphylococcus aureus
ttgattgaaaaaagtcaagcatgtcacgattcattgttagattctgtagggcaaacacctatggttcaacttcatcaactatttccgaaacatgaagtgtttgcaaagttagagtatatgaatcctggaggcagcatgaaagatcgacctgccaagtacatcattgaacatggtattaaacatggtttaatcactgagaatacacatttaattgaaagtacttctggtaatttaggcattgcgttggcaatgatagctaaaatcaagggattaaaactcacgtgtgttgttgatcctaaaatatcaccaacaaatttgaaaattattaaaagttatggtgccaatgtagaaatggttgaagaacctgatgcacatgggggttatttaatgactcgtattgcaaaggtgcaagaactgttagccactattgacgatgcatattggattaatcaatatgcgaatgagttaaattggcaatcccattatcatggtgcaggcacagagattgttgaaacaattaagcaacctatagattattttgtcgcgccagtcagcacgacaggtagcattatgggtatgagtagaaaaataaaagaagtgcatccaaacgcacaaattgttgctgttgatgcgaaagggtcagtcatttttggtgacaaacctattaatagagaattacctggtatcggtgctagtcgtgtacccgaaatattgaatagatcagaaattaatcaagtgatccatgtagatgattatcaatctgctttgggctgtcgaaaactgattgattatgaaggcatatttgctggaggttcaacaggttcgattattgcagcgattgagcagttgataacgtcaattgaagaaggtgcaacaattgtcacgattttaccagatcgaggcgatcgttacttagatttagtttattcagatacatggttagaaaaaatgaaatcaagacaaggagttaaatcagaatga

SEQ ID NO: 420255 - DNA, 1011 bp, Staphylococcus aureus
atgtcaaataattataagttgcatgtaaatcataaatattttattgacttaggaaaaaatttacttgttttagcaggatgtagtgggaattcaaataaacaatcatctgataacaaagataaggaaacaacttcaattaaacatgcaatgggtacaactgaaattaaagggaaaccaaagcgtgttgttacgctatatcaaggtgccactgacgtcgctgtatctttaggtgttaaacctgtaggtgctgtagaatcatggacacaaaaaccgaaattcgaatacataaaaaatgatttaaaagatactaagattgtaggtcaagaacctgcgcctaacttagaggaaatctctaaattaaaaccggacttaattgtcgcgtcaaaagttagaaatgaaaaagtttacgatcaattatctaaaatcgcaccaacagtttctactgatacagttttcaaattcaaagatacaactaagttaatggggaaagctttagggaaagaaaaagaagctgaagatttacttaaaaagtacgatgataaagtagctgcattccaaaaagatgcaaaagcaaagtataaagatgcatggccattgaaagcttcagttgttaacttccgtgctgatcatacaagaatttatgctggtggatatgctggtgaaatcttaaatgatttaggattcaaacgtaataaagacttacaaaaacaagttgataatggtaaagatattatccaacttacatctaaagaaagcattccattaatgaacgctgatcatatttttgtagtaaaatcagatccaaatgcgaaagatgctgcattagttaaaaaaactgaaagcgaatggacttcaagtaaagagtggaaaaatttagacgcagttaaaaacaaccaagtatctgatgatttagatgaaatcacttggaacttagctggcggatataaatcatcattaaaacttattgacgatttatatgaaaagttaaatattgaaaaacaatcaaaataa

SEQ ID NO: 420256 - DNA, 174 bp, Staphylococcus aureus
atgagtgcacttaattggtttatattatttgttattagcgctatgttaggttcttttgcagccagtattttagataatattatgcaaagcatttggatcccaagaatttgtggaggattggtagccgctttagtaggtggctttttatatcttttttttacaaatgaaaagtga

SEQ ID NO: 420257 - DNA, 726 bp, Staphylococcus aureus
ttgatactaaatattaaaaaacacgtaatgatacacttttgggaattattaaaaagaggacatctattattatggttattaattactatactaccccctttgttaatagcgtatctttccatatataaaagtatgccatttactattaaacatgtatcaaacttttattgtatgtttggcatgcttgccgcagtcttacatccactctattttgttaatagagactattctactaaagttgtatccttaattaataattctagaagaaatagacttcattacgtaatatctaattatatattatctatgctaatcgctcttttttatgcttctataggcataatactattggttatagttaaaaattttggtgtagaaggtgcattaactctcaaatttattatagggtttctatttaatataatactattagtcactacatattttgctttaggatatttaatggttttgtatggggtgcatatcggtattatatatactattttaacagcattattattattcattcacaatattttctcaaatatattagaaaccatacaaaatgaaaatgcaaagaaatttatagaaaatttaccaatatattattatcctgcattagttggttcaaaacctttttctttttcacagtatattataggtataataatcatatgtttaataacattatggatattcactaaaaatttgagaaatcgttattaa

SEQ ID NO: 420258 - DNA, 870 bp, Staphylococcus aureus
atgattttaaaatcaattagtaaatcttatggtaacgagcaagtattagatgaattatctttaacattaaataaaaatgaagttgtaggtttgataggaagaaatggagcaggtaaaagtactctaatgaaaataatcactcaactcgataaaagctttactggtagtattgaaggtaacgaagatattggttatttaatagaagaacccaaattatataataacaaaactggactagagcatctaaagtatttttcttcaatttataacaacaactttgatttaaaactgtacaatgaatttttacaaaacttacaaatgttagatgtattaaatagaaaagtaaaaaaatattcgctaggtatgaaacaaaagctaggaatacttattagcatattaaataacccgtcttttattattttagacgagcccacaaatagtatggatattgaaacttcgtctgaattattaaaagaattaaaaaaaatagctcaaaaacaaaatattggtatacttatatcaagtcataaattagaagatattgaaaatgtttgtgatagatttttatttttaaaagatggtaaaatttctagagaagaaactaaaagctcaaaaaatactaacgttattagcttggtttttatgaatgaatatgatttgcaaaaattttcaaacacgcaaaagtttggtcaaataatagctactgactctaatacattaaagttacaaactaagcacaacattaatgcgattttacaacacataaatgattccaacataaaaataagagatatattttcagaaaaacaaactttacgagatatctatatcaaagaaagtggaggttctaaaattgatactaaatattaa

SEQ ID NO: 420259 - DNA, 1098 bp, Staphylococcus aureus
atgaaaactttggttgcaataagttcagtaaaaagtaattctaactatcattacataggggacatgaactttggtacaatcaaaataccttttggaattatagaagtcggaaaaccaaaattcgatacatctctttctgaaaatgacgattatgttttgttacaagtcaaagcaatttcttgtaattatagagacaaggcgattttaatagaaaattataagaaatttaaaaaaaagaatatttcatacacgccttttggttctgaattttgtgccagtgttattagtaaagggtctaatgtttctgaatttgaagttggagaaacagtaattcctaattgttttttttctgacagtagagaaaatggaactgggatacccactaattttgcttctatgggatggttgaaaattcataaaaataaaataataacttcgcctaaaaatttaactcataatgaagctgctggtttttctctaggtgcacaaacagctacagcaatgatacgtaaaattaatattttaaatacaggtggaacacctttagtgtttagtgcgcgctctacgacatcaatttttttaattaaaactcttttagcacataatattactcctatatgtttaactacgacaaaatggagtaataaagaaaaaagacttatttatccaagtatcatagaaaaaattgataaacataagtatcaaacattagaaaagataaagaagaaaaatataactcatgttttcgaccccttttttgacatgaatatagaagatgctatgtattgtttggataactttggtacatacattacatgtggacttagggatcaacatcctcttttttctagtaatacaccattacaacacgaacctaaagttagaaatgctattagagatgctatttttaaaaatatcacaatcattgggaattgtttaggaaaatccaaagatttggaagatgctattaaattaattgaaaaaggttctttacatgttcctattgattgtatatatccaattgataagggaataaattttttaacacgaactttttgtgaaaaaaacaagttaggaaaatgtattttagaactataa

SEQ ID NO: 420260 - DNA, 2754 bp, Staphylococcus aureus
ttgaataagataaaagatgtaacaaatataatcactcgagctattgaagaaataaatattaatatgttggaaaataataatatacaaattaaaaaaataacagaagacatagacgatggagataatataaataatttaattgaacaatgcagacaatcgttaattgaaatcaatgtctggaaaatcacgtataaaacttttgtttatgaatttcatgagtttagaaaaaaaattaattatcctattagcactaactcgtctatagcgtataatcattatattaataatatatctgcagaaactctaatacattggtttaataaatatccatatttaagagagataattgaaaaaattattaataatatctgtgagttttcattaaaagtctgtcatgatttaataacggattggaatattcttatagaaaaaaaccttataaataaaggtgaaaaattgcaaaatattacttgcttggattcagatccacataataataataaagttggactatgttttgattttgaaaagtcaaaagttttatataaacctaaatctttaaaagtagatatgcttatttctgaaatatttgaaaatattttacagtttgaagagctgaacaaaattatacctgttgctacaagtatagatagaggagattatggatggcaacgttttattaatcgaaattatctcaataaagatgatcttcctaaagcattttacaatttaggtctatgttcgtctttatttactgctctaggtgctacagatttgcatgatgagaatataattttcaataacgaatatccatattttatcgatttggaaacatgtcttcagcctgaaattaaatatataaataattcattagtagatactatgctggataatattaaatcttctatagctagtacatctataattccttctaatataataagttatttacagcagatattagtaggtgcaattaatactccctaccctcaaaaaactaataaaaggcgtttttctttaaaaaattttggcactgatgctatggatatagccaaagaaaatgtaaccgtgaaccatttaaaatcttctataaaactaacagaaggtgaagcaagcaaccctttaccctatcaattcgactttttagaaggtttttcaaaaggttataaacgggtcttggaaaaatctgactcaataaaaaaacttttaaataatcattcttttacaagtagagtaataataaggcctaccgatcaatattacttagttcttgatgcaattatatacccagaaaatctaaaaagtgaaaaaaatgtcgataatattttagactacttaaagccaactaaattagttaaagatagaaaaattgctctggatttattaaaagaagaaaaaaaagctataaaacaaggagatatcccctttttttatacttataattctaagcataatttaaaaacacaaggttatacgacaggaaaagcttttgagttaactccagtagataatattaatgtgaaattaaacaatttatcaaataaaagaaagctattaaacttccaatttatagcagaaggtttttcatacatcaaactaaaagaggctgagtattttaacgaagataatatattacacttttctccgttatttaaaaatacacttaaaaagacaactatcaataatccatatcccattatagatttgttattagatttaagtataactactaattctgaaataaagaaaactggttggtttaatggaatgtatggaaacatgcctagtatgtataattctatgactaacttttctttacatgatacgggaggtgtgatttttctcttagaacatattaaagattttaggcaaaatcctagtttagttaagttggattttctaaactcagctaaactaggattacaagaactacaagaatatttttttaatgataaaacaagtaattatttctcgattatatctggaaaatcatctatagatttcatttttgattacaaaaacgaaaaatctgacaatttagaaaaagctggcttcgactgttgttttacaaaaaaaggtaatgatgtttttaatggtactccaggattaggattagttctatcctcttttccacttacttcgtcagatatattatttaaaattctaagtacaatggtttatgacggtaaaaatcacagtaaaaaaggaatagctcacggtgaattaggtattttatggtctaaatatcgtattaataaatttttgaaaagaaaagatacatgtaaaaaattgtttgaggaagttaaaaatattacctattctttaactgggtggtgttgtggcaatgcagggttactcatggttttagcagaaatgtgtacagaattaaacgtggaaaaacaatttttaaaatctattgctaaaaaggctataatactttctaataatgaaccaatagatttatcagtgtgtcatggtgcaagtggtgttttgcaatctttactattcacttatagagcaacaaatgatgagtggtatttatctttagctaataccttttggcaaaaagttttggatttatcaaaaaagaatggtttttatactggcgagaaaaatagagattatatactagggtactttttagggtggagtggttttgcagatagttgtttattactcgcccaatttaataataagaaaaaaccttggataccattgaatttaagctctagtatataccaagaaaatttatga

SEQ ID NO: 420261 - DNA, 2163 bp, Staphylococcus aureus
atggctaaattgaaaatatttaataaaaaaagagttccaccatctttacaaattgctcaaacagaatgcggattgtgttgtgtgaaaagtatactgaattattatgattttagtgtttctttaccagaacttagaaaaattaaagaaccaggaagagatggtttagggttaaaacagattaaaggtttgttggaatgttataatttcaaagtgaagaattttaaggttaaagataataaagctttcgatatgttgaattttccgttaatagccttttggaaaggctgtcattacgttgttttagagtcttataatgataaaaacgtagttattatggatccatcagtagggagaataaaaataagtactttagaatttaatgctaattttgatagatacgtgattttatgtactccaaatgataattttcaaaaacgtaatatttcaacggtatctaaatttaaaaaaacatatatttggccaaacaatatgataagtatatatgtaaaattagcacttttgagtgtgatagcaattactattacattgtcaattcccatagccacacaaaaattaatagactttagtctacaaactcaaaaatctttaatttttatagttattatcattattttctcaatgataatagcagtgttcttgtcatttttgagaaacttgtattctatacaaatgattttaaaatttaattggtttttaatgaatggtgcttttaaacgtttattatatttgcctgcaaaatacttcagcgttcgttctccaggagaaattacgtatagaattaatgcattaactcgcattcaagatattataggccctacattggtacgttctatcttagatttttttagtagttgcactttattaggttatgttttttttattaatccactaattgcaatattaattttaatctttttgttattgaattttatctttttagctattatgcaaaaacacattaacttttcaaaggacagagagttacatgaaggaagtagtgctcaaagtatccaactagatgctttagtatctataaatagtgttaagataggtggatacatgaaacgttacatagatgattgggctaacaggtatcaaaatttactgaaagctatggaaaaaagaatgaaattacaagatggtttggttggttcaatattgaacggctttcaaacttttgctccactgctaattttatctattaatatttatttatctcaagtgggatatatgactttaggacaggcgattgcagtacagtctgttgtttctatgttgttcacatatactaattctatatttactactatttctgaagctttgacggcaacgaaatatattgaattatcagaagatatttttgaataccctgaggagaatcgtattaatagcatgattcaaatgcagtcaggagatgtagaaattaagaatttgcactttagttacacaccagaaagccctttagcaataaaatctattaatttaagtataaaagagggtgacactatagctttagtgggcatgtcgggatcaggtaaaactacattaggtaaacttattagtactcttttcgaaccttctagtggcagcattttatatgggggtgtagagaaaacaaaatataacattgataatttaagatcatctattagttacataccacaagaagcataccttcataatagaacaattttggaaaatttgaagttgggttgtaactacaatgaatacgaaataatcaaacgttgccaatctatgccatttttaaactttattaatagcttgcctatgggatatagtacagtagtttctgaaatgggtgctaatttgtcaggaggtcaacgacaaagaatacatatagcaaaagttcttctgcaatctcctaaattattagttatggatgaagctacttcttcacttgataatgtgtcgcagtcacatgtatatgacgaactatcgagattaaaatgcaccaaaatcgtaattgctcatcgatttgctactgtatttaatgcagataaaatagttgttatggatcatggagaaattgttgaagttggcgcacataatgaattgttaaataaaaatggtttatatagaaaactatttaatgctgaatttaaaaaggagtgtggagtttga

SEQ ID NO: 420262 - DNA, 2898 bp, Staphylococcus aureus
atggttttattctacaagaaagaagtatatccagaactaaataaatcagattttaaagaacatattttaccattaaatgattttattgaagaattatctgaacctttttcagaatttatattagaagatagtgacttaattgagaaggaagaattgtatccttatcataatgcttgtagaataattgctgaaggtgtctggagacatacttgggatactaagctaaataaatatacattaaatcctagcgaatttaaaaaagcgacttgcgaattttattcgcaagtcgctttttcttatttgataagaagctttgctaaagatataaaattatttaaattaagtaatgattctaacacagattatgacatttacacaaaatatttgatagaaaataaatttcaggatttttcacaaacgtataatgtggtgtggggacgatgtttaaaattattaattaatagagcaaaatcgatagttaaaaccattgaattaataaatcaaaaccgtaatgaaattgaaagaatatttgatatacctaatagtcataagatagtatcaattaatacaagtggtgatacgcataataacggttcttctgtttcagtagtaaattttgagaaagaattaaagcttatttataagcctagacctatttcaggagaagttggatattcaaaattaatagaaaagttgaattgcttagttagttctaaattttcatctttaaaggttttagatttagggggatttggtttcacttcttatatcgaaaaaaatgaaatgaacaaaaatatgaaagaagccggtagaattgctgctttaatgtattttttaaatagttctgatatgcattatagcaatatttactggactaataacggccctattcctattgatttagaaactttatttcaccctaaaagaatagctgacagtaatttagaaaattttaataatgcttattataaaattgagaagtctgtatatggaacaggaatccttcctatacatttaactaaaaaatcgagtgatgtttcggtagatgtaggttttactggagtaagagacgaaaacagcaactctccctttaaaacttttaatattgaagatggtttcacttcaaatataaaagtagtttggcaaaagcaaattgagatagataattctttgtataatgatgaaaattatgaaaaatttatatatagcaattgtaaggatttaattgaaggttttacagaaatatatatgattattttgaataataaaaactattttataaactgtgttttagaaacatttgataattctaaattaaggtatatacataacatgacgtataggtacgaacaaattttacgaatacttacggactccgaaccatcaaaaaatatagatttagctcatatgttgctttctcgtattggaattttaagtatgacaagtaataaaaatattgtttcatcagagtgtacacagctttggaatggagatatcccttatttttctataagttttgatcaaaaagcagtagaatcagaaaataaatttgtcacttggttacctaaatctcccaaagaagaatttatgataaaaatgaattcgatttctttagaagacttaaatagacaaattgagataataaaattagcgtttgttgctaaattagcagatcctcatagagacgaacaaattttagaaagtgaaattaatgaggacgtttatatagataaaaaaactatagagcattctatctcatattttatgaattcattgactgaaagaataatgaatgaccggtataaccatttgcctaaaacttggataggacctgtctctcaatatggtaagggatggactccaggagttttaggctatgatttatatagtggcagaactggcccctttctagctttattattatctggaaaacaattaaaaaaccaaaaggtaatagatgttgcttatgagttttttgataaagttactaaaatatttgaggataaaacatacgacttaagaaatttacttatgtctgggataggagctttttctggaatgtcaggcattatatggagcctttatactgctggaaagatcactgaaaattctaaatggaaaaatacagctttaaaagtctttgatttaattgatgaagaaataaagaaagaagagaaaggcgacttttttgatatgatttcagggagtagcggagcaattattatgagatataaaatccaagaagattactcgttatctgaaaatttcataaaagaaaaggttaaagaagcttataatattataaataataagaaaaatctatcctctggattagctcatggaataagccagattatgtatttttttgcaattatttataaaaaacaaaagctagtatatataagaagaataatagaagatattcataaaattatcaaatcaaattttactaatgtgcaaaatttaattgaaatttataggtcggaagacaaaaataatatttcatcgtcttggtgcaatggtttatccggactactagtttcatattacgaaggatataaagctggaattttttcaaaagatgaagttatagatataattaagcaaattgaaattatacctttatctgtagttccgatactctgtcatggtagtttaggtgtttatgattctttgaaatatgtaagcaaagactttgaaaaagaaacacgttatttattaatgaaattagaaaaaactacttgtagtcctgcgtatatagtaaattactttaaagaaggaagaggtagatatacacttagcccaggactaatgacaggtaaaaccggagctctattacatttatgtaaattgctagatggtgaaattgatgtctctcccctaacttttgaggtgtaa

SEQ ID NO: 420263 - DNA, 204 bp, Staphylococcus aureus
atgaaaaatgaattaggtaagtttttagaagaaaacgaattagagttaggtaaattttcagaatcagacatgctagaaattactgatgatgaagtatatgcagctggaacacctttagccttattgggtggagctgccaccggggtgataggttatatttctaaccaaacatgtccaacaactgcttgtacacgcgcttgctag

SEQ ID NO: 420264 - DNA, 189 bp, Staphylococcus aureus
atgaaaagttcttttttagaaaaagatatagaagaacaagtgacatggttcgaggaagtttcagaacaagaatttgacgatgatatttttggagcttgtagtacaaacactttttctttgagtgactattggggtaataaaggaaattggtgtactgctactcacgaatgtatgtcttggtgtaaataa

SEQ ID NO: 420265 - DNA, 1143 bp, Staphylococcus aureus
atgaatttaagtgaagtttatataaaaaatttcagaaatattaaagaagttactttaagcttatcaaaatatagtgtaatacttggtaagaataacgaaggcaaaacgaacattatgaaagcgatatatagaggatggaatataattaatgatttttctacacactatccaaaagcgattagtgcaatgattaaaagagatggatttagaattaaatataatagcattcctaaatcaagtaaagaaatagtagaagatgacattactctagttccaagttttaagacaaaagatattacaataggtttttattttgatttaacttctgaagagaaagtaagtttatataatttactgaaaagtaaaaccgtgattacggataaaatttatatcgaagtaaaatacgatgaatatttacgatataaatgtaaagttaaactaaatatagatggtaggttcttaaaatcttctgaaaatatacttacaagcgttttatttataattgaaaaatttgatattgattatatcccttcaattagaaccgaagaaactgcaactgagattataaaggatgccgtcaatgaaagattaaacgatttaacacttagagatgattataataaagcaattggtttagtaaatgaattgcaggatcaggaactaaaaaaattatctgaacaaattgaaccggttataaaaagatatttaaaaaatataaaatctatagaagttaaatctatgaaaagcaccctaccaaaaattaattatggttatttaagagatgttgatatatatatagatgatggaaatttaacaagtattaaaaataaaggggatggaataaaaagtttgatagctttatctatattgcaaacgagcgaagctaataatagattattaatgatcgatgagccagaagctcatttacattcaggtgcaataagagagcttaaaaataaaattaaaaacgatacattaaatcaccaagcattaatatgttctcatcaccaaattttggtagataggaacaaacttactaataataaaatactaaataaaggagaactaatagataacattgatatacgagacattagaagagaactaggggtttcgtggttctgttgcaaagttaaaaaataa

SEQ ID NO: 420266 - DNA, 1809 bp, Staphylococcus aureus
atgagtgctaattttgatgatcaatttaattctcttaatagtacgcttgaaacgaactcaaataatacaacgttagctctaaatcaattacaacaaaatgtgagtacacaatttagtcaaatgcagtctacaaataacgcaaagttattagaagtgaaaagtgaattacttcaatatactaattctaattacaatcaagctaatgatagaattaatcaaattaatcaaaaagttgatgattttaaagttggtgcagttaatttactaaaaggaacagcaaattatacgacgccttttaatcattctattatagaaaattcagggagaattgtagacggttacttatattcttctgattttagtagtagcgccggccgtttatggcaaacgaatcaagttgttaaattactgccgaataccgattatgtacttagctatgatgctttttcaaaatcaaatatcgggacagcgtatacacctattgaaattttaagtgaggatggcagggatttagtaccaaaacagtatcttcatacgatagatacgtataaacatgttactaatactaaacaacgaatgacatttaaattcaacacaggtaataatatatatttccgctttcatttcacgtctgaaagtgttaattctgttgtatacattggtaaaatccaattggaaaaaggtacaattgcaactgattggtcaccgaatataaaagatgttgaggcggaaataaaggttgttgcggatagtattactacaaaagcacttgaagcggttcgcggagatatccaatatttaagaacaaatattcttgatacgaatacaattgaggctaatatgctaaaggttgataatgcttttgttaacaagctattgtcaaataatattttagttaatcgattaacagctaattcgatattatcaaatgtgattaaaacaaaaactttggaatcagtttatcaaaatgtgggtgagttgaggtctcgattaattactacaaatagtattagtgcaaatgcgattaacgttgatagtgcattaatccataaactagtgtctgatgatcaatttgttaatattttgacagcaagaagcgcatttgtagattggattaaagcaattgacattgatgcaggacgtattcgaggtggtttgattagatctagaaacgaacgtatgttttgggatttagagcataataattttgatttttatgatggctcagttactaactattacggctcttctagaatagtgtttcatactacggataacagtatttatcaaggttacaatggcacgtgtgcatttttgaattttactaaatcagctggggataattacccatctgtagtaatgggaactagtggggatttaattgctagttcaactacagggcatttttcaggtataaaatgtcacacagcaaaagcggataaggtttataatttatcaaaagttgatgtcatagctgaccaagtattattcgacagtcatgggggtagtgctgacactggcggttggactttagaaaatttcagagtaccttctgtgcatagtaatgtcagagcgttttatggtaacaatcctgctaattataaatatgaattaggacaaagagaatataaattcagaactttatggactgaaggtataaatgacacgttaagagtggtaacttatcccggtacaataacagggataatgagtgataacgagagatatggtattcaaatagctaattatgatgtctacgttttaattaatgggcgtagagtatcattaaaacaattagttgatcgttaa

SEQ ID NO: 420267 - DNA, 417 bp, Staphylococcus aureus
atggatttatttgcaggtattaaaaagttagatcatcgtggtaatgaagttaacttccctgattttaatcatattgaaaatggtcaagtagctactggttggttacgcgtatcacatcgtgaattagatcaagaaaaatccacaatcgcgcaaccttggcataaacatgaaacagaattaaagttgtcacaagatgagattgtacctgttgaaatcgaattgttaccttcaggcacgctatttaaacaaggcgaaacattggaagttgttgtaaaaggtagtgaaattgtaattggtaatagtacccctggcatgaaaacacgttatgaacatgaagaaaccgtaaataaaggcatgcacatgatttatactggtggtaaatatgattcacaattaatcattcctatcgttaattga

SEQ ID NO: 420268 - DNA, 537 bp, Staphylococcus aureus
atgttagtgattatgctgatattactttgttttaccttttataatatcaactactatttattccaattaagcgaccttgatgccttaccgtcattagatcgaatagcttctatttttgaagaggggtttgcatcattaaatgatagtggatctgagcgaagtgttgtatggataaatgccatttcagtaattaaatatacactaggttttggtgttggcttagtggattatgtacatattggctcgcaaattaatggtattttacttgttgcccataatacatatttgcagatttttgcggaatggggcattttattcggtgcattatttatcatatttatgctttatttactgtttgaattatttagatttaacatttctgggaaaaatgtaacagcaattgttgtaatgttgacgatgctgatttactttttaacagtatcgtttaataactcaagatatgtcgcatttattttaggaattatcgtctttattgttcaatatgaaaagatggaaagggatcgtaatgaagagtga

SEQ ID NO: 420269 - DNA, 207 bp, Staphylococcus aureus
atgttaaaaaatatgtatgtcttatctaaattagttttaaagaataatattcctgatatcgtaattggaataattagaatcatcatcattgctgctaaaatattaatatttaaaccaattgcagataatacaccgaaaactaataaattagcaactaaactaaggataagatatttcataaaatcacctcgtcgttgtacaccataa

SEQ ID NO: 420270 - DNA, 219 bp, Staphylococcus aureus
atgaacgcaagattactttgtactgcatttaatcaaaataaattagttatgttaaaagaattgattgaaagtactgaagatagattgattattttctatcagtacaatttagaaaaagaagcaattgaaaatatagtggatgaattaagtaaacctatatcttatatcaacggtgagatagtagataaaaatcatatgagaattgtaaaaacagtgtga

SEQ ID NO: 420271 - DNA, 561 bp, Staphylococcus aureus
atgaaaaagaatagtaaattttatattgataaagtgattgaattttttataattttgatcgcggcaaattttgcaaattatttctctatattaaagttctttaaaattacaataccttttgatcagtatttttcagttgatttagcaattaatatcattttgatacagatattttataaattcttatcttcattactccatagaacacatattaaagttaatttttataaaaatgagtcttctttatctgatgaagtaataaagtataaatttaatagtgatgttacaactattttttttaatgtaaaattaacaggtaaaagttcagtgatttcgaaatataccattgattttaatctcccgtatagtgtatctgcacaagtagataataaaaatgataaaagtattaaagttaatagaaaaaaagataggatttctatagctttaaaagatcttgtaaataataagaattatttaaatggtgatattataccgttgaattttaaagtgattaagtcagaaaatgagaatttcttaaatttttttgataaatattactaa

SEQ ID NO: 420272 - DNA, 297 bp, Staphylococcus aureus
atggcgactgagaaagatgtaaatgatttatttttaaatcatgtgaattcaaatgatgttaaaactagaaagatgatgggagaatatattatttattatgatggtgtggttataggtggtttgtatgataatagattattggtcaaggcgactaaaagtgcacgtcatcaatttcaagataatacattagtatcgccgtatcctggtgccaaggaaatgattttaattccacactttgtcaaagtaacaaatctcactgatttatttgagctcataaaaaatgatttgcaaaagtga

SEQ ID NO: 420273 - DNA, 351 bp, Staphylococcus aureus; identical to SEQ ID NO: 414496

SEQ ID NO: 420274 - DNA, 390 bp, Staphylococcus aureus; identical to SEQ ID NO: 409670

SEQ ID NO: 420275 - DNA, 558 bp, Staphylococcus aureus
gtgaccgatggattcaaaaaaagatggccaattaatataggttttattggtaatgttagatttaatgagataaatcaaaaattgataaaggaactggcaaatgattcaaggttccatatgcaatattttggaacagggtcggaaaaattagaagtctttgctcgagaaaattttattaataatattacattttctggcggctttgacttgaaagaaacaccgaaatatttaaatgaaattgatatacttaataatttgtttggtaatcaaaatattgctttagatactgctttatccataagaatgtattatgcgttgtttttaaacaaacctattattacaacagatgatacattcaccgctacagaagctaataaattcggactgggttttagtattaatccagaaaatttaaaaggtattggtgatgaattgatggattggtataacaatttggatgtaatggacattaatcataagagagaagcttatagaaacgatgtaattgaaaataataaacagttctatcaagagataggcaggatatttaatgaataa

SEQ ID NO: 420276 - DNA, 1638 bp, Staphylococcus aureus
atgtcttatagcattggaattgattatggaactgcttcaggccgtgtgtttttaattaatacaactaacggtcaagtagtatcaaaatttgtgaaaccatatacacatggtgtcattgagagtgaattaaatggtttaaaaataccacatacatatgcacttcaaaatagtaatgattatttagaaattatggaagaaggaatatcatatatagtacgtgaatcaaaaatagatccagtcaatatagtaggtattggtatagactttacttcatctactattgtttttactgacgaaaaccttaacccggtacataatttaaaacaatttaaaaacaatccacatgcgtatgtgaaactttggaaacatcatggtgcatataaagaggcagagaaattatatcaaactgctattgaaaataataataagtggttaggccattatggatataatgttagtagtgaatggatgattcccaaaataatggaggtcatgaatcgagcaccagaaattatggaaaaaacggcttatattatggaagcgggcgattggattgtaaataaattaactaataaaaatgtacgctcgaattgtggattaggtttcaaagcattttgggaagaagaaacagggtttcattatgatttatttgataaaatagaccccaaattatcaaaagtaattcaagataaagtatctgcaccggttgttaatattggtgaagcagtagggaaactggacgataaaatggcacagaaattaggattatcaaaagagactatggtaagtccttttattattgatgcccatgctagtttattaggtattgggtctgaaaaagataaagaaatgactatggtgatgggaacaagtacatgccatcttatgttaaatgaaaagcaacatcaagtgccaggtatatcaggttctgtaaaaggagcaattattccagaattatttgcttatgaagcgggacaatcagcagtaggtgatttgtttgagtatgtcgctaagcaagcaccaaagtcatatgtagatgaagcagtaaatagaaatatgactgtatttgaattaatgaatgaaaagataaaacatcaaatgccaggtgaaagtgggctcattgctcttgattggcataatggaaatcgaagtgtattaagtgatagtaatttaacaggttgtatctttggattaactttacaaactaagcatgaggatatttatagagcatatttagaagctacagcatttggtactaagatgattatgcaacagtatcaagattggcatatggaagtagaaaaagtatttgcatgtggcggtatacctaaaaagaatgctgttatgatggatatctatgcgaatgtactgaacaaaaaactaattgttatggatagtgagtatgcaccagcaataggcgcagcaatattaggtgcagtcagtggtggcgcacataattcaattaatgatgcagttgatgctatgaaagagccaattttatacgaaattaatccagaagcggaaaaagtacaaagatatgaaacattatttaaagcttataaggctttacatgatatccatggatataaaaaagctaatataatgaaagatatccagagtttaagagttgagggataa

SEQ ID NO: 420277 - DNA, 1488 bp, Staphylococcus aureus
ttgtgtaatttcgcaagagaattctattttgaattagacgattttcaaaaatttattagtgcttttttatttctatactacaaggaagataatgaaaatttttacgaccaattttttataatgggtggtcgtggtgttggtaagaatggccttgtatctgtatgggcacactattttttaagtgactataatccaattaatgagtatgatatttctattgtagctaacactgaaaagcaagctaaaacctcatttatggagatatacaattgtatagaacgtaataatctagatgaatattttagaaaaaatttaaaagaaataacaggaagagcaaccaacagtaaactgcaataccatacttctgcgccaaaaagtaaagatggattaaaagatggtatggttgtttatgatgaaattcatagaatggaaggctattacgttataaacgtttttggttctggattaggtaaaaaagataatgctcgagaaatctttataggttctaatggacatgttagaggtggcgtcattgatgatatgttagaaagagctagtaaaattttaagtggggaagtactagatgataacatgttttgtttcttgtgtaagatagatgatgctaaagaagcagatgatccaaatgcatgggaaaaagctaacccacaattttctgaaccgatgacaccatatgctaaaagattatttaaacgagtgaagaaagaacatcaaaagctttctaacaatttaaaatatcgagctgaattcatggcgaaacgaatgaattttccagaaacagacttgactgaatctgtagcaactgcagatgaaatatatcatgcaaatgaagatatacctgacctcttacataaaacatgtgtaggaggtttagattttgggtctgtccgtgactttactgctgtcggtttattatttagaaaaggtgatgattatttttggttaacacattcatttgctagaaaagaatacttagataaagcaaacttgaaaccacctatacaagaatgggctgaaaaaggattattaacaattgttgatgaacctactatagatccaaggcatgttgttaactggtttgttaagatgcgagaattatataacattgaaataattgttgctgatatgtataagttggatattcttcgtccgttattagaagcggaaggatttgaagtgtatggaataagaagaccatcgtctattcatggtttgcttgcgccacgtgttgaatcactatttgctaataataatctttattggggaatcaatccattaatgaattggtatacgtttaatgtatttaagaaagttactaaagatggctcgattcaatatttgaaaaaagatgagcatcgtagaaaaactgatggttttcaagcattaattcatgccttatataaagcgtcagaaatactcacggatgacattgatttctttttagatgaaattgaatttacaaattattag

SEQ ID NO: 420278 - DNA, 999 bp, Staphylococcus aureus
atgaccgaaaagattaataaaaaagacaattaccatctcatcttcgcgttaatctttttagccatcgtttcagtggtaagtatgatgattggttcaagctttataccattacaacgcgtactgatgtactttataaatccaaatgacagtatagatcaattcactttagaagtattacgcttacctcgcattacacttgcgatattagctggtgccgcactagggatgagtggtttaatgttacaaaatgtattgaaaaatccaattgcctcaccagatattatcggaatcacaggtggtgctagcttaagtgctgttgtctttattgcatttttcagccatttaacgatacatttacttccactatttgcagtattaggtggcgcagttgcaatgatgatactattagtgtttcaaacgaaaggacaaatacgcccgacaacactcataatcatcggtatttcgatgcaaacgttgtttattgcgcttgtccaaggattactcattacaacgaagcaattatctgctgccaaagcttatacatggctagtcggaagtctttacggtgctacgtttaaagatacaatcattttgggtatggttattttagctgttgtgccgttgttatttcttgttataccaaaaatgaaaatatctatacttgatgaccctgtagcgattggcttaggcttacatgtacaacgtatgaaactaatccaattaatcacttctactatactcgtatctatggcaatcagtttagtaggtaacattgggtttgtcggtttaatcgcaccacatatcgcgaaaacaatcgttcgcggaagttatgctaaaaagttactaatgtcagcaatgattggtgccatatcaattgttattgcagacttaattgggcgtaccttattcttacctaaagaagtgccagcaggtgtatttattgctgcttttggtgccccattcttcatatacttattattaaccgtgaaaaagttataa

SEQ ID NO: 420279 - DNA, 576 bp, Staphylococcus aureus
atgtctgaagaagaaataaaaaaatggattcaaagtaaattaaatgagaatttcaaagatatcaaaagagatgcattagatttatttattgagttgacaggtattaactttaatattgtctcacaagagatagaaaagttgattttatttttaggcgatagaccaacaatcaataagcaggatgttaaccaaattattaatagaagtttagagcaaaatgtatttttactgactgaatacattcaaaaaagaaagaaagaacaagcaattcatttagtaaaagatttaataactatgaaagaagaacctattaaattacttgcactaattacaagtaattaccgattattttatcaatgtaagattttgagtcaaaaaggatatagtggacagcaaattgctaaaacaataggcgtacatccatacagagtaaaattagcgttaggacaagtaagacattatcaacttgatgaattattgaatattatagatgcttgtgcggaaactgattataaacttaaatcatcatatatggataaacagttaatactggaattattcattctatctttataa

SEQ ID NO: 420280 - DNA, 354 bp, Staphylococcus aureus
atgagcgacaatattgtagctatttatggagatgtgcctgaattggttgaaaaacaaagtgcagaaatcatatcacaatttttgaaaattgatagagatgactttaactttgtgaaatataatttatacgaaacagagattgcaccaattgttgaagaaacattaacattgcctttcttttcagataaaaaagcaattttggttaaaaatgcatatatatttacaggtgaaaaatcgccaaaagatatggctcacaatgtagatcaattaatagaatttattgaaaaatatgatggcgaaaatttgattgtctttgagatatatcaaaataaaaaaaatagagcaaatgtctga

SEQ ID NO: 420281 - DNA, 510 bp, Staphylococcus aureus
gtgtataagagacagaatagaacaaaagatatttctcctaaactttggtatgattttaattatttaataaaactttttactgacaccacttcttttaaatttaactcacaaaaaatagatgtccaaagtcctggtatgattgagtttattagccaacttccacacgactttataaaagaaatttattcaaataaagaggaaattttgaatttaactatgtggctttctcatttcgctatattttgtcagattttcaagggaaaagatgtaaaatctatagacggtgtagaattccaagaaaaagtaccagaagatattaaaaaattgagaaatgatgccgaaagagagcgattaaaggttgaaatagcaagatacaaattagataggatgtatatagaacaatcaacatgtgattttaaacaaaggtcttcaaacgttcccgaaaagtttgaaagtgaaattaaagacgcaaatgaagacgaagccaataatgattttgataatagataa

SEQ ID NO: 420282 - DNA, 657 bp, Staphylococcus aureus
atggtgcttcctttatgggcacaacacaaagttaaatctaactatgagaaatattcacaagttagatcaactagtggtaaaacgggtcgtgaagttgcattagaaattttacatgcaaacggtatttatgatgtcgaagttgttaaaggtgaaggattcttaacagatcattacgatcctaaaaagaaagttgtttcactatctcctgcaaactatgacagaccatcagttgctggaactgcaattgcagcccacgaagttggtcatgccattcaagatcaccaaggatactggttcttaagattcagagcagcattagtacctgttgcaaacctagggagttcattaagttatatgatcatcatgttaggtattatcttaacagcgataggtagtgcatttggttcaactgctttatggattggtgctggtttaatgtcattagcggtattattctcaattgttacgttaccagttgagtttgatgcgagttcaagagcgatgaaacaaattacggcattgaacattgtaaatgaaaaggaatacaaacatgcgcgtaaagtattatctgcagcagcaatgacttatgttgcagcaactgctgtcgctgtagcagagcttgtacgtattattttgattgcgcgttcaagtgattaa

SEQ ID NO: 420283 - DNA, 1068 bp, Staphylococcus aureus
atgatatatagaaataatttcattgtgttcgttttatcattttttattagtattatattgtattcatcgcacgtattactcccatttatgtttggtcctattatcgcatcaatcatttgtgtgaaagttttcaaacttgatattaaatggccattcttacttagtgaattagggattgtactattaggtgtgcaaatcggatcaacgtttacgaaaaatgtcgttatggatattaaagacaattggctttcgattattgttgtatctatttcgatattattaattgcattagtaatggcatttattttcaaaaaaattgcacgtattaatacagaaacagctattttaagtgttataccaggagcactaacacaaatgctggtcatggctgaacaagacaaacgtgctaatttgttagtagttagcttaacgcaaacatcacgaattatatttgttgttgttttagtaccgttcatttcatatttttttcatgatggtaacatgcatgcgaatgctaagttaacaaaagtcttgcctttatcacaagtattaaacatagggcaaatagttattttagtgatagctatctttatagtttatctaattatgtctaaaataaagtttccaacatttcaattattagcaccactcattgtattaattgtttggaatttttctacaggtttaacatttacactagatcattggttgttgaacatggcacaactaatatatatgattagaattggagttcaaatagcgcatttattgtcagatttaaaaggtagactagcaatcgcaattacaattcaaaatattatgttgataattggtgcgctaatcatggtttatgtcatacatttctttgataataatcctataaatgaattgtttcttggtgcagcaccaggaggggttaatcagatagttttagttgcattagctactggtgccgatgttgctatgattacgagttatcatattttccgaatctttttcatcctatttattattgcaccaggaattaattactttttaaaatatcgttcgaataagcgtgaagattag

SEQ ID NO: 420284 - DNA, 999 bp, Staphylococcus aureus
atgccaattgataaaaacagcacttatagactacttggcaatcgtcaaaatttactatcactttggaatgttaatgatcgaattagagtgaatcatgatgacaacttaccatatggatttaaaattaactctgaacacaaagacaataaagttcgttggattcattctaaaaataccatccattatccaagtgcacatattacaaataaggtcttttccaataaagaattaaaatctccattagataaagaacaagcaatgttgcaagggattgtttctaacaatactaaagatgttaatacacattttaaagccaataaaaatttactatcagattcaacaattaaattaaatagtgcagcctggcaatctcctacaaaacatttattacaagttaaacaaaataatggtggtctaactgtacagttgccaaaatcagtttctaatcaatttaaagatttgtattttgaaatggatttagaattactttcgccggataaagctcatgatgttaaagtgaatgaatatacacaagaaagaaataaactcacttataaatatcgacgctttgtaaaacccgtaacgatacgcattaaagcttcagataggattagattatcattgcctaaaggtaagtatcgtgtaaatttaaaagggatatacggcgaagattataccacgcttaaagacgcttcaaattcattagaggctgtcaaagttagtaagacaaagcaaggttatactattactaaaaataaaaattcatctgggtatattgttttgccaacagcatataatcaaggtatgcaagcgacatcaggtgatcaaagtcttaaagttgaacaagtaaatggtgttatgaccggcattaaagcacctaaaaatataacaaagattcaattgagctataccccaccatactattatttacttataacaattactatatttggcattatatgtagtattattttcacgagatgggcaagacaaaaataa

SEQ ID NO: 420285 - DNA, 945 bp, Staphylococcus aureus
atgatgatgaataaagaagcaacaaaaattggatttgcctacgtcggcattgtagtgggcgcaggattttcaacaggacaagaagttatgcaatttttcactaaatatggcttgtgggcttatttaggtgtcattatatctggttttattttagcttttattgggcgccaagtagcaaaaattggtactgcctttgaagcgacaaaccatgaatcaacattacaatacgtattcggtgaaaagtttagtaaagtctttgattatattttaatcttcttcttatttggtatagctgtaaccatgatagcaggtgcaggcgcaacatttgaagaaagttataacatacctacatggctaggtgcattaattatgacattagcaatttatgtaacattgctattagactttaataaaatagtacgtgcccttggtgtcgttacaccatttttaattgttttagttgtattaatcgctggcgtgtatttatttaaaggtcatgtttcattagcagaagttaaccaagtagtgcctgaagcaagtatttggaagggaatctggtttggtacaatatatggtggattagctttttctgtaggttttagtaccatcgtagcaatcggtggggatactgaaaagcgtacagtgtcaggtgcaggcgcgatgtacggtggtattatctatactgtattactagcattgatcaactttgcattgcaaagtgaatatccaactattaaaaatgcctcaattccaacattgacgttagcaaataatatccatcctttaatagcaacagtgttatctgttattatgctggcagttatgtacaatacaattttaggactcatgtattcatttgcagcacgttttacagaaccatatagtaaaaattatcatatctttattatctgtctcttatacacatctccgagcccacgagactaa

SEQ ID NO: 420286 - DNA, 294 bp, Staphylococcus aureus
atgaaacctttaccaatgtcatcacctaagttaaccaacttaccaaataattctgcagtcttaaaacgaccatttaaatctttaagtgctacacttgatgtgttattttctccaactaacgcacgtaaaattttcaaaaatgaggatttaccattactccccccacctgtaagaataaaaaatttaccgtattcattccttctaaataaagcatatcctaatatttcttcaaacaaatctcttagttcagtatcattcactgccaacttattaaatgttttatcagttacttga

SEQ ID NO: 420287 - DNA, 879 bp, Staphylococcus aureus
atgtcacaagatgtaaatgaattaagtaagcaaccaacgccagataaagcagaagataacgcatttttcccatcaccatattcccttagtcaatatacagcacctaaaacagattttgatggtgttgaacacaaaggtgcctataaagatggtaaatggaaagtattgatgattgctgctgaagagagatatgtattattggaaaatggaaaaatgttctctacgggtaatcatcctgttgaaatgttattacctttacatcatttaatggaagcaggttttgacgttgatgttgcgacattatctggttatccagctaaattagaattatgggctatgccaactgaagacgaggcagttataagcacttataataaattgaaagaaaaattaaaacagccaaaaaaattagcagatgtgattaaaaatgaattaggacctgattcagactatttatctgtctttatcccaggtggacatgctgcagttgttggtatttctgaaagcgaagacgttcaacaaacattagattgggcattagaaaatgaccgatttatagttacattatgtcatggaccagcagcactactttcagcagggcttaacagagaaaaatctccattagaaggatactctgtttgtgtcttccctgactcattagatgaaggtgcaaatattgaaataggttatttacctggacgcttgaaatggttagttgctgatttattaactaaacaaggattaaaagtagtcaacgacgatatgacaggaagaacgttaaaagatcgcaaattattaacaggtgacagtcctttagcttcaaatgagttaggaaaattagcagttaatgaaatgttaaatgcaatacaaaataaataa

SEQ ID NO: 420288 - DNA, 570 bp, Staphylococcus aureus; identical to SEQ ID NO: 405361

SEQ ID NO: 420289 - DNA, 534 bp, Staphylococcus aureus
atggcaacaaatcatgaaatagaatttaaacaaatgataactgcatcaatctataataaattgcaagagaaatattttaaagacagtgtgctgtttaagcaagtcaattactatattgatacacccgatttcaaattaaaggaacatcgctctgcactacgcataagagttaaagacaatcaatatgaaatgactttaaagacaccagcaaaggttggtctaatagaatacaactatatcgtcgacattaaaccagagatgaacttgattatttcaaacgacaatcttccagatgacattcgtcaaattatagttgaacagtttggtgtaaaggatacaactttatcaatacttggcgcattaacgacatatcgccaagaaactaaatataaaggtgatttacttgttttagataaaagtgagtatttcgatactacggattatgagttagagttcgaagttaaagactataatcaaggttcacaaaagttccaatcctgtctcttatacacatctccgagcccacgagactaa

SEQ ID NO: 420290 - DNA, 378 bp, Staphylococcus aureus
atgttaatcatattaatcagtgttgcaggtatccatttaaaaatgaaatatgacgaaaaagaaaagcaaaaagcaatttattataaagaacaacaagagcgtattacactttatctcaagcataacactaaagaaccgaatacgatcaaatctgtacacttcacaaatttggaaacaagtcctatgggaagtgcagtgattgaaggatacataaacgaaaacaaaaaagatgattttgttgcttatgcatcgcctgaaaataactttcaatttgtaggggatatagtactaagcaaaaatttatcggaaataattaaaataaaaacaaaatcacctgacgaaatcaaagaagaattagataaaaaagaaggccactag

SEQ ID NO: 420291 - DNA, 135 bp, Staphylococcus aureus
atgaaatatataaacaaaactttacttattcatttagaaggtatcaaaaaaacgctaacaatcaaaacaacaacacctattaacgtaggagtggggtttttaaggaaaaaaggacataatttaaaatctgagtga

SEQ ID NO: 420292 - DNA, 267 bp, Staphylococcus aureus
ttgttgtcagagaatgaaaagaaagataaagaactaaattatacgcttaagttattcaatcaagtttttaaaatcattaaaagtatgatgaaagaagagcgttatcatacactaataaatcatattgataatcatttagacaattctaaaatacgtgaagtaatgacgatagataacaatgatgaacagttctttaagaagaaatatcaagcacaagaacgagaaatcatttttaaagaagatagagaagatggttatacattataa

SEQ ID NO: 420293 - DNA, 240 bp, Staphylococcus aureus
atgatgggcagctcgttagtagaaaaagaaagtgatgctgtgattactgatactgacgaagcacttaagcaggttttaaagatggtgaaggaaaataaagttatttcaaaaaacaataaggaagtaacgttacaagcagatacaatttgtgtgcatggtgatggagaacatgcattattatttgtttcgaaaattagagaaattttaatgaaagaaggcattgatattcaatccttatag

SEQ ID NO: 420294 - DNA, 153 bp, Staphylococcus aureus
ttgattaaacgcatattaaaaatttggtttactatcgctatgtatgagctaggtaagtatgtaactgagcaagtatatattatgatgacagctaatgatgatgtagaggcgccgagtgattatgaaaaaatcagagctgaagtttcatggtaa

SEQ ID NO: 420295 - DNA, 159 bp, Staphylococcus aureus
atggaacagtatggttggacattaactgaagttagagaccagccatacttaaagttgttagaaatacttaatgaagatagtgatgaagagtcagaagaaaaacaaagcgaacaaaaggtaatcacaggaacggatttaaggaagctttttggaagctag

SEQ ID NO: 420296 - DNA, 561 bp, Staphylococcus aureus
atgaataaaaaactattaacaaaaacattgatagcaagtgctttagttttaacaacagtaggttcaggttttcattctgcttcaaattataatggtattaataacgttgcaaaagcttctgaaatcaaggacaatcagttgtggaaaaaagttagagattctttaaaagatgcaaatattattgacaaaacagataacgaaactatcgaagtaaaatataagactaaaaatggtgcagaaggtaatatttcaggtactgcgagcttgaatgaattaggttcatctaataatgcggaaattgattcatatggtgttagtcgtattgatattaaaagagttaatccgaaatctaattcgacagatgcgaattctatatggaaaaaattagtagatagcctaaaggacaaagaattagttaaagaaggagcaaaagtttctatctatagtaaagataaggatgacggcgttataacgggtaatgttggggataccgattctaatgcacaaagcagacttataaacactaaagatataactcatattacaatcgaaaataattaa

SEQ ID NO: 420297 - DNA, 465 bp, Staphylococcus aureus
atgatttcacacttgataacggatacttcgaagaagaaacatcagacagtgactcagacagtgattcagattcagatagcgattcagactcagatagcgattcggactcagacagtgaatcagactcagacagcgactcagattcagacagcgactcagactcagacagcgattcagactcagatagcgactcagattcagaaagcgactcagactcagacagcgattcagactcagatagcgactcagattcagacagcgactcagattcagaaagcgactcagactcagacagcgactcagattcagacagcgactcagactcagatagtgattcagattcagacagcgactcagattcagacagcgactcagactcagaaagcgactcagactcagatagcgactcagattcagacagtgactcagatagcgactcagattcaggaaaacatacacctgtga

SEQ ID NO: 420298 - DNA, 237 bp, Staphylococcus aureus
gtgacacaatacttagtcacaacattcaaagattcaacaggacgtaaacatacacacataactaaagctaagagtaatcaaaggtttacagttgttgaggcagagagtaaagaagaagcgaaagagaaatatgagtcacaaaatacacctattgtttactacactaataattctaaagtgaccttattcgaaagacctagtgaagaagtattaggttctttgttcgaaaagaaataa

SEQ ID NO: 420299 - DNA, 363 bp, Staphylococcus aureus; identical to SEQ ID NO: 413224

SEQ ID NO: 420300 - DNA, 1011 bp, Staphylococcus aureus
atggtcttatgggttatcattctttgtcgaggttttttaccagctattcgcaacaaagtacaagtgaatcatgataaacgtcacttattgacgctattgtttgttggagcaattgcaattccgttattttatcttgcatcattatttataatgccgaattcacatgtgacgtttgccgattactggcgatggtggattgttcacttatgggttgaaggtatatttgaagcatttgccgtagtgttgataggtttcttaatggttaatatgaaattaactaccattgaaacgacgattcgtgcattatattttcaattaatcttattactaggtacaggtattgttggtatgggtcatcattactattggcaaggtgatcattccatatggctagcactgggttcttgtttttcagcattagaagtcgtgccgctttgtttattaatttgggaagcatacacacactatcgcttatataagaaaagtgacatcacttttccttacaaaggtacatttatttttcttgcttcaacaggattgtggaatgcaattggtgctggagcattaggctttttaattaacacaccagcagttaactactttgaacatggtacgcaatggactgcagcacatgcccatggttctatggctggcgtgtatggtatgttctcaattgcaattgcgttgtatgtttttaaaaatattactaaaaaagaattttggacaccgaaagttgaaaaatggattaaaatatcatgttgggctttaaatattggcttggcaggtatggtgttcgttacattaatgccagtaggttatatccaacttaaagatgcattagaacatggttattggcattcaagactaacgtcattttatgaacaaccacttgtaaaagcaatcatgtgggggagaatgccttgggacattatattcacagtaggtgtcattatattagtagttatttttataaggggatacagacacttaaaaccaaaatacagagtatag

SEQ ID NO: 420301 - DNA, 531 bp, Staphylococcus aureus; identical to SEQ ID NO: 413219

SEQ ID NO: 420302 - DNA, 996 bp, Staphylococcus aureus
atgaaaaaaatatactcctttgaagattttcaagatagtactgtgtatttgaataattctccttcaaagttcataacaagatcgctcataatactcttcataatatttatggccgttattatttctatattttttattaaaaaaactgattatattaaatccacggctgtaataacaccaaaaaataatcctattaatattacaacagataaggatattaaagttaaaaagctgctaaaagataatggagaattagtacagcaaaaggagaaagttattactattcaagatataaataatgataagaaacagataacttctaaaataaaatataaaaaggagtcgttaaaggatttatcattactctatgataaaatagacaactatcctttagaatcagataaaaaactgcatactgattatagtgaaaagtactttgaaagctataaaaaacaatataatcaaacagactacctagataattcacaacgtaacaacattaaatctcaaagccttcaaattctaattgaaaaaataaatactctaaaagatgagttacacgagttatccgtaattaagggaaatgacaatcaggattatgtaaccaagaatggttatattttttaccctaaagaagtacaagaaggattaataattcctaaaggtaaattgctctatcaaatttacaaaaatagagataaagaagtagttacatatatttcgagtgaagatattttaagcttaaatcctaatcaaaaagtctcaattacatttaaaacaaaaaaagatgaattctaccttcaggggaatattaaatatatttcgaaattccccgaagaatcaaaaaataatgaaacattttacaaagtaaaaatttcactgaaagataaaattcctaagcaacttgaaaatgtatattaccttaaaggtacctcgtatgttgaactagaaaaagagacaatagctcaatatctgtatcgtaaaataaaagaataa

SEQ ID NO: 420303 - DNA, 2160 bp, Staphylococcus aureus
atgaaaaaaataccctttatccaacaagaagatgcaaaagattgtggtcctgtatgtatcgcgatgatatgtaaattttataataaaaaagtatcaatagaaaagcttagaaaaatttctggtaccgacaacaatggtactaacctatttggccttatagaacttgggcaatatttagggcttgaactcagcggagtacaggcggaaagtacaaaaaatctatatgaaatccattatccgtgtatagcgcacataattaataaaaaagggagcgaacactttgttataattgaaaaagttttaaatgataaagtttatattgtagatcctgatattggtagatattctacatctttaaatcaatttgatacatactggactaaaatattacttctcatagaaaaaaaagacgattttactacatatgatgataggccttccatatccactttgtttcgtagtttaattactcataatagtaaatatataggattaataattttatcttctctattaatcaatttatttggatttctcggtactttttattttaagttgctgattgatgatatattacctagtaatatagtatataaccttcatatattgtctggatctatcttactaatgtatcttgtccaatcgttgattacatatttcagatctcatctaatacttttcttaagtctgaaaattgatataaaaattatgcttgattattataatcatgtattaaagttacctatgggtttcttcgaaacacgtaagtctggagaaattctttcaagatttatggatagtaataaaatcagagaagctttttctactgttacagttacgttttttattgatactttaatgattttcttaggtagtattctactgtatttacaaagtagtagactattttttattactctaatatttgtgcctatctatatattattggcattaatgtttagaaaaccttttgaaaaatataatcgccaacaaatggaacaaaattctgagcttaattcttatttaattgaaaccattaacggtatatccacgataaaaagttatactgcagaagaagaagtatcaattaaatcagaaaagtttttcattcgtctaattaagaaagttttaaagttaggtattataactaacatacagatgagtataaaaggatttttgtcactattaatcagtacggttattttatggataggttcatattatgttattaataatcaaatgactttaggcgaactcatcacatttaatgcccttgttgtttattttttaggtcctattgaacgcatgatagatgcccaacctgttatacaatcagcaatcgttgcgtctagaagaattgttgaaatactcgatttagaagtagaggataaagaaaatgctgtatcagaattctcatttaataatcaaatacagataagtaatctatattttaactatggtcatcgagaagatttattaaaagatattaatattacaatacctaaagatacttttgttgctttagtaggagaaagtggttccggtaagtcaacattagcgaaacttctagttaattactatcaagcaaaacaaggcgatattcagatagatcaaaagaatatagtctctattgaaaataagtctttaagaaaaaacataggctatgtatcacaaaagaattttttctttagtgggtcaattatagaaaacctattactgggtaatgataagcatatcaccatggatgaaataatatgggcctgtaaaaacgctgaaatacatgattttattgaagagttgcctcaaggatatcaaactactttagaagctgatggtgataatttttctgggggacaactacagagacttgctttagctagattatatattaaaaatcctgaggtctttatattagacgaagttacaagtgctttagattctacgacagaaaacaaaatcatcaataacttacacagtgtttctaaaaaaggtaaaacagtaattatcatctcacataagttaagtactattgaaaaagtagataatatttattgtttaaaaaatgggagaatagttgaacaaggaaatcataagcagttactatcaaaccgttcagaatattatacactatggaaaaatcaaacaacggagggaatataa

SEQ ID NO: 420304 - DNA, 126 bp, Staphylococcus aureus
atgaaacaattagatattccacaattgttaattataaatggtggtagcggaggtaattatacacttcctggacaacctaaaggtgatataaaaaaatgtatactttcattctttaaaaactgttaa

SEQ ID NO: 420305 - DNA, 1305 bp, Staphylococcus aureus
atgatcattgatactaagctatacattcttagaatgtttttatctattcttatttatacgtattttttctataaaatatactttcaaacaaagagccctgagaaactaaaaatagctttcatagggctccttatttggtttattttttcaatatttttaggagattttatagaaatcttttttgtagtctgtattgccatttattatatatttttacataaagacttaaataaattgaatgtaatactaatattttttataagcattaaatttatcaatataaatagttcttacatcataatatatatttataatgttacagggatatctggtgattatttagtttatctccaattattaatcatatcaattcaggtgatattatatataaaaatttttaaaaaatacaatttttcaacgtatatctattcatttgtaagcttatcattaactttacttttattgtatatatacttatccattttctttataacttatattttcaataaaatctattattttgaaagattcattgatttacttttgttttttgtaataatgcaaggtacttttatattttttcttattttttatgaaaatagagtacaaaaagaacaagaattaaaaagaaacaatgaaataaaatttgaaaatataaatttttactcacaattgatagaaaaaaagaatctagaaattcaaaaatttaatcatgatttaaataatataatcatcagtataaatgaagttgaagaaagtaaagaagttcaaagatttaaaagagaattaagttatataagtagttatataaaagatatacctttttcgagtaataaagttgatactcattatttaaaaaatattaaaaatccatatttaaaaaatttatttttaaataaaattgaagtcatgatgaataaaggtatatcatttaattttgaatgtttaaaaatggtatcagaaataaaaagagtgcatattttagacttagttcgaattatagggattctttgcgataatgccattgaagaagctgagaaaattaatggtggatttataaatatatatatatatcaagataatagtttattagaattttttgtagaaaataattttatgaatagcaatcaattatctatccataaactagtagaacctggattttctacaaaagaagaacataaaggattaggtttgacgataattgaagatataattgaaaaaaacaaatatattagtgttaattatgaaattaataataacgataatatttttaaagctatattaataatcaatatatcgtaa

SEQ ID NO: 420306 - DNA, 741 bp, Staphylococcus aureus
atgacgcattctatttttatttgtgacgatgatattagttatctcaataaaatcaaaacgataatagaacattatatattatttcatgaagaacaatttcatattgaaaaaataactacatcaacaatagagtttttgaaatatatagaagatattaaaataagtgggggtgtttattttttagatatggattttaaacaagatattaatggtattgatttagcattaaagataaaacaaagagatattcaagctaaaataatattcattacaaattatagtaagtatgcaactttaactttaaaaaataaaatagaagctgttgattatataaataaatctcaaaatatagatacattgcaagatgagattataagtaatctaaaatattgttataattctataattaaacaaaaaaattactctaaatctgtgtttagcttttcagtaaattcaactacttactttattgatataaatgatatactttttatagaaagttctcatatacctcatttattaactctagcgacgttagactctaaatataatttttatggtaaaatttctaacatagataaagattacgaaaatctatataaaatttctagatcatgtttgattaatcctaagaatatgacgaaaattgacttcaacaaaagagaagtatatctgaaagaaaattttgttaaaaaattttctctatccagatccaaacttttaaagtcataccagccctaa

SEQ ID NO: 420307 - DNA, 192 bp, Staphylococcus aureus
atgaaaaaattaaaaattgaggaattaaaaaaatttaatggtggcaataagtgggggagttcagctataggtgcaatgggaggagctgctactggaataaagctttgttcagctggtggtccttgggcaatggctggatgcggcgttgtaggtggtgctataggtggatttacaggctatcatggatactaa

SEQ ID NO: 420308 - DNA, 207 bp, Staphylococcus aureus
atgaaaaaattagaaacaaaagaattagtttcaattaatggtggtaaaaaaaacacttggcaacaaaatgttagtggagctataggttctacagtagctggagcaggtttaggaggagctatttgtggtccggcttgtgcagtagtaggtgctcattatggaccaattatatgggcaggagtatctggtgctaccggagcattttag

SEQ ID NO: 420309 - DNA, 507 bp, Staphylococcus aureus
atgaatagtattgagcaaaagatattgaattttattttagagtgtaaaagtacatctgatgaacgcgagaagatagaaatcactgaaattttaagtagatgtttacttcatacatatgtgtttatagctctcagtatgattatatctgtaattgtagatcgcatatattttatcaattcaataggaactatatttttaattttaattttcctatacatctcaggctttatttctattgaattgagaagaaaatctttagctaatattaacatttatacgtacgaagaatatcagaataaaataaagattataaaatttattggtttatttaatgggatatactttggtgcaggtatgtttttatttatggaaatcgtatataaatatattcaaaatatagatgtaaatttaaacttcacaaaaatagtattatatatattattaggactgccttttggtgtatttagttattatattcagaagagtaaattaaataaagaatattaa

SEQ ID NO: 420310 - DNA, 201 bp, Staphylococcus aureus
ttgaataaaataaaagaatttaggaaaaaaaaggggttatcacaattagatttagctagaaatattttagtctctagacaaactataaatttgattgaaaataacaaatataacccatcgttagatttatgtttaaaattagcaagtgtgttagaaacagatttaaattcattgttttgggaggaaaaagaccatgaatag

SEQ ID NO: 420311 - DNA, 633 bp, Staphylococcus aureus
ttgctttacgaatctaatattattaacaaaaatcccagatatagaattattaaatataaaaacgactatctgatgattgatttagtaagcacatggttagttttgttctttccgtttattaattggttaatcccaaaaaaatatgtccaaatcagcagagaagattttgataatttaaatattgtcaaaccagttaaaaataaagctttatggccagctataggtagcatacttttatttggcactatgtttagagataaaatatatatacctgattctcatttagaaaaaaattgcgttattatcatttgttcggttttattattaagtattctagtgttttatatatatttaaatcagaaagtaaagttatctatctataataatcggagtagcaatggaaaaattatgatttttccatcattcaagaatctttgctttgtactattttcttattttttctgtggtggattatcaatcatgttcttagatgttttgactagtttatctatccaaaatattatagtatttattgcttgggttattatgacaatgctatttttctttataaatatgtcttcaataatagacaaaaagattcatgttatatatttaaggtcatataaatattaa

SEQ ID NO: 420312 - DNA, 207 bp, Staphylococcus aureus
atgcagaataataatttgaatagtattttgattggtttatttactgatttaatttttaatatttttgttgagggttttaagtggctttatgggattgaaaaaatcacgctagagatatccggccagatacttagcgtgattttattggtagttataaatttgtgtattgtattaacttatttttataatgttcgtaataaagcatag

SEQ ID NO: 420313 - DNA, 891 bp, Staphylococcus aureus
atgcaaacaaaatttgcaggtttatcaaatcaatttactaaagaattatctaattcttattcatttaaagattggagagattttaataaagaaagtcaaaagaatttcgctattattccaagtgctattctttcttatttaagtgaatttgataacaaagctttaagtttatatttgtattattgtttacatgctagaaatgatacgggtgaatcatggcattctactaacaaatgtgctaatgaactaggtgttactgttaggagtattaataattggaataatgtactagaaagaatgggtttaatctttagagaatcaaataatcattctagtttgagtacttttttattgccaatatcaaattatatttctgtttttcagaatacaaagcttgatgaatatttgaaaaaatatagtgaagatattttgcaaagtaagtttgaagggtctttaaaagctgttattaatgtttttcaatatagaaaaaattatgagacgaaagagtttacagaaccatataatgtttggttgcttattttcgagagaaaatataatactgattctaagaagtttgttgttaacaagtatgttgtattggaaaatactgaaatagaaggccaactcaatgtttcttctgaagaaatagaaaatgatttatatcgcaataaagatgatggctttaaggttttggattatgtgagaaagaacaatataactttagattcaaatattattacaggagaagttattattaattcaaagtatgatttgaaattatcggctaaagatagtgataaaagagctagggcatatgaattattattaaccttatttgatgatttaaatgaatttcgtgatcgaatgggggaaattgattatgcagaataa

SEQ ID NO: 420314 - DNA, 219 bp, Staphylococcus aureus
atgactattaaagaaattgcgaatgatttattaagtaaaaaatggtctttagaggatttgttttggttggtttttatgtgcataatatttagtattttcattacacctttgctaggtatttcgattggtattattgcttattttgtacttttttataaagatgatgactttgatgagacgaaagaaaaatatgatttacaagataaaggcgaaaagtag

SEQ ID NO: 420315 - DNA, 384 bp, Staphylococcus aureus
atgaagtttaaaaaattgattgttcttgctactataggtttgtttttttcgtcatttaacatatcatatgcagaagatttaggaactagaaagttggtaggtacaaccaaagatcctaaaagtaaatatacggcaaggtatgatccagactattcagtatattgttctgcaactatgattacagacaaaataggattaacagcaaaacactgtgctggtaatagaaaaataaatggatgtataggtgcggtgtatcctgttcattcagggttaagcacaccatttggtaagatgaatatttgtgagtatatacctaatgattcgaatgatatcgctattataaaaggcgaggaaaaagatatggataatacggttctgttgtaa

SEQ ID NO: 420316 - DNA, 753 bp, Staphylococcus aureus
atgaaagaattaatcgtcattgttttacttttatctgtatcacaaataaaagacaatacatttcaaactagttcagaagatttgcatcataagtccgagttgagttctttagcattaaataacatgaggcataattattttcataggtggccacccgtgaaaggagaaaataaaattactaatgatcaatttttagctaacacgttactatttaaagattttttgactaaccatcaatattataatgatttgttagtacaatttaattcaaaagaaactactgataaatttaaagcaaaaacagtagatatatatggattagcatatggcttccaatgtaatggaggtgaacccaataaaacaaattgtatatatggtggattaacaactcatgaagataataaattagacaaacccaaaaatgtacctattaatttatggatagatggagcacaaaaaagagtatctttagataaggtgaaaacagataaaaaaactgtgacaattcaagaattagatgctcaggcaagatattttttacaaggtgaatacttactatatcataatgatagctttggaggaaaaatacaaaaaggctttatcgaatttcatgacgctaatggctttgaagttagctatgatttatttgatgttaaaggagattatccagacacacaacttcgcatatataatgacaataaaacaataagctcgaaaaatttacatatcgatatatacttatttacaaaataa

SEQ ID NO: 420317 - DNA, 213 bp, Staphylococcus aureus; identical to SEQ ID NO: 408503

SEQ ID NO: 420318 - DNA, 1113 bp, Staphylococcus aureus
ttgaaatatagaaatttatttacaaagccatttaatataattttaggttggttctgcatcgcattcattggtgctattttatttacattcaataatgagaacttttacaacaaaccaattggtcaaattatagatgtcaaacacgtttcatcgacacctacaaaagatgcacaaaataatcgtgatattaagtataaaaatcaattaaaagccaaaatattaaatggtcaatttgctggagaaacgacgacgatcaatcatcagtacgtcaaatctcaagcagattcagaagcatttcgcacacacgaaaaagtattattacatatttctaacaagccgagtgatgcttatattatagaaaagaagcgtgataccttaacggttatcatcactggtttgtttttattaactgtattattggttggtcgcaaagtcggactgcaatcgattttatcattaatcttgaattctattgccatattaatcgcaatttacattcatattcaacatagcaatattaatttattcttactcatgaccattgccatgatctgttcaacaatactcactttattgctcgttacaggctggcatatgcgtacactcattaccgtagcaagtacaattatcggaacttttttgagtatagctttaacagaattaatcatatatatggcagatggtaaaggcattaaatatgaaacgatgaattttttatcattaccaccgaaagatatcttcctagcctcagtgttaataggttcattaggcgctattatggatgttgcaattacgattgcaagtggcatgcatgagattttacaacgtacgccgcacatttcaatgaagcgttgggcacttgctggtcgaaacatcggccaagatattatgggtaccatgactaacattttattattctcgtatttatccggtgcactacctatgtttttaatctttttaaaaaatgccaatacagtgacttatactatttcgatgaattggtcgttagaaattgcgcgtgcactaacaggtggtataggtatcgtacttacaattcctatcacaatattgtttatggaaatatttgaaacattaaggagggcgaaacaatga

SEQ ID NO: 420319 - DNA, 957 bp, Staphylococcus aureus; identical to SEQ ID NO: 407681

SEQ ID NO: 420320 - DNA, 741 bp, Staphylococcus aureus
atggaaaaagtttatgttgctggtgcaataccagaagtaggtttaaaacttttacaagaacattttgaagttgaaatgtatgaaggtaaaggattagtcgataaagacactttaattaaaggtgttaaaaacgcgactgccttaattagtttattatctacaaacgttgataaagatgttatcgatgctggtaaagacttaaaaatcattgccaactatggcgctggttttaataatattgatatcgagtatgcccgagaaaaaagtatagatgttacaaacacacctaaagcatcaacaaacgcgactgctgatttaacaattggattagtacttgcagtagcgcgtcgtattgttgaaggggaccaattatcacgtacaactggatttgatggatgggcacctttatttttcagaggtagagaagtatctgggaaaacaatcggcattatcggtttaggtgaaattggtagtgcagtagctcgtcgtgcaagagcatttgacatggatgtgctatacactggacctaatcgcaaagaagaaaaagaacgagaaatcggtgcaaaatatgtagatttagatacactattaaagaatgcagattttatcactatcaacgctgcttataatcctaaaatgcatcatttaattgatacagaacaatttaaaatgatgaaatctacggcgtatttaatcaatgcctctcgtggtccaatcgtgcacgaacaagcactagtgtaa

SEQ ID NO: 420321 - DNA, 450 bp, Staphylococcus aureus
ttgaatttccaacgggcgaagtaccacattatacaaaacaattgtttttttgaaatacaatcgagaggttacataccaatcattgcacatcctgaaagaaatagaagtatcgccaaaaatccggaaatattatatgaattggttgcaaatggggcactgagtcaattaacatcgagttctttagttggtggatttggtaaaaacattcaaaagttatcattacaatttatagaatgtaatttggctcattttgtagcttcagatgcacattcatgtgaccaaagaccatttttgatgcaagaattatttcacaatcataaattgaagaaatattcgaatgatattgaagcattacttcgaaatgccagttcagtaatcaatgataattttgtttatttagacagaccgactaagccaggaaaagtgaagtcgtttttgaaatggttttaa

SEQ ID NO: 420322 - DNA, 408 bp, Staphylococcus aureus
atgattttgaaatttagagcatgggataaatatgaaaaaacaatgttagatgttcatggaattaattttgatgaatatggtgtatggactcgtgaattgattgatgatgaagatgatggtggttttatccttacagaagatgtaaaactattacactacacaggatttaaagatgtgcacggtgtggagatattcgaaggcgatatagtgaaagttaatgtgctagaaggaattggaccgaatgcaagtattgtttttaaatacggtatgtttggcgttgaaaatgacatgcatggatacggttacgacaaaggtctttattctctagacctcatcattaatagacacgaggtagaagttattggcaatatatttgaaaatccggaattactggaggagatagaatga

SEQ ID NO: 420323 - DNA, 405 bp, Staphylococcus aureus
atgaaaattaaagttaaaaaaacaatgacgctaagtgaattaattgaatgggcttgggaaaacccagaactcacaaataataaaaaaatttttgctagaagtaattacctctcaggttctgttaaattttctactggcctatgtagaactatcacaactaacaatataatgtttgatgatgaatttgaagttgcagttgaagaggaagtaaccaaagatacggtatttgataagttgtttgaagtgtacgagtttcaagaaggagattataccgctatatcacgcgctaatattagtataaacaaacgtttagatgaacattgtttccctatcaaagcattctacatcttaaacgacgacctaactatgacgttaatttggaaagatggggagttggtagtatga

SEQ ID NO: 420324 - DNA, 348 bp, Staphylococcus aureus; identical to SEQ ID NO: 409379

SEQ ID NO: 420325 - DNA, 618 bp, Staphylococcus aureus; identical to SEQ ID NO: 409378

SEQ ID NO: 420326 - DNA, 339 bp, Staphylococcus aureus; identical to SEQ ID NO: 410839

SEQ ID NO: 420327 - DNA, 138 bp, Staphylococcus aureus; identical to SEQ ID NO: 412851

SEQ ID NO: 420328 - DNA, 459 bp, Staphylococcus aureus
atgatttcacacttgataacggatacttcgaagaagaaacatcagacagtgactcagacagtgattcagattcagatagcgattcagactcagatagcgattcagactcagacagtgaatcagactcagacagcgactcagattcagacagcgactcagactcagacagcgattcagactcagatagcgactcagattcagaaagcgactcagactcagacagcgactcagattcagacagcgactcagactcagatagtgattcagattcagacagcgactcagattcagacagcgactcagactcagaaagcgactcagattcagacagcgattcagaatcggatagcgactcagacagcgactcagactcagacagcgactcagactcagatagcgactcagattcagacagtgactcagatagcgactcagattcaggaaaacatacacctgtga

SEQ ID NO: 420329 - DNA, 375 bp, Staphylococcus aureus
atgatttcacacttgataacggatacttcgaagaagatacatcagacagtgactcagactcagacagtgattcagattcagacagcgattcagattcagatagcgactcagattcagacagcgattcagattcagacagtgattcagactcagacagcgactcagattcagacagtgattcagactcagacagcgactcagactcagacagtgactcagattcagatagcgactcagactcagacagtgactcagactcagatagcgactcagattcagacagtgactcagactcagatagcgattcagattcagatagcgactcagattcggatagcgactcagattcagatgcaggaaaacatacacctgtga

SEQ ID NO: 420330 - DNA, 411 bp, Staphylococcus aureus
atgactgaaaaacctaatattgagaacttagtaaaatttattaaattaaaggaaagcataggtaactacatttttgttagtttagggaatccgttagttaaagctcaagtaaagattttgaaaaatattaattatttagaaaatgatttgaataaactgtgtcaaaagtttaaaaataaatcaggaaagtacccaacttgggtcaaattagatattgtaactagtcaaaaaacaattccttttcatattttgcaagatgaaatgattaacactaggaggaattatatagattttggcatttcgttagataaatactggaatgtaacatttctacctgaggaaattaatgccaatgcttttattagaccaaagaaaaatacaaacgaattatatttatctgaaaaaatgtga

SEQ ID NO: 420331 - DNA, 150 bp, Staphylococcus aureus; identical to SEQ ID NO: 409943

SEQ ID NO: 420332 - DNA, 180 bp, Staphylococcus aureus; identical to SEQ ID NO: 409937

SEQ ID NO: 420333 - DNA, 180 bp, Staphylococcus aureus
atgttaagttatggtggattgcttaaacaaaagcataaaattttaaacttagacgatgccgaagatggtaatttgattaatacaagtgatgaagataaaacgacagacgaagaagcaaaagcacattcaattacggcaatttggaattttgaaaagcaaaattattatttaagacattag

SEQ ID NO: 420334 - DNA, 180 bp, Staphylococcus aureus
atgttaagttatggtggattgcttaaacaaaagcataaaattttaaacttagacgatgccgaagatggtaatttgattaatacaagtgatgaagataaaataacagatgaagaagcaaaagcacattcaattacggcaatttggaattttgaaaagcaaaattattatttaagacattag

SEQ ID NO: 420335 - DNA, 180 bp, Staphylococcus aureus; identical to SEQ ID NO: 420333

SEQ ID NO: 420336 - DNA, 150 bp, Staphylococcus aureus; identical to SEQ ID NO: 409943

SEQ ID NO: 420337 - DNA, 240 bp, Staphylococcus aureus
atgaccaaaaaacatgtttttataattattggtgttattttatgtatatgtatagttgctacagtcatttatttaaaagtgaaacatgacgaaaaagaaaaacaaaaagcactttactacaaagaacaacaggagcgtattacactctatctcaagcataataccaaagaacccaataccatcaaaactgtgcatttcacaaagtttaaagacaggacctatgggcgatgccgtaattga

SEQ ID NO: 420338 - DNA, 540 bp, Staphylococcus aureus
atgaaagattttgaaattagttttttaactgagaattgcaaaaaaatttatcaacgaaaaaaacatgttactttaggaattagtccatttacaagcaagtacaatgaactgtatatcaaaaaaattattcaatgggctaatttaaattttgaagaattttctattctattagctggaaatgaatcaaaaaatcttttggaatgcctaggttattcatcatcaaaagcaaatcaaaaggtcagaaaagaaattaagaggcaaattagattttgtgaagatgcgatcttgaaatgtaacaaaactataaccaacagaatccacagattttctgatttcaaacaacatatttcttatattgaattatatcaacagattgtaaatcaattcaatacagactctgatttcagaagttgttgtttaaaaatgtcgcttaaagcattacagagtaaaaaagaaaatcttaataaacctgtattaattaccgatgaatctttagagtatgcagcacagtatgtcttagccgaattaccatttttttaa

SEQ ID NO: 420339 - DNA, 1200 bp, Staphylococcus aureus
atgttaaaagtttataatagtattttcgaccaagcctatgaaatagaccctattccttatttcaactttttacgaaaacacgatccagttcattatgaagaatctattgatgcctattttgtaagtaaatataaggatgttaaatatatactgaaaaataatgatatatttaacactaaaactttagctaaaagagccgagcctgttatgaaagatagggttttagctcaaatgtcaggccaagaacacaaatccaagaaaaaagctatattaaagggaatgactggtaaatatctcgagaatttaatgccaatattagagaaaagaaccaatgatataattaacaaacatattgaaaaaaaagaaatagatatagtaaacgactttggaaaggtatttgctgttcaaagttccatggatttattaggtattaatttagaaaattacgaaaaaatcagggaatggcataatggaatagctaaatttataacatcattcaatttgaacgatgaagaaattaaatattctcttgagtgtagcgataaactagaaaattacttgatgccattaattaaggatagaaaaaaatcaactaaagatgatttaatttctattctacttgaatataaaaacgatgaaaatagtataagtgatacagaaatactcgctttatctttaaatgttctattagctgcaacagagccagttgataaaacattagcttatttattttacaatttattaaaaaatcctgagcaatttgaaagtgttaaaaacaatcctaaattaataaaaaatgccatcattgaaactcttagatacaattcacctgttcaactaataccaaggcaagtatcaaaaccattcatattcaataatactgagttgcaagctggagatactgtaatatgtatgataggatcagcaaacagagatcctgaagcatatagtaatcctgatgaatttaatattcatagaagttctgataataaatcaccttttacctcccattcacaaaatttatcattcggaactggtgtgcatacatgtgtcggtgcctctttctctttaatacaactagaaatggtagcaatcttattactaaaacgtctaaaaaatataaaattaaaaacaatggaaattacagaacacggtatatatactagggggcctaaatcaatggtgattagtttcgattga

SEQ ID NO: 420340 - DNA, 768 bp, Staphylococcus aureus
atgatgaaaattaacacacggataggtgatatcttgaaaaaatatttaatagataatgaaactaattttaaaaagtcaatattacttttcccttatgcaggtgggggttccaatgtgtataagaattggataaaagcatttgataactttaatataattcgtttgctttatccaggcagagaaagtcgatttaatgaatcaccagttgataatatggaagatttaatatgtttagtttatgaagaaatgatagaaaattttaattttgataacgaatattatttatttggccacagcatgggaacaaaggttgtttatgaattagcgttaaaaattaaacataatgatgatttaccaaaccctaaagcggttattatatcagctggaagagctccgaatttcaaagaaaaaaaacctatatatcacctcgacgaaaaagggtttataaagggtttacgctcatatggaggaactcctaaagaagtattagaaaataaagatttaatgagaatgtttttacctatgttaagggctgattttagcattgatgaagaatatcaagattttcatagagaaaaaattgatagtccgatactatcgcttatgggtactaatgataaacaaatagagctcgatgaacttttggagtggagaaattataccaataaagagttttatattgagtatataagaggcggacatatgtttattatagataattctgaagaagtgattttgaaagttaaggattttataaatggcttataa

SEQ ID NO: 420341 - DNA, 684 bp, Staphylococcus aureus
atggcttataaaaaatatataattaatagcttaaaaactttaaatgttagattgattaaaaaagatatatttaatgatttgacggttataatcatagcatttacaaatacatttgaaactaacaatttaaatcaccaatttttaacaatagaacaatcaaaaaagttaaaaaaattttcattactagatgatataaataattatttaattagtcattcaattgtaaactcattcttttgttcttatataaactgtagaatcaaagatcttcattactcgtataataaatattttaaaccatatataaaaaacaatgacaatataaaatttaatatttctcatacattgggatgtagtgtaattgcattgtctaaaaatgaagtaggagttgatattgaaaataagaaaagagaaattgaatttgccaacgtagttgatagttatttcaatgattatgaaaaattatatattaataatgagtcggataaattttatgaagtttgggtcgctaaagaagcttatttaaagtgtaagggttgtggcttaatggaggggttaactaatttaaatatcgtagcaagtaataaggatggtttttacttaattgatgaaaattgtcaaactaaatttaaagttttaatagaccatatctatgatcgatacgtaattggaatagtgaattag

SEQ ID NO: 420342 - DNA, 1608 bp, Staphylococcus aureus
atggagaatcataaaataatagaattagagaagtattatgatgaaaatgtgtggaaacataaaaccttagatgaatatttagaaggaaaagtagaacaatattctaaaaacatagcagttatagatggagatattgagataacttatggagagttgtcggaagaaattaataattatgcgatagaaatgcagagagatggaataaaagaaaacgacaaagttgttattcaattacctaactgcttagaatttatattcgtaatatttgcactattcaaaattggagctataccagtgctaacgttagcaaagcatagaaaaatagaaattaaaggtatcatagaaaattcaaaagccgtagcttatatagcaaagtctaattatttaggtttttcttacgaggagtttattaatgatatagaggcagaaatagactttaatttaaaaaagtatattcttggacctactcaagagtataaaaatttttacaaactaaatcgtaatgactatgtttatcaattggaagaatgtttagataaagcacgttataaaagtatgggtttacttttgctttctggtggcacaacaggggtacctaaattaattccaagaagacattgtgattatatttatgttgcggaacaatgtgcaaaaagatgcttatttgatgaaaatgttaaatatttagctaccttaccaatagctcataattttcctttgggatgtccagggataataggaacattttctgttggtggtactgtagtgatatgtaacataactagtccagatgaaatgttcccgttaattgaagaaagaaaagttacacatatggcattagtgccttcaattgcaaaactgtgtatagagttttataaatatgattcagactatgatatcaattcgcttaaaatgatacaagttggtggagcattactagatttatatacggccaaagatattgaagacaaatttggctgcatattacaacaaatatatggtatcgcagaaggattaatatgtacgacagaagctacagattcaaaagagatcatttatgagacgcaaggaaagcctatatccgaatatgatgaaataaaaattgttaatgaatttggaattgaagttgatgatggagaattcggagagctcttagtaagaggaccatatacgatttataactattacaatgcgcggcaaatcggatgcgtagatgaagaattgtattttatgaccggagataaagtttgtaaaaaaactaatggacgatacaaagttgttggtcgggttaaagaaatgattaataaatccggagaaaaaatattaccaattgaattagaaagtattttattagaacacagtcttgttgatgaagtgaaagttataggactccaagatgatgtattaggagaaaaaatatgtgtttgtttaaaaagcaaagaagacatcagtctacatgaagttagaacatatttaaaaactaaagggttagcagaatttaaattgccagatattattaaaaagatagatgagtggccattaacatcatttggaaagatagacaataaaaagttgaaagtacttattgaattggaaaggggagtttag

SEQ ID NO: 420343 - DNA, 6018 bp, Staphylococcus aureus
atgggaagaaatgaatgtgacgattatattatttctttgattgaaaattggttgaaatcgaagcttaaaagagatatcacaaattacaaccaaaaccttgtaaatttagggattcaatcattagatattatggaattagccagtttgttaagaagagaagggctaaaaatcaagttttcacagttgattgagcatccaactttaaatcattggattgaaactattaagtgtataaagattaaaaaaagtaatagagacagtaaaaaagaaaatattgagatagataacggagaatttgaacttacagatgtccaaagggcttatttaataggtagagaagatgatcaagagttaggcgggataggttgtcacgcttatttcgaattttcaggcaaaaacatagatacagatagacttaatgattcatggtataaggttcaaatgagacatccaatgcttagagcagtgtttactaatggtgggaagcagtggttcatgagtagaccttataaagaaaatattgaaattacaaatttggaaaagtgcagtgacaaagaagtttctgaaatcttaaaaaaatatagagataatgtatcacatataaagagaaatgttacaaaaggtgaagtctctaatttatctgtatttattttgcctcaaaataaaatgaagataatacttgatattgatttacttgtagcagatgttctaagtattagtatgattataaatgaactttcggagatatacatgggtaaagaacttttaagtaatgaagtttatacatttaaagattatattgagaatttagaaatggatgaatatagtttgaatgaaagcaaaaagttctggattgataaaataaagcatttaaaaattaatccaatacagttacctattttaaaaagtccgagtgaaattaaagatgtgaaagtgactcgtcatacacgaaaaatcaataaagtagtgtgggaacaagtaaaagaaaacgcaaaaaaattcaacacaacaccatctttagtactattaacttgttatatgattgttttagaaaagtggagtgatcaagaaccattctatgtaaacatacctttatttaatagagatcataataataaacacataaaaaacattgttgccgattttacaaacttattattagtagagcacatgccgaaacctaatgaaaagtttattgagacattaaaaagagttcagcaaacttttatacaaaacgtatcgcattcggaatatagtggcgttaacgtacagagggaaatagctaaactaacaggttctcaggttaattctgcaccagttgtatttgcgtgtaacattgactatgaattagaaagcgaacttacgagaaatactttaggagatatgacttatatgatatctcagacacctggggtatggttagattttcaaacatatgttaaagatggtgaacttttaatttgctgggataaagttgatgacttattaagtgacgatgttgtgactgacatgctaaatgacttttgtagtctatttgaatcgttaaattcaatttctaattggaacaaaataagtggaatttttaaagaaaaaaattatagttctgaattaaaaatagaaacgcatacagaaaagctatatgatgggtttttaaaaaatgtaaaatgttatcctgacaatatcgctttaatagatacagatactaaaatggaaataacttacaagaaactatatgatctttcaatggctttggcaaagattttagtagaaaaaaatgtaaataaaggtgattatatcagtgtgtttttaccgaggggctacaagcaagtggtagcgatactggggatacaatttgcaggggcagcatacgtgcctataggtatacatcagcctcccaatagaagagagaaaatctataatcaaataggaatagatataattataagtgatataaaatgcatagaggaaaatcgattaattttagatgataagtttatcattgacatagacgctataggaaaagagaaattgcctaagatagttaatgtagagcctgatacaactgcatatgtcattatgacatcgggtacaactgggataccgaagggtgtagagatatcacacaataatgcaataaacaccatacgatatataaatgaaaaatggaatattaaaaaaagtgacagtttaataatggtttcatctattgagtttgatttatctgtttatgatatttttggaatattaggaacgggtggaaagctaattttaactagtgaacataactataaaaatccgagtgaatggttgatgatgatcaacaaatataatgtaacgatttggaactcagtaccaattttatttgatatgttagttacctatgctgaaggaaaaaaagaacagttgttactaaataaagtatttctttcaggagattggattgatattgcgttgccaaataggttttataatatttctagtgagaagagtgtcataatagggctgggtggagcaaccgaagcttccatttggtcaaacagtgtcacaatcccgcgagatattccgaattcttggaaatcaataccttatgggacggcgctaaagggtcaagcgtataaagttgtagacaaatttgatagagaatgtcctaggaatgttattggtgaattacatataggtggaataggagtagcaaaatgttatgttggagatactgatttaacaaatgaaaaattctacttagatgataacggtataaaatggtatagaactggtgataatggtcgtatatggactgatggaacaatagaatttttaggcaggattgacaatcaagtaaaaatcaagggacataggatagaaattggtgaagttgaaacggcaattaaacaaattaatggtatagataaagttaaagttataccaactgctaaaggtttgtctgctttcattatccctaagtccaaaaaatataatattgaatcaataaaatcatcaaagaatagccaacagtatttatataacttggataaattagttattcattttatattaaatgttttaaagtcagcaaatgcattaagagttgacaaatatacaaaatttaaagatatattagtttccatgaaagtaagttgtaaatatgaaaggattattgaacgttggtttgatagattagtacaccagggatatgttgaaaaagtagagaacggttataaactaacaggtttatattgtcaaatgtataatccaatagagtttgatggttctatgagagattatttaaatacactcgagaaatatatttcgaaggtactagcaggaaatattaatccagtaaacttattttatagtaaagagaaaaaattatctccaacaaaactatcagcattatttccttggcatcaagtaatagtaaatgcaattattgataaattaatggatttaaaaaaagaaagaattaaaatattagagtttgaaactagaaatatagaagtaagtcgagaaatttatcgaagtgttgaagaaaatgtcgataggtatgactatctagatacatcatctatttatatagatgaatatgaaaagaatattgataacattaattttaaaaattcatataaccaaatagaagatagacaatacgatataattttagcaattaattcaattcatagaagttataatgttaataagacgctaacttcacttaaaagtaaacttaaagaagatggtcaacttattgttgttgagccaaatactagtttgttgattgagcagattacggttgatattttaaatgcatacgtaggtaaagataaaagtaaaaaaacttctaatgaatggatagaattattcattgcaaattgtttccaatgtgatgaagttcaaaatattggtgttgagcctatttattcaaacatattttatatgtcaaattctaaaactaatcagcaagcaattagacatgaattgaaacaagtattgcctggatatatgattccatcagattttacaatgataaagcaattcccactaaataataatggaaaagtagataatgaaaaattaattaatgtagtaataaaaaatgaaaacgaagactctttacaaaggaataatccgctaaataatatagaaagaaaaatccaatacatttgggagtcagaatttaaagaaaaaatacctgatattcatactaatttttataaaaatggtggagattcattaatagctacgcgaatagctacgcaaatagaacgaacattcggattgaactttacgataaaagatgcaatggaatctattaccataaaatctcaagcagaaaaagttgccgaaatgagtaatagagctgttaaaactaatgatgttcaatttaaacaagatgcggaaaatgttaacaaaccatttgaactaacagatgttcaacatgcttattttatcggtaggaaaaaagaattgaatgaaaataacgtttctacacattgctattttgaaattgatggcaaaaatttaaatttgaaagctttagaaaattcgtggaataaattggtacagtcacatggaatgatgagatctgtaataacagatgatggtatgcaaaaaatattaaacgaagtaccttactatacatttaatataattgatttaacaaataaaaataacgatgaattagcaataagtctaaaaaatataagaaataaattgtctcatcaagtattgaatattaatcaatggccaatctttaacattaatgtatcattgataaacgatgagaatatccgacttcatgtaagttttgataatataatttttgatggatggagcatgttcgcattactagaacaatggaataaattatacaatggtgaatcaattgaagatcaattgactaatttaaactttagagactatgttcaatatgttaacacattaaaaatgagtcaaggatatgaatcagataaattatattggcttaatagaatcaatggatttttaaaagcacctaatatagaaacaggagaactaactagttcaaattcagcagtatttactagaagaaagtatcattttaaaaagcgtgaatggaacaaattgaaagatatatcaaaagaattggaaatcactccgtcaacattgcttattggtatttatgctgaagcaattagaaaggttagcagaaatgataatttcactttaaatattactcagtttaatagaattcctatcgatccaaatataaacaaagtaataggagattttacaacactcacattactagaaattaaacataaaaacgaaacaaaattatatagacgccttaagaatatacagtcacaacttatgaaagatttagaacataataaatattcaggtgttgaatttcaaagagagataagagcgcattgcaaagttaaagattatattttaatgccatttgtttttacaagtggattaggaatacatgcattaaaaagtaagaatttatttggagaaattatttataatatcagtcaaacacctcaagtttggatagataatcaagttattgagcgtgacgaaggattggatgtttattgggatagtgtagatagtcaaataggggaaactaatgtagacataatgttcgactatttcattgaaacattgcaaaaaataatagatgatgattctattttatttgatgtaaaatttattgttaaagaaagtaaagatgagtactttgaaccaatcgaaacaataagtaattctgaatataaagatattcaagaaatcaaaagagaagatgtcaaagagatactttcaaacacagtaaataataatatctctagttatacaagtaggttttttgaagtaggtggcgattcacttaaagcaattgcattggtaaataacattagagagaaatttaatgttgaggttgagctgtcctttatatttaccaatccaactattattgacattgcgaataaaattgaagaactcaaaaaagcaaacgaagaaggtgtcatttag

SEQ ID NO: 420344 - DNA, 2115 bp, Staphylococcus aureus
atgaagaagtgcatagtttgtggaagtagatttggtcagttttatttagaagccttacaaagcattccgaatatacaaattgaaggattactgtcaaatgggagtagaagatcaatagaatgtgctaatcattataaaataaacctatataaagatattgaagatttgccgagggatattgatttagcttgtgtagctattaaatctgaagttcaaggtggtaaaggaaatttagtagcagaagaattattaaaaaaaggaatcgatgtcatttttgaacaaccactttctgaaaaagaatatgcatcattgtataaattagctaaaaaacagaatagatattttgttgtaagtaatttatataataatttatcaagtgttcgaaattttatggaaaattataaaagaattaaaaaagaacaaaatgtaacatacattaatttagaatttgctacccagttatctttcccagttgcacaattattaacggtattattaccagaaattaagaatattgaatttaaaaaatctgaaagagaagaaggaccataccaggttttaatatcaaatgtcaatggaattcaattgaatttaatcgcacataatgaagttttggaaacatcagtagacaattttatgaggatactatttagagtaagtataggttttgatggtggggagttaaatttattggatccacatgggttagtttattggagagattatataaaatttccaaatgaaaatttaattccacatatctttaaagaaactccgcctataggaatgacacatagactaatagatataacttatcataattcggaattaacacagcaagaaatattcacagaattgtggccaagtgttatttccgaagaaatatatttatatttagaaaaggaaaatcacaacaaaaaattttggaatactatagcacaaaatcaaattaatagtgcaattgtatggaaaaagataatgaaatcattaggataccctagggtttcttatcacgataaatatgaagtatatgatgtaaaaaagttagtaagaaacgatgaacagaagatgaatataagtctatatatgggaatgttggaaaatatttgttctaaatctatattgtatatacttaatgaacaacttaatgagaacgttaaatgtgtcaattatcaaagtatcattaaattgcttaatgtacaaaattcatataagaaaatcattaaacgatggttggactatttatctaaaaatcattatattattggggattctagaggcaattatatatttgagtgtgaaaaaattcctaagacacaaatcttaaaagaatgggaaaatttggaaagtatatggccaactaatattatgccaatatcaatagttaaatacttcaagttacattttcaatatatgaataagatattaagtggagatatgccagctaatttaatattatttgagcaaggaaacagtaaaattgcagacgatttatataaaaatacagctatttctaggtatataaatgaacaaatttcaacttatgttgaaagaatatcaaaaggtaaacaattaacaattttagaggtcggggctggcactggagctacaacagaagaaattctaaacaaagtaggtaactcttttaaaggtaggtatctatttacagacatatcaaagtactttttaatctctgctcaagaaaagtttgaaaaattcggttttatgcaatatgaggttttggatattgatagtataaaaataaatagtgatataagaaaagaaaagtttgatgtaattattgctgtgggtgtaataaataatactaaaaatataaaacgcttattaagtcgattcaataatttgttatccaaatctggaaagttgattattggtgaagcatatggagagtcttcacctatgcttttatcgcaggttttcatgatgacagaaccagatgatgaaagaagaaatgctaacataacgtttttagaattagaaaaatggtacaaggtatttgatgaaacaggttttaatgttatatgtcaaaaaccgtatcttacagatgaattatcttcatttaaacaagcgctatttattttagaaaagaggtag

SEQ ID NO: 420345 - DNA, 693 bp, Staphylococcus aureus
atgtatagagtaggtcatttgcaatataaagtgaaaagtatagaaaatgccataaaaaaatttgaggaacttggtttcaaaattgaaagagctaataaaaaatctaaaaatgcatttatttggtttgaaagtggaccatatattgaactcatagaaatgaatggcaagttaatattatttgcttatctatttaggtggatgtatggtattgcaatgaaaaaaagatgggaaaagtggtgctgtaataaagatggatttatagactttgcaattgaacctataaattataagcagagagacatgaataatttttctgaaaacaaaaaaatattagaaaattacgacataaaatctaataaagttattacatggagccgaaaaaatttgaaaaatgaaaaaatattatttagttatttgccagttatacctgtaacactaccatttattgtttctgattatagtgttaatcaaagaccaactaaagtttctcacaataataatattattaaaattaaaagattttcttttatatgtgaaaagaaagagtatgcattattgaatagcattatttctcaagatgattacattcaacttaattttggaaaagcgacaggaattgaccaagtgattttagaaaataaaaaaggcgaattatttagattaactaatcatatgaagttggaaagtgagtga

SEQ ID NO: 420346 - DNA, 2778 bp, Staphylococcus aureus
gtgaacagcttggatataaaaaataaattattgagtctctatcagaatggtgtcaatatttggattgaaaacaaccaacttcgttataaaagtgtgaaaggtaaatttactcaaaaagatttagaatttttaaaagaaaataaagaagatatcatggcagtacttaatagtaattgtaatttcaacgtaatgagtaatgatacactatttccattaaaagatatacaaagtgcttatttcttaggtggaaaaagtgactttggagatgtttccagtcatgtctattttgaagttatatttcctaaattagatacgttattggttgaaaagatatggaataaactgataagaaggcatgaagctttaaggacagtgattaattcatgggatacacagaaaataatagaaccaaattcattttacaaggttttaattaatcagaatgatgaggggtgtgaagctactcgtaagaaactaatgaacaaaacttatgatccatatgtatggcctttatttgatattgaagtcacacaggatgtaagtcaatcaataatgcatttatcgttcgattttttaatcttagattggactagtatatggattctattaaaagagttcgaaaatgaatattttaatgttagcgataataattgcgtggaaaacgaagtgattttgagagatatttatcagaaaaatgatatgaaaaaagcgagttcgaagtatttgagcgatcaaaaatattggattgataaaattgaaggattaggtgattatccgaaattaccaatgaagatgaaagatgtaaaaaaagaatttgatagaaaaacatttgtagtcgatgaatactcttggaaagatataaagcaatttttccaaaaatatggattaacaccaaattctgttgcactaacagtattttcatgtgtcataaataaatggattgatcaaaaaaaatttgttatcaatttaacaactatgaatagagaattaaggtatgaaaacatagaaaaagtagttggagactttacatcaacaaatttattatctattgaaataaacccattacaatcatttatagataatgctaaaagaatacaaaagaatttattacaagatcttcaacataattacttcacaggtgtagagatggtaagagagattagaaaatcaaagcctaacagtatttttccaattgtttttacaagttctctaggtaatggtgatacaaattataagcatatgaaactaagtaacgtaggtctaagtcagtcaccacaagtatttatggattgccaaattatggagtttaatgaatctttatatgtaaatatagacacaagaaaaggaatatttgatgagttattcatagaaatatttaagaaagactacaaagaattcttagagaatattttaaaaaatgttgatacaaataagtttttacagaattggtattttaaagaacgcaataccgataattttaaaatgatttttaaaaacaaaaataataactataatgattcagttaataaaaaaataaataatgcgtcaattgtgttgccgagtgaattagcaaattctattacaaagcaatgtatgaatattttacaggtggaacaattaagtaataatcaaaacttttatgattatggcgcagattcattgatactggctaggctaactacattgattattgaattgtgtgaagaacacggctataaagatatgaaatttgatgatttattaagagcgattctagcagaacctactattggcagaatattattagaaataaataataagaaacttaacaagcaaaaaattaagattcaagagaaaaattctattggtaggttatcaatatttaaagaaaagggaaaaatactgaaagtcttttttcacgctggattaggtacgatgaattgtttgagatatatacttgcggagcttaaaaagggtgattctgatgcgattgctggaattacaattcaaaatcaagagaagtattgtcaaatagaaaaaagccaacttgttaagaaaattagtgagcaatatgcagagctaataattaattcgggatatgaagaatttcatcttataggatattgttccggtggattaattgcagtagaagttgctaatatactcacaatgaagggagttaatgttaatcatgttactttaatagatacatctccttcgccactatctgagatagattatgtagtttcggaaatggcttttatacaaaatcattttattaccattaaagatgtattgccccacattgattacaaaaaattgaatgaaattataagaagtatgtacagcaatattaataccgattctgaatataaattattagattttattgctgagaaatatactgaagaagatcagctactttctgatttagaattgttttttaaaaacaatacatttgatgagagatttgaacaatatgcagagataattgactcgaaaaataaagaaaacagaaacataagcagggaatttttaatatcttcatataaaacacaaatggcaagttgggaaggagcacatatgacgcctactacatatataggcgatgtaacttatttgaaagcagcaaatagaggatatggaacattattaccagttaaagataatactggattttgggaaaaatgctgtattggtgattttaaagaaaaaacaataccaggaaatcattatgattgtatagagaacattgaaaacgcaagttatgttgcgaagataataaaatgtaatgaatag

SEQ ID NO: 420347 - DNA, 579 bp, Staphylococcus aureus
atgaaaaaaatgtcagttaaaaatttgattacagtcggtatctttaccgctttatatttagtaatattttttgtcacatttatgataggatatataccatttttaataccatttcttggtctgatttgtccaattgtatgtggtgtaccgtttattttatatgtaatgaaagtagataggtttggtatggtgacattgacaggattcattttaggtgttgcatttacagttatgggaagcggtgtaatcatgactgtgtttggattaatttttggtctgataggtgatttaataatgaaatctggaaattatagaaattggaaaacaattgcttggggatatggatttttttctctttggatgatgggatttgtagtaagaatgtttgttgctagagatcaatattttaaagagattagtcagtcatatggtagagattatgtagaggttttagagtctataactcctttatggtcaatgccagtcatgtttattttaacagtagttggcggacttataggtgcatggttaggtaaaaaaatgtttagtaaacatttcaaaaaggcgggtctcgtttga

SEQ ID NO: 420348 - DNA, 732 bp, Staphylococcus aureus
ttgaattcaccaactgaattaataatagatcaaagaaatgtctttgcgaaaatggatcctagaattaaaattgctctaacgattacggtaagcactattctgatttcgagcggtagttcacaaaatattttgagagtttgtttaacattattttcattatttttacttttatcgattaacaaaataatattatttatcaaatttacaattgcatttctagtgataatggggttacaaatatgggtcattccttattctgagggtatgattaaatttagtcttttagcatttataggaatatttatgaatatgctccctggatttatagtcggttattatacgttgttttccactaaagtaagtgaattcattgcagctatggaaaaagtgaatttaccaagaagttttataattcctattacggttatctttaggttttttcctaccattgctgaagagtataaaaacattaattacgcgatgaagatgaggggtattacgttttcaaatcactttttaaaatcaattgaatataggatgattcctttaattatatcggtagttcaaataggtaatgacctctcttatacagctatgacaagagggattgattctccatgtaagagaacaaatatatgtgaattaaaattaaagttactagataaattaatattaatagtcatattgattctatggattatttacatcaaggagaagtttttcaatgattaa

SEQ ID NO: 420349 - DNA, 1455 bp, Staphylococcus aureus
atgattaaatttaaaaatgtaagttttaattatgactcatcagaaaaatctgcaattaaaaatatttttcttgaagttaagcaaggagaattgattgtattttgtggtaaatccgggagtggtaagtcaacgattgcaaaattaattaatggattaataccgaaaatgcaaagtgggaaaatatccggacaaatttatattaataagcaggatgtctcagaattggaaatgtatgaattatcaaaaatgattggtagtgtgtttcaaaatccaaaaacacaattttacaatattgatacgacaagtgaattagcgtttaatttagaaaatcaaggattagagaaggattacataaaagaaagaattaactttgtaatgaaaaaatttaatatagagcatttgttaaatcgcaatatatttgaattgtctggtggagaaaagcaaattatcgcatgtgcttcgatactaatagcaaaccctaaaattgttgtcttagatgaaccttcttcaaatttggatatctatagtatgaaaaaattaaaagaaatgattttatatatgaaagagcagggcaagacaatagttcttattgaacaccgtattgattatattatagattgtgttgatagcgtttattacatggaaagtgggaatttagcctttcattatagtgtgaaagaatttaaatctttaccaaaaagcaaatttaaaaaaatggggattagatatagtcaagaagatttactaaagaataagcctgcaacaggtacgagtgatattttgatgaataattttatttatacctacgataagttcagtaaatttaagcaattaaactccaaaactatagctattcctaaaaataatgtagtagcaattattggtaataatggtagtggcaaatcaacttttgctaaatgtttatgcggtttatataaagattttaaaggacaagttatatatggtaatcagagactcaaacgaaagcaacttttaaagaaaagctacttagtttttcaagatgttaattcacaattgtttacagaaagagtggatcaagagctgaagttattaaattttaatgtgaatgatttcctagttgataatatgttggaaaaagtgaagttattagaaaaaaagtatgaacatccattaactctttcaggtggagaaaaacaaagattagcaatatcaacagctttattgagtgagaaagaaatgattatttttgatgagcctacttcaggattagatttatatcacatggaaaaagtagcgagattaattaatgatttacatgacagtggaaaacaaattttcattataactcatgataaatcacttatattagaagtttgtacatatgtcatacactttgaacatggtcagattattaatcaatatccactaaataatagaggattatcacaattaaatggatactttgacctgtaa

SEQ ID NO: 420350 - DNA, 1755 bp, Staphylococcus aureus
atgaaaacgaatgaacattggataaagcttttacttacatttgctcaaggggcaatgtttaaaatttatttatctattttactttcgattattagtgtgtttgctggattagtaccttattggacagtttacaaaatcatactattaataattaatggaaatatcaatataagagaagttgttatatatataactattgcaattgttgcgtatttcatacaggttatctgttttggtagttctacaatgttatcacatgtaactgcttatgatattttatctaatattcgaaaaaaattggcgcaaaaattgatgcgtttaccattaggtgtagttgaatcaaagaaaattggtgaacttaaaagtatatttgtcgataaagtagaaacaatcgaactaccattagcacatattattccagaagttgttggtaacttattactttcgatttctatatttatttatatattagttattgattggcgcatggctatggctatgctagtaacggtgcctatttcatttattgcattcaaaaaattgatgacaggatttaatgaaacttatgagcaccaagtagcatcgaataattacatgaatagttcgattgttgaatatatagagggaattgaggttataaaaacatttaaccaatctcaaagttcgtataaaaagtataaagatgctgtaaatgactataagacacatacattaggttggttccagcgaacatggacatatatgaatttaggtgcgagtatcctcccatctacatttttaggaattttacctgtaggcatgtatttggtttcagcggataagcttagttatgctgaattttttctatgccttgtgttatctctaggtgtagtagcaccaattaagaatttcacaaattatgtcaatcaactcaagtcaatacaatatgctattacggaagtacaccaagtgcttaatttagaagaattagaagtgtcaaaaaaatacaaacacccacaaaataataacattgaatttgataatgttggattttcttacacaaatgatagagacagcttagtattcaataatttatcatttgagattcctgaaaaaactttcacagcaattgtcggtgaatcaggtagcggaaaatcaactattgccaagttgttatctcgattttgggatgtaacattaggtgaaataaaaattggaaatgtgaatatcaaggatgttgatccaaaaaatcttaatgaattagttggttttgtaggacaagacaactttttattaaatcttacatttaaagaaaatattaaattaggtaatcctgaagctacggatgaggaggttgaaaatgctgccaagttagcacaatgtcatgaatttattgaaaagttgccagatggatatgatacgaatgttggtacagttggagataaattgtctggtggagaaaaacaacgagtcactattgcaagaatgatattaaaagatgcgccaatcattgtattagatgaagcgactgcttatgttgatccagacaacgagcaaaaaattcaagaagcattaaatgtgttgacgcggaataaaacactgattgttatcgcacatcgtttatctacgattcaacatgcagatcaaattatggtattaggaaaacaacgtattctggaaaaaggtaaccataaacaattgataaaacaaggtggacattataaacaaatgtgggatatgcacattggagtaaaagaatggggggtatcatcgtag

SEQ ID NO: 420351 - DNA, 1734 bp, Staphylococcus aureus
atgtttaagattacatttaaaattttaaaatgggcaaaaccttatagaaatagaatggtcttagggtttattatgtcatttatcaactctatattcatcgcgctacctatttttttagctgctcaagtgtttaaccgtgttttaaatacaaaaagaattgaagtgtatgaaattatatctgtattagtaattatgattttattagtaatagcaagatttattacggcttatttgaaaaatagatttcaagagagcatcgcatacgagatgagtgctcaagaaagattaaatattggggacaaattaaaaaatgttagattaggttactataacgatcatcatgcgaatgagttagcgacaactgttacaacagatttaacatttttagaaaactatgcaatgaaaatggtggatgtagtcatcaatggttatatattaattaccgtacttatcttatcattgctagttgtatcttgggaggtctcattgttagcgttaattggtgttttgttatccttgcttagtctttacttactagagaaaaaaagtcaccaaaatgcaccagattatcatcgtgttcaaaatcaactggttgaaaaagtattggaagttatacgtggtatccaagtaattaagtctttttcaaaagagaatacaagtctgaatagttttaacagagcggtagatgatagtaagcgtgtaaatacaaaaattgagctacaatatataccgttcaatttacttcacctactaagtttaaaggtagtttcagtatttattgttttggtagcttgtttactttatatgaatcaatatatcgatgtatcggctttaataatgatatctattttttcatttgtgattttcgagagtgttgagaatgtaaataacgctgcacatgtattagaaatgatagatgtaacgttagatgatatagaagatattaaaggtgcgccgacattagatgaaactggcaaagatataccaattgaaaatcataatattacgtttgagcatgttaatttttcgtatgagaaaaaacaagtcattaataatgtcgatttaacaatagatgctaaaacgacaacagcaattataggaccgtctggaagtggtaaatcgactttatgtcatttactgttaagattttatgatgttgatagtggggttattcgtattggaaacattaatattaaagaaatgaaattggcaacgctcatgtctcatataagtgcagtatttcaaaatgtatacttatttaatgacactatagaaaataacatattatttggaaaacctgatgcatcaaaagaagaaataatacgtgctgctaaacaagcgtgttgtcacgattttatcatgtcgttacctaatggttatcaaacgatggttaatgaaaagggaaataatttatcaggtggtgaaaaacaaagaatatctattgcaagagcgatattaaaagatgcacctatcattattttagatgaagccacagccagtattgatcctgaaaatgaacatcttattcaaaatgcaattgatgaattgagtaaaggaaaaacggttataactattgctcataaaataggaactataaaaaatgctgatcaaataattgtacttaataacggtgaaatcattcaaaaaggtaaacacaaatccttaatcaaagaacctggtatgtatcaagaatttataaaaataaaaagagattcagaaggttggagattataa

SEQ ID NO: 420352 - DNA, 1053 bp, Staphylococcus aureus
atgtataaaaatataggggttttaggtggtaatggaactttaggacagtgtttaacgcaattattgagcaaacaaaaagatattaaaattaaagtggcttttagatctaatgattttttaaaagtaactagtgataatgtgaattatgaaaaaattaatttagattgtttagaacatttaagagtatttataggagaatgtgacttacttattaattgtacaggatactttgatagaagaatgattgaattttgtcttaactctcacactcattatatagatagttcgggtgatttatatatagagaaacatttaaaaggtttaaatattaacttacaaacaaataatttgtgcgccataccttttttgggggttaatccaggtctaatagaaattttagcaacttatgttagccaagtttgtacgacagaaaaattagaattattttttgctggaacaggtgaactttctaaatctgctataagagaagtgattgaaacgtctaatccaccgtattcttatatacaaacagctattataaatgggaaaacggaaaaattaaattttatgatgaaggaaagtaaattattcaaagatatgaaatctttttattgtgtacctttaatcaatcaccatttcgaaaaatgcattatatataataaaatatcatctgcttatttttttaatgcattttatgatgaaactttaatttataaaatgattgaagcgaaatttttgtttcagaatgataaattggaagatgctgtatcattattagaaaaaggatttaaagattatagtgatggaaatataacatctacaatgataaaaattattgtaaacgatatccatgatatagattttaggagttcgatggattggaatgaattaacggcattaacaatatatcatacggcacttttaattttaagaaacaaaattaaaagttatggtattaaaagtgtatataaagctataaatgtatctgacttaataagtgaaattaaaaagcaccccaaaataaacctagaaatgaatgatagaggtgaatga

SEQ ID NO: 420353 - DNA, 1338 bp, Staphylococcus aureus
ttggttaataatttgcgtaaatggttaaacagtattcaatacaaagaagaaaaacaagctataagtgattttaatttgagtcaactgaagtataatttatgtaaccactctaaagacatacttaaagaagactttatgatgtatgaatttaatggaattacttatataggtattggtaaaatgttggaatttaaagtgacaaacaaagaagttgttattaaaaatcataaagaagatttggagatagttgaaagttatgaatcattaccagaaatactagaagagatatatttagtatttaaagaatttagtttaaaaacttttggctatataaatttcaacctagcaaaatatttatatctgtctatacatggttgtaaagatgatgaattgatatattttttcattccatctgtgacagtgaaaattagtgatgggaatatgttagttcaatatttagaagaaaatccttttattaatttagtagagataaataaaaaaataaatttaaagcatttaccgcttatgtatgatactgaagagatattattaaatcaaaatagcgaaatttataaaagtaatgttgaaaaagctgtcggcgacataaaaaccaagctttattctaaggtcattctttcaagaaagattattatttcagaaagaataaacatgttgcgcagttatttctcaggattaaagattaataatcctgcgcgctcatatttgtttgatatcaatggaaaagaattgtttggattttcgcccgaaacaattgttcaggtgaataatgaaaatcaagttctgacgtttccgctggctggtacaagaaaaaataaagaatatttaaaaaaggaactattgacagacattaaagaagtaggagagcatgcggtttcagttaaattagcaacggaagaactaaaaaatgtttgtaaaacggatactatcaaagtagacgaatttatgaaaatatatgaaagaggttctgtacaacatttgggatcagtcgtatctggaaaactatataaatctaattattgggatgcattactatctttataccctgccgttacttcttctggaatacccaaaaaagaaagtattcaagctattgaaaagtatgagaatgacgaacgtgatttatatagcggaggagtattcttaattgataaagatattggatttgatgtagctttaattttaagaactgtttttcaaaatgaaaatgaaacctatgcaagagcgggtgccggtatagtagaacaatctcttcccgagagagaactggaagagacacgagaaaaattaagctctgttattaaatcattaagtttataa

SEQ ID NO: 420354 - DNA, 393 bp, Staphylococcus aureus
atgaaaaaaaatattacaaaaactattatcgcatctacagtaatcgctgcaggtcttctaacaacagcacaaaatgcaaatgcttttagttatgaatggaaaggcttagaaatcgctaaaaaagaagctgaccaagctaaaaaagatgaagaacgtgctgataaattaataaaagtagccgagaaagaaagaacttatacaggtaaaacggttgaagatttatatgtcattgctaaaaagttaggtaaagggaatacaatagctgtagtaaaaattatagacggcggtgaaagaggttactatacgtttgatatcacgcgtccattagaagaacatagaaaaaatattccagtggtcgctaaaggcgaaatcgactccattagttggtattaa

SEQ ID NO: 420355 - DNA, 555 bp, Staphylococcus aureus
atggttgatttagtaagtagttggatagtattttttcttccaatgatcaattggtttatccctaaaaattacgtcaaaattagcaaggaagaatttgatgtcttaaacattgttaaaccagttagaaataatgctttttggcctgttacaggcgctttagttttacttgtaaccttgtcgaaaaaatatatttatttgctcaacacccatttagacaaaaaaacagtaataatcatatgttttgtcatatttctatgtgtaataacatgctttttatacttgaaccaaaaactaaaactacatatttgggacaaaaataaaagtgaaaacgaaaaaattatattaatacctactttaaaaaatatatttatatctttgtttgcttatatattttttggcagcttttcaattttatctctaaatatattattaacaatggattctcaaaatataataggatttcttggttggattgtaacgacgtcatgtttcttttttgttaacaggtcatcaataatcggtggaaatgttcgtgtcatacttaaaaagtattag

SEQ ID NO: 420356 - DNA, 444 bp, Staphylococcus aureus
atgaaaaaaagatatgtatttatggtagttgttgcaatattaataggcctaattattattgcatatgggcataataaacaaataaagtatcattacattgagacacaagaaaagcggatagatttgtattttaagcataatcttagcaattataaaaatatgaaggtgacagattttcataaaaatcatatgggaggatattttgttgaaggttatattaatgataataaagattatgaattccaagccagtattgattcgggaggtgatgatcaatatcagaaagatattggttaccatgaagataaattaggcaaattattcaaagaaaaagatcctaaatataaactctctgtcgatgaaataattgaaaaagaacacttggacaaaagtgattatgaagcggaaccaccattattcttcttttcggggagactagagtga

SEQ ID NO: 420357 - DNA, 1173 bp, Staphylococcus aureus
atgacaatagtattctcaaaattaattgacgtatttgatgaattcatgtatcccactttcttttcatacgaagcaagagtgggtgagaaaactaaaatatttataactttattcgcatattatgatgaaaatagtaggaaagactatttttttaatgtgccagtaaataaaaagaaatatgaacaacttataaatggtgaaattgaaattaggtctttgtttgtaaacaataaagatggtttttttacagaaggttcacctgaaagtgtagcaattatagaacctatacatttaaacgttaacactgtcgattatttaccagaaaaaaatttattcatggtatatgatgatgatgaatttttgattgtcgatatagaagaaatgaattccgagttagataatagtgaaactgtagagaaattatttgacttaaacattggtaaacaaataaattcatcagaatataataataaagaaggtttaatgattgcttttagtaatgataatcaaattataaaagcagattcgttaggagtattgataaccaagacgagtgaattgtttaataaaataagtaataatttattaaatttaaatgtagttaaaccttttgaaagtagttttggtatttctttggaatttgattcattaaatttagacattaatgataacgaaatatatatcaataagtttttaaaccttctaaactttgtttctaatgataaaaaagaagattttttcaatgaatttttagggttgtactctatcaaagaaaaagatgagttcttaaatattcttaatgaattaagttctaatgacatagaaatgaaaagtatgtattataacaatataaatggaatttataaaggcagtatattgaaaccatcagaagccaaaaaatttataaatagagtttataatacaacagaaacaaaagaaactttaaatatcaataatgcaactatatataaaatagatgtaaaaaataactcatttggagttataatcgataatgatatttatactggaaaattaggagaaagtttacaagacaaagaagaaacacaatttactgttccttcagaaaaaaatgttgttttaacacagatatttaaaaaagacgaatttactaaaaaagaaagaaagcattacatattagaatctataaactaa

SEQ ID NO: 420358 - DNA, 420 bp, Staphylococcus aureus
atgtatgaatatgaatcaaaatatccaaatcctaatgattttcaatgtcctccaaaagaagcaaatttcgctgaaggtataacattttataaatgtagcgacacatatgaattgccaagccagtacatggaacctatgatagaaaaaggttcaagatttcctaaaaacaatgaagaaagatgtttaatgtgtggtcattctgtctttgtggatgataaggatatatttgaattgattaacaaaaaaggtagaatagcaaaaggaataaaagataaatggagatttgtcttttattttgaaggaagccaatttagtaaatataaatttacaccttcaaaaagtaataaaaagcactatacatattggcattatgggagtaacgatataatatatagctataagagtgctataaacgaatga

SEQ ID NO: 420359 - DNA, 327 bp, Staphylococcus aureus
atgcaaatattagttaacaagcgtaatgagataatttcatacgctatcattggtggctttgaagaaggtattgatattgaaaatttaccagaaaatttctctcaagtttttagacctaaagtctttaaatattcaaatggggaaatagtttttaacgaagattattcagaagaaaaagatgacttgcatcaacagattgacagtgaagaacaaaacacagtcgcttctgatgacatcttacgaaaaatggttgctagtatacagaaacaacttgtgacacttaataaaaaattagaagaggttaaaggagagacggaaaatgcttaa

SEQ ID NO: 420360 - DNA, 1776 bp, Staphylococcus aureus
atgcatattaacttaaatccattgcagctagctgctataaatgaagaagaaaatgcactcgtattagcttgtcctggtagtgggaaaactcgtgtcctaactttgaaaattgctaaagaacttgaaaagttagcacatagaactgatagaattgtagcacttacatttacaaatcgtgcagcagatgaaatcgatagaaggataaatactatagggataaatatatcgcagttatggacagggaccatacattctttttgtttgcaatggattattagaccatatggtatatatttattagaattacagaagagttattcaattttagatgaatttaaagcaaaggaattgaaagatacttttaaaagtgaaaatggaataccaaagaatgatgaatttctcactagaatagataagtatggtaactatattaataagaaagagaaatataacaatgtggcaaaatcatatcatcaacacttattagaaaataatttgattgattttgatcttattttgtacttttcatattatttaatcactaattactctcaaataacaaaaaatcttgctagatttttaaaatattttttcattgacgaatttcaagatacacaagacttacagtatgcaattgttggagaaattattaaagcttcatcaggtaattgtaagatatttttagttggtgatccagatcaagcaatattcagttctttaggtggagtagtgaaaactccaccacagattagtgaatatattggtgggtactttgtcaaggaattgggactaagtaagaactataggtctacacaacgattaataaatctatttagtgaatttcaaagtacaggttttgtaatagaaccgggagcggatcatcgagatgaagaggggattattttatttgataaaggcatacctaaagaagatttagtgaataggattactgaaataattaaagaagaaattgcaaaaggtgttcgtccaaatgatatctgtattttggcgcctcaatggagtttcttaacatctatagctagaaaattaagagcaaatttacctggtttagactttgattcacctggtctaaccttattaccaagaaataatgataatttttggtttaagttagcaagacttattttaatttctaaggatgcgagcaggtatttagtaagagtgaaatgggcaaaagagttattagaagaattaactgcaataacttccatacctaaagaaattgataatgatggttgtagaaaattacttaaaaaaattaattctattaatgttaataatgaagatgctattaaatatttggaagagtcttttaattatttttttgaaatactagactttgattatagttcgagtgatttattacaagaacagtggaatagtttctttaacggtataaaaagacgttatgaaaatcctgattttaacaatattcctaaagatataaactatatgaaaaagatgtttaattcaaaagatgggatagtcgttaatacttgccaaggtgtcaaaggagaggaatttcatacagtaatagcttttggattattaagagggcgcttaccccattggaatcaaataataggacaatctaagagcaatgaaataagtgagtctaaaaaattattatatgttttatgttctagagctaaaaaaaatttatatctatttgctgaaactggaagaaagacaactaaaggtggaaattataaagtgaataatgaactgaataaagtagattttaaaaaaatataa

SEQ ID NO: 420361 - DNA, 2136 bp, Staphylococcus aureus
atgtatatttctcaattagaaataacaaatttcaggaattttaaaaatacaatatttaaatttaaaaaaggagtaaacacgttaataggtgagaatagttcaggtaaatctaatgttttatatgcattacgactacttttagatgaaaatttaccttttaatgccacaaaacttttagaaacagacttcaatcaaaatattgatgattggaaagggcattggataattctaaaacttacattcaaggatttagattcgagtgcagctgctagttttgttgctcatcattcaaaaaacattaataaccatgaagaatcgattggtacatatgctttatatttcagaccaaataaaatgattaggaaaggtttgtttgattttacaaaacaaattaaaaatcttcaagaaaataagggagacacttcagaagtgagaactaagcttaaaaattttttaaatgaagttacactaaaagattatgaaagtgttttttcatatagagtaaacgctgactttaatgatgatgaaaaatataagtcactagtaggtgattttaaaaatgggatttttccaaatccagaagaagaaaataattatttacttggaaatatatctacacatattacattgataaaagaagaagtttcatgtacctatgttaaagcattaagaaatgttatagcagaactaaagaaaaaaaagagtagccctttattacaattattaagaggaacaactaatgatattgaagtttctgaagccgaagaaataaaaaaacaagtacaaaacttaaacaataatataagtgaattaggtgaggtaagtgaattaaccaagaaaataaagtcttcactcaatagaactttaggttatacatattcaccaaatgtaaatattaaatctgaattacctgaggaagttgaatcattactccaatcactaactttatgggttggtgatgattcaaatagtaatcaaggaaagttagaagatttaagtttaggtggagcaaacttaatttatattactttaaagctattagaatatgagttttatcaaaagcaagaagagaaagcagcccactttttgctgattgaggaaccagaagctcatattcatacgcatgttcaaaaaaccttatttgaaaaatatcattttgaaaacacgcaagtgattattacaacacattcaacacatatatcttctgcaagtaaaatagattcgatgaatatattgataaaagaaagaggttccacacgagtttgtcaaccaagtaatggtttagatactgctacttgtaataaaattgaaaggtatttagatgcaacaaggtcgactttgttattcgctaaaggtgttattttagttgaaggtgatgcggaactgatattgatcccatctatgtttaaatcagtattcggaattaatcttgatgaaataggcataagtataataaatatgagtagtaccgtttttgaacatatagcaaatttgtttaatgatttaagaattcatagaaaatgtgctattgttactgacctagatgaggcaattgaaaccttacctcaagattcaaatgatgatactcctgaacaaaaaactatgagaaattcacaagaagcaggtgaaaaaagaaaaaaattattagatgaaaaatatgattctaatccatgggtacagatattttatacacagcatacatttgaagttgattttgcgataaatatgaacacgcttgcaataaagaacgtattgcctataatatacaaagaacaaaggtgtatagataagtctatggatgagttaaacagtgatgatgagagatttgtaggtaaagaggcgcttagattagcaaaaaaagagggaaaaggatggtttgcattattaatttctgatgagctaacttacgaaactaatattccggaatatattttaaaagcgatagcgtatacttctggacacattacagaagagcatttaaaggcaatggcactatatcgaataaaaaagatgcataaaatagacacaaatgattttgaagaaaagagcttagcagaattaatagatattttaaatggtgataaagtggatgttttaagcaaattcgaaaaacttttgaagggtgacttaaaataa

SEQ ID NO: 420362 - DNA, 168 bp, Staphylococcus aureus
atgcaatgtaaaagatgcggaaataaagagtttacagaaaccacacagtacatgaagattaaaaagtctaagttatcgataaatggatcggaaattaaatatattttttgtaagaagtatggtttagttaaagacattgaggttttaaatccccaaacctttgaataa

SEQ ID NO: 420363 - DNA, 705 bp, Staphylococcus aureus
atgaaaatgacagtaattacgaaagcaagtttagcactaagtattttagcaacaggaacaataacatcaacgcatcaaactgtaaatgcgactgaacatgaagcaaaatatgaaaatgtgacaaaagatatctttgacttaagagattactataatggtgaaagcaaacaacttaaaaatgttatcggttaccattatagcaaaggtggaaggcactatcttatctttgataaaaatcgaaagttcacaaggatacaaatttttggaaaagatatagaaagatttaaggcacgtaaaaatccaggattagatatatttatagttaaagaatcagaaaacagtaatggcacagtttattcatatggcggtgtcactaagaaaaatcaagacgcttattatgattacttaaacgcaccaaaattcgttgttaacaaagaagtaggtaaaggagtttataagcacattaaaagacactacatttataaagaagagatttcacttaaagaactcgactttaaattgagacagtatttaattcaaaattttgatctgtataaaaagtttcctaaagatagtaagataaaagtgataatgaaagatggcggctattatacgtttgaacttaataaaaaattacaaacaaatcgcatgagtgacgtcattgacggtagaaatattgaaaaaatagaagccaacattagataa

SEQ ID NO: 420364 - DNA, 351 bp, Staphylococcus aureus
ttgaaaaatgtcaacttagatagaacacaagctcaccgtttaattaaagtttctgaagaaattaaagatgttggtacacaccaacatttaggtatgagagctttattggaaatagctagtttacctgtaccagaacgcaccaaagaacacacaacatcaaatggcgaaactaaaacgccagatgagatgacagttcgagaattacgagagttaaagaaacaacttaaacaacgcgatgaagaaaacgcacaacttcaatcacaaatgaaacaagcacaacgttcggaggagatagcgagaaagcaatataaatatgggttaaataattatatttttactataaaattttag

SEQ ID NO: 420365 - DNA, 294 bp, Staphylococcus aureus
atgaattgggaaattaaaaatttaatgtgtgacattaaattgataaaagaaaaacttaatgatttaaatgaaacttatggttggtggattgaaaacacatatatttctagagatataacaacaataaaagaatatgaaagatactgccgagcttataccgaacatagaattctaaatgaacaagttctagagctttttggtatttatttaaatcgttttgatgaattaataacgaggtttgatgcattagaaaaagcgtcatctttcgccgaccaaagccaagataacgcataa

SEQ ID NO: 420366 - DNA, 786 bp, Staphylococcus aureus
atggcagaattaccaacacattacggcacaattattaaaactcttagaaaatacatgaaattaactcaaagcaaattgagcgaaaggacaggatttagtcaaaacaccatttcaaatcacgagaacggcaacagaaacattggagtaaatgaaattgaaatctacggtaaaggtttaggtatacccagctatattctacacagaatatcagatgagtttaaagaaaaaggttatagtccaacattaaatgattttgcaaaatttgataaaatgtatagttatgttaataaagcctattataatgacggcgacatttattattcatcatacgatttatatgatgaaacaatcaaattgttggaattgttgaaagaatctaaaatcaatgtaaatgacatagattatgattacgtacttaagttgtacaaacaaatcctttccactgatacagaaaaatcaataataaattacgagactttagcaaatactcgaaaatcaagcgataaaaaaagagaagtaacaatagaagaaattggtgaatttcacgaaaaatatttaaaactattattcaccaacttagaaactcataacgatagaaaaaaagcattagcagaaatagaaaaactaaaagaagaatccatttatttaggtgaaaagttacgcttggttcctaaccatcattatgatgctattaaaggtaagccaatgtataaattatacttatatgaatatcctgatagactagaacatcaaaaaaaaatcatacttgaaaaagacactaattaa

SEQ ID NO: 420367 - DNA, 1725 bp, Staphylococcus aureus
atgaaatttaagtcattgattacaacaactttagcattaggtgttttagcatcaacaggagcaaactttaataataacgaagcatctgccgcagctaagccattagataaatcatcaagttcagttcaccatggatattctaaagttcatattccatatacaattactgtaaacggtacaagtcaaaatattttatcgagcttaacattaaataaaaatcaaaatatcagttacaaagatttagagtataaagttaagtcagttttaaaatcaaatagaggtattagtgatatagatttaagactttcgaagcaagcgaaatatactgtttattttaaaaatggagcaaaaagagttatcgatttgaaatcaggtgtttatacagcagatttaatcaattcaagtgaaattaaagctattaatattaacgtagatacaaaaaaacatgtcgaaaataaaactaaaacaaactatcaagttccatattcaattaatttaaatggtacatctacaaatattttatcgaatctttcattttcaaataaaccatggataaactataaagatttaactggacaaataaaatcagtgctgaagcatgatagaggtataagtgaaaagaatttaaaacatgctcagaaagcatattatactgtttattttaaaaatggtggtaaaagaattgtatcgttaaattcaaaaaattacacagcaaatctgattagtgtaaaagatgttaaaaaaattgaaattactgttaaaacagggtctaaagccaaagcagagagttatgttccatatacaatttcagtaaatggcacgtcaacaccaattttatctcaattaaaatttaaaggtgaatcaagagttagttacgaaacaattactaataaagttaaatcagtattgaaacaagatagaggtatcaatgaaattgacttgaaatttgcaaaacacgcgaaatatacagtacatttcaaaaatggaaaaaaacaagtagtgaatttaaattcaagtattaagcagttgaatttattatttgtaaaagatattaaaaagatagatatcgatgttaaaacagtttcaaaagctaaagcagatagctatgtaccatatacaatttcggtaaatggaacatcaacaccaattttatctaaattaaaactttctaataagcaattaattagttataaagatttaaatggcaaagtgaaatctgtattaaagagtgaaagaggcatcggtgaaattgacttacaatttgcgaaacaagcaaagtatacagtacatttcaaaaatggtaagaaacaagtagtgaatttaaaatcagaaatctttacacctaatttatttagtgccaaagacattaaaaaaattgatataaatgtaaaacaaaactttcaatctaaaaaattaagtaatagtgttagtaaagtaaaaattccagtaactttaaatggacattcaggtttagttacaagtgactttgtattccaacatgcgaataaaattacacttaatgacttaagtgttaaacttaaatctgcattagcatatgatcaaggtattactcatcgtgatatagcaggtgctgaacgtgctgtatataaagtgtattttaaagatggttcgtctaaatatgtagatttaagatctaatgttcaccattcaaaagtttttaaagcaactgacattaaaaaaatagaagttaatattaaattttaa

SEQ ID NO: 420368 - DNA, 1503 bp, Staphylococcus aureus
ttgaagaaaaaagtattaattttaacattgggagcgttgtgtgcttcacaactttggaatagcgataatgcaagtgcaattgtgacaggcgagaagaatccgtatacttcaaaggcattgttggaaatgggacaaaagaataaaaatatatcattagaccaatataaagatagtctagaaagcgtaatgaattttggagctgttgacggggattacggctatgatcaacctgaatataaagaggcaatagatacttatcagaaaaaaatatttgctgaaatagatgcaattaataaatttttagctgaagagaaaaaaatagaaaggtacaataagaaaagtctttctatacctataaatatattgggtcttacacaacaaaggtattcggcgatatatcaaggtattaaagaaagccaaaatgaacttaaatataaaattgaaaatattgaagaaaggcattcagatcttaaaaaatttgattgggaaagagaaagagaagtaagagatgaattaaacgaactagagaataaaattttgatgttaggtcaagcttttcccaaaaaaacagaagctagattagacctttataataagttagatatgatagtaggttttagtgaagaggaaagggaaaaaaggcaccctaaaaatgaaaggcttttaaaagagcgaattgaagatttagaaactattattgatgaattttttgacgaaattaatgaaaataggcctacagatattccagctttaagtgacaatgaagaaaataataaagtaagggctaaaaagttaagagaagatactaaggaagcgaaaaaatatatatcaaaaagaagtaaaagaagtttagataaacaaaagcataattctttatcagaagaagtttcagaagaacaaaaagttaaatataataaagaaatggaagaaatcaaagaaaagtttttagctaaatctaaacttagaaacccagtggcttctttaattgatgatgaagatgataatggaaagcacaagcaactaattatttctacgccaacaaataaaccaatagcaccacctacatatactgaaacgacaacacaggtaccaatgccagtattagagcgtcaaactcagcaacaaattatttataatgcaccaaaacaattggctggattaaatggtgaaagtcatgatttcacaacaacgcatcaatcaccaactacttcaaatcacacgcataatcatcttattgaatttgaagaatcgtctgctttacctggtagaaaatcaggatcactggttggtataagtcaaattgattcttctcatctaactgaacgtgagaagcgtgtaattaagcgtgaacacgtgagagaagctcaaaagttagttgataattataaagatacacatagttataatgattgtgttaaagcacaacagaaagttaatactctaggcgaagctcataaaaactattttaataagcaaattaataaggtgtataacggtaaatag

SEQ ID NO: 420369 - DNA, 351 bp, Staphylococcus aureus
atgaaattaaaaaaatgcattataactactactctagctattggtgtaactgtttcgtcaatcggtttacacgaggggactgctaaggctagtacatataaacaaatcactgcaaatgaatattatgatcaaaagttagctaaagaattaaaaggtttactggatgaacttaatgttaatgtattagctacaggtagcttagatccatattataaaagaaatgtattgatgtatggtttcaaagcaaaaatggctctaaagtctaagaattattcaaaaatgtcgatagcgaaagaagagcttgaaaatttttatcgtgaaatcgatgaagctctagctaatgattactaa

SEQ ID NO: 420370 - DNA, 663 bp, Staphylococcus aureus
atgagggaaaattttaaattacgtaaaatgaaagtcggtttagtatctgttgcaattactatgttatatatcatgacatatggcgaagcagaagcatcagaaactagtgatgctattggaaatcacaatgtgaataaaacagaagaatctaaaactgcgtcacaacttgttcaaaataataaagaaataaatgcggatcaaacaaaaaagaatactgtcaaattggatcctatcaagccaggagatcaaaaagtcacaggtactacattaccaaatcaattaattttattaagcatagacaaaaaagatgtgagttcatttgatagtggaaatagtgagctagtgatgtcaaaggaagatggaaaatttgagtatgacttaaacggaagaaaaattgtccataaccaagagattgaagtaacttcatcttcaacggaaggtttatttgacgatgaagaggatgaagaagtggaagaagctacaactgaaaaagctggcgctgaggaagaaagtacagaagctaaagctacatatactacgcctcgatatgaaaatgcctataaagtgcctgaaaagcaattagataaaaaaatggacatcatcaagttttcatcgaacctattactgaaggatcaggcattattaaaggtcatacttctgtaa

SEQ ID NO: 420371 - DNA, 426 bp, Staphylococcus aureus
atgaggaatttaaaaagcgtagtattgtacataagcattacggttttgagcatttttataatagggagtaatagttcaagcgatactgcaaaaaaaccaaaagaagactcaaaagaagaccaaatcaaaaagagctttgcgaaaacattagatatgtatccaatcaaaaatcttgaagatttatatgacaaagaaggatatcgagatggcgaatttaaaaagggtgataagggtacatggacgatatcaacagattttgctaaaagcaacaaacaaggtgaaatgaatagcgaaggtatggtactacattttaatagaaatacgaggacagcaacaggatattatactgtaagaatcacttatgatgaagtggataagttgacacgcgaaaaaaataccgtgttgaatttaaaaacaataagatag

SEQ ID NO: 420372 - DNA, 1095 bp, Staphylococcus aureus
atgtttaaaagaattttattttttctaaccgtcttattattaatttcttctactgcttttgatattattggtagtaaaaagtttgcatcaggaaaggtcgttaactctaaagattatcatgaaattcaaggagtacatttaatgatgaatgtgactggtgtcgatgaaaatggaaagatagtctatttaccacaatatcttgaatttccgttaacggaaggagatgtattaaactacaagtttatttcagaaaaagtacaacaaacacttgatgcgagcggtcacggaaagtttcaatttgttggttttttagaaggaacaaagattgaatggaattacaaaaacgagcaaaagttttatgatataaccgattctggatttaaagttcctgattatactaaatacgaaaaaacccctaattataagttgattggcaaagtgatcgttaaagaaaacaatataaaagacacaaaacaatattttgaaaacggagaaaaggttgaagtgtttcatgaagtgaagtttatgaaacgagacggtgattcagatgtgttgtttccaacgtctgtatacttagataccagttttgaaaaaatgcttaaaataggggacaaagtaaacccagatgaactatatgaagctgctaatgagcgttttaaacaaactgatgaatataaacaaggatatagaattgtgaaacgacttacaactagcgcggttgaaaacgagagcaatcatagagaaatatatcatcatttagataatccaatttttgaatatacaatatctaattacagagagatgaatgggaacgagcatattgaaggggtttcagagcaatactatatttctaaaaatggtgatgattattatcctgacaagcaagatgtagaagttgcatttaaaaacgaatcagggatgatatttaaaaaaattaacgtttcgttaactgattcagatatagttagagcaattaaaggatatcttagagaaaataacttaataaagataaaaggtaaaaatggcgaaatgtatatttttaaagggaatatgactaaaaatggtgaaaagagttatgttgctgaatttcaataa

SEQ ID NO: 420373 - DNA, 321 bp, Staphylococcus aureus
atgacttggttcgaagaacacgttgaacctagtgtggaatgggaaagaaaagcagaacaagctgtgttaagtgatgatgaagttaaggcgattactgaatacagagagaagtacaacaatccatatatttacatgtcggttcaaaacaaaaattatcttgttgaatatgtagacagacataccggtgacatagtattacacaatttaaaacttaagaaatcatacagaagtagagtgcatcaatatctttttgtcggccaaatagtagtgccaggcgaaccaaaaggcataatttacgaaacatctttgataataagataa

SEQ ID NO: 420374 - DNA, 153 bp, Staphylococcus aureus
atgcgtgaaaacaatcgaaataatcaacatagtcaagaaagaattgaaaagagaggtaatcctttaaacgaaggtatcgaaaagaaaagtccttctacagaattaattaacgatataaaaaatgatataaaaaacgcaaaagataataagtaa

SEQ ID NO: 420375 - DNA, 618 bp, Staphylococcus aureus
atgaatcttctgataacgattttattatcaggaataataggctatattccttatagatatttaatatatactagttttattagcgaaaaaggcaataaaaacgatattttcaaaatgattattttttctatagaagtttttttaataggatatattgttataatttgtagtgttaaaatacatggcgaaaatataccttctaactttgctaatctactaccatactttgatctaacgaatatttttataattattttccttatactgttatttacatttttaattaatccgttaataataataggttctcgatatataataaatttcactagaaaaatattaaaacttgaaaaaatatgttttaaagataaaagagatgcactattcaataacaataaaaaaagtgtatttgttattgtaaaagactttgataataacataatcaaagaaggttcaattaaaaattatactagccaaagaagtagtatagatattttagaaattgaaaaacaagattttaaagtttctgacttgaaattagttccaaaaaaattcgaacatcattctttattagatttaaacaagcaattaatattcgaaatatatttagaactttaa

SEQ ID NO: 420376 - DNA, 345 bp, Staphylococcus aureus
atgagaggaaaaaaacatatcattgcaggagttttagttgcagttttatcaacacccttagttacatcattcgagtcaaaagaagtaaaagcagaaagtattaatgcaaatacatatatcaatcaaaatttggaaaaagaattgagagaattacttgatgagcttaacgtaaacgaattagctacaggaagcttgaacccgtatttcaaaagaactgttaaaaagtatggatacaaagcaaaagcagcattaagatctaaagattttacaagaatgtctcaatcaaaatacgaactacaaagcatttatagtgagattgataaagctttaggttatgaaaggtaa

SEQ ID NO: 420377 - DNA, 981 bp, Staphylococcus aureus
atgaaggtaaaaaaaatagtaaaatcatcaatagctacatcaattgcattgattatgttgtctaatactgttgatgcggctcaatatattacacctgttaacgagaaaaaagtcgatgacaaaatcactttatataaaacgacagcaacatcagataacgataaattgaatatgtcccaaattttaacttttaatttcgtcaaagataaaagttatgacaaagacacgttagtgcttaaagcttccggaaatattaactctggttatacaaaaccaacttcagataatagtatatcttcacagttttattggggggctaaatacaatgtgtttattagctcagagggcaatgactctgtaaatgttgttgattacgcacctaaaaatcaaaatgaagaatttcaagttcaacaaacattaggttattcctatggtggagacatcaatatatccaacgggctgtcaggtaagttgaatggatcagaatcattttcagaaacaatcagttataaacaagaaagttatagaacaacaattgatagaaaaacagactataaaacaattggttggggtgtcgaggcacacaaaattatgaacaacggctggggaccatatggtagagatagttatgattcgatatatggaaacgaactatttttaggtagtagacaaagcagttcaaatgctaatcaaaatttcttgtcaacacatcaaatgccgatattggcgcgtggtaatttcaatcctgaatttatcggtgtattttctcacaaacaaaacaaaaataaaaaatctaaaatcaaagttacttatcaaagggaaatggatgagtatgtaaattattggaatggaatacactggataggttttaatcataaagcgcaaaatatagcaactcacacttcaatctatgaaattgattgggaaaaaaatacagttaaattaatagataaacaagcttacgaaaaagttccttcataa

SEQ ID NO: 420378 - DNA, 1095 bp, Staphylococcus aureus
atggctaaacgcaaggtgaaatttaagatattcaaaattagcaatttaataacagatacaataaaaaatagtactacttataactattacaaccatagaattattgattttattctattgaatattctaagtcataagaaaaaggacagaaaaaaaacttataactataagacggaaactgtatatttgctaaattacaatccgtactttaattctgaatatagtcatgggcaaattgttacaattagacatggcaaagaacaaagaaatgtaaatgtagaagatttatctttggctggacttattaaaactaatcaaggtattgaatatacaatagacttcttcattaataagcaaaagggttatatatttgttgaacaagatgaaaactatgttttaaccatatcaaaattaagaactttattaaggttatttacgaaagaagcaagacaatatgttaaatacttaaatactttagaaggtaattatctaattgaggataaacctattattgatattgaaataataaaaccattaaatattaaagaacaaataaaattgttaacttcagttaaatcagttagcttatttgataaagatcaaacacaagatagggatattgaggatattgattttgacaatgaaagtaacgataataactttttcaagttagcttcggaaactataagtgaatatgatattggtgattatgatactattttaaaattgaccaattttaaaaaaagaagatttgcaggggatctagaaaaatttattaattatgtcatagaatcagaaagatttggcggttattcgattgaaggtacagatgcttatggagtgaatagagtatttacgcctgatatgttaacgagagatattcaatttgaggacgaagctgatagtaatggaatagtaaatattaataaaaagattgattttatacagaaatatttatctgacaatagtgataatatgccaaaaactgtaattagaactgaacctgattataaagatattaaaaattttttaaaagaattcttaaaatttaagggtgattgtactgaagtcgacaaaaaagaaaaagaagaatag

SEQ ID NO: 420379 - DNA, 633 bp, Staphylococcus aureus
gtgattgtactgaagtcgacaaaaaagaaaaagaagaatagtgtcaattctcttttaacactttttagaatacataaatcagttttaaaagattatcgacattataagaagttactttgcgctactatattattatcgataatcatatcattgattttaaattgttcgtcagataacatttataattcagtcgctgattttaataagttaattttaccttactattcaattagtataggctttactatttcttcagctacctttttaattaactctatgaccaaagaaaaatatatagatattggtaaagggactaatagtaatgaattgatccaaagaaagttaacagaattaaaaagtaagtacattcgagttatgtctttagtgactttttatgtattatattcgttattgttattaataattctattcatgcaaatccttattggtaagtatattataataaatcaatacatttctttatttgtgaatatcttatacgttggtgctcaattcttcttaatattttattcttttgtaattttttttctaatagtttattcagtttatctatttagtattacatatataaatcaaattatagaacaagctagaaatgaagttaaaaaataa

SEQ ID NO: 420380 - DNA, 354 bp, Staphylococcus aureus
atggatcatgcaggaaatttaggattaaacgatggaagttacataacacttgatggatatgataaattacatttttataatgatataccaaacgaagaaatttcgtttactacttatgaattacaaagaaatgaaaggagttatcatcgtgcgattaactgtttagcaaaatataactttgtgggtattgagagaaaatacactaatgctgaatcagaacttgaaatagcaggtaagaaatatgtatacgaaaatcattataataatattggtgagactgattcacataatgaaatagcatttttacaaacattatctgttagcactatatcagtatatgaacaatggaattag

SEQ ID NO: 420381 - DNA, 567 bp, Staphylococcus aureus
atggaattagaaacaacgactattatttctatttgtactgctttactttcattgttaagtctttcaattgcatatttcaatagattagataatgttagacctaaaatatttgtaatgtatagagaccaacgtgacgatcaaggtagagttagaaaagaatggcttgaaattaaaaatttaggtaaatctccagcaataataacgaaagtgaaggtaatttgcgaactagatattttaacatttaatgaagaaattgaatttatagatattaaggaaagagcaaaaagtcattatatgtcattagaaaacgttttaaataatcggtgtaaaaataaaatccttcaaccagaatatgaaattattatcgaccttaatatggtagcaatgtgtgaatatggaaaaatagataaatttaaatttttagacgaacttgagaagtatcgattagaaaatgcattggctaattgtgattatgacatatctataaaagtgaaatatactagtaacattattaaaatatttagtaaaacaagattttcaactaaaaacaaagtaatcattaaatga

SEQ ID NO: 420382 - DNA, 177 bp, Staphylococcus aureus
atgcttaaattaatttcaccaacattcgaagacattaaaacatggtatcaatggaaagagtactctaaagaagatatagcatggtttgtagatatggaagttatagacaaagaagaatatgcaattatcactggagaaaaatatccagagacaaaagatgaaaagtcgcaggtgtaa

SEQ ID NO: 420383 - DNA, 381 bp, Staphylococcus aureus
atgaaaatcacagtaaatgataaaaatgaagttatcggatacgttaatactggcggtttacgcaatagtttagatgtagacgataataatgtgcctatcaaatttaaagaagagttcgaacctagaaagtttgtattcactaacggtgaaattaaatataacaacaactttgaaaaagaagataaaccaaatacatcaagccaagcgacagaattaagtgataaccaacttcgcggaatggttgcgagtatgcagaagcaagttgttcaaagcacaaaattgtcgatgcaagttaataaacaaaacgcattaatagcaaaacaaattgtggaactcaataagagattagaagaggttaaaggagagactgaaaatgcttaa

SEQ ID NO: 420384 - DNA, 195 bp, Staphylococcus aureus
atgacggaggttaaaattaaaactatttcaggtggagtttattttgtaaaaacggctgaaccttttgaaaaatatgttgaaagaatgacgagttttaatggttatatttacgcaagtactataatcaagcaaccaacgtatattaaaacagatacgattgaatcaatcacacttattgaggagcgtgggaaatga

SEQ ID NO: 420385 - DNA, 192 bp, Staphylococcus aureus
atgaatttttcagattctgaaatcgcgataatttatgacgctttattccatctggaatgcacaactgatgtatattcaaacccttataattgtacttcaaaagaagcttatataaacgcttttaggactacgttcaataaaatcgatgagtgttcggacaaaaatagaaaaggagctctttatttcgaataa

SEQ ID NO: 420386 - DNA, 882 bp, Staphylococcus aureus
atggatacacaaaaaatgttgaaaacatttatagaaggttatgagaaacagaccttgaattatgaatttttaggagatgatattgaaaaagcttttccattattaaagtataggtcttttttaaatatttctgttttcaatgttcctgaaaatatttttttcaccgagacttatgtagttatagtagataattttgacaaattacctgatgaagttactgttacaagagaagatttaaacatttatataagagaaatcatggaacacacagagattgagagatttaatttgtttattcgaagaaaatacaattttttaagtaaaaaaaacatttttatagtgttacctatagcgctaaatttctataacaatttatcaacagagggaagttctcaagcggacacagatttcaaaagttggagaaaagaaaatcaaacccctttaaataactacaatcacgataaggttagtccatattcacatttggattatgaagggttaatatcaaatttcgatagtccaaaatacaatagcgacttcgaatatcaaatggcacaagctgaagaatgttataaacgaaagttgtttttacctgcagctgcaacattaagcgtcgccttagaaactttgttaatggctatatgcgataaagaaaaagttaagttaaacagtaaagacagtagcgacaccatgatgaactatttaggtcaacgattacttagcgaagggaaaataaactatagaatgcataaaagaattgatataacttattctttaagaaattcagtttctcattcaaatcctggcgaagtttcaaaagcggattgccaaatcatactatcatgcataaaagtgttgatagatgaacattattcgaaataa

SEQ ID NO: 420387 - DNA, 552 bp, Staphylococcus aureus
atgatttcacacttgataacggatacttcgaagaagaaacatcagacagcgactcagattcagacagcgattcagactcagatagcgactcagactcagatagcgactcagattcagacagcgattcagactcagatagcgattcagattcagatagtgactcagactcagacagtgactcagattcagacagtgattcagattcagatagcgactcagattcagacagtgattcagattcagacagtgactcagattcagacagtgactcagactcagatagcgactcagactcagatagcgactcagactcagatagcgactcagactcagatagcgactcagattcagacagtgactcagattcagatagtgactcagactcagatagtgactcagattcagacagcgactcagactcagatagcgactcagactcagatagtgactcagattcagatagcgactcagactcagacagtgattcagactcagattcagacagcgactcagattcagatgcaggtaagcacacacctgttaaaccaatga

SEQ ID NO: 420388 - DNA, 528 bp, Staphylococcus aureus
atgatttcacacttgataacggatgcttcgaagaagaaacatcagacagcgactcagactcagatagcgactcagactccgacagcgattcggactcggatagtgaatcagactccgacagcgactcagattcagacagcgattcagactcagacagtgattcagactcagatagcgactcggattcaaatagcgattcggactcagacagtgactcggactcagatagcgactcagattcagacagcgattcggattcagatagcgactcggattcagatagtgactcagactcagacagcgattcggattcagacagcgattcggattcagacagtgactcggactcagatagcgattcggattcagacagtgactcagactcagatagtgactcagactcagatagtgattcagactcagacagcgactcagattcagataatgactcagactcagacagcgactcagattcagatagtgagtcagactcagatgcaggtaagcacacacctgttaaaccaatga

SEQ ID NO: 420389 - DNA, 786 bp, Staphylococcus aureus
atggttaaatcgatatttttacaagatggagaagaaatttttgttgatgatgaagattatgaaagagtgaatcagcacatttggtacaagcattataaaggaaacacaagatatatccatactaggattgacaacgagagaaaagatgtactattaacaacctttataaaaaggggtagttatcaaaaaatcaaaaataatgattttactaaatctaatttaactacaaaaggtaacagatcaagatgggaaaagcctaaaagtaatggttcctctaagtataaaggtgttaattggcgtaaagactgcaataaatggacagctaatataaccgttgaaggaaagcaaaaacgtttaggtgtttttaaaacagaagaattagcagctaaagcgtataacaaagctgtagatgagctttgggatggtgaaggttttaaaaatatcatcggaaaagatttacgtaaagttagagattattttcctcataaaaatcttaataatacaagaaatagtaataaatatggctacagagggattggaaaccactctgatatgccatataaattttctgttagaaaaagaattgatggcaaactatatactacgaaatattttgatagtaaagaaaaagcggcattagcttataacaagatagttttatctttatatggatctgacgcaatccttaatgacgtacctatgacagatgaacttaaagaattcatatctaactgggaagtaccggacaaaataaaagcactgaaagaaggtgctgagaatgactga

SEQ ID NO: 420390 - DNA, 762 bp, Staphylococcus aureus
atggttaaatcagtatttttacaagatggagaagaaatttttgttgatgatgaagattttgatagagtcaatcaacatatttggcataaatcttttaatggcaatcatagaatgattatgaataatgacagcaaacatttaaatacttttattctcaaaaaaagttttcaaatgataaaaaacaatgattttaccagaaaaaatctgaccactgacgggaatcgagttagatggcaaaaagcaaggtgtaacagttcctctaaatataaaggtgtttcatgggataaagaaagtaataaatggtatgccaaaataagaatcggagaaaaactgaaaagtttaggacgttacgacgatgaagataaggctgcaatggcttataacaacgcggtcaacaagtattgggacggacacggataccaaaatataatcggagaagataacagaaccaaagaaagaaaatataaaacctataaaaaccaattgaaccatagggctaacaagaaaaacttaagaggtattagaaaaaataaagataaatactatgtacgcattaaatactccaaaagtgaatattcgttaggcgggtatgacgatttaaacaaagcgagattagtctataacaaatgttcgttatacctacatggttctgacgcaatccttaatgatgtacctatgacagatgaacttaaggaattcatatctaactgggaagtgccggacaaaataaaagcactgaaagaaggtgcggagaatgactga

SEQ ID NO: 420391 - DNA, 249 bp, Staphylococcus aureus
atgaataaccgcgaacaaatcgaacagtccgttataagtactagtgcgtataacggtaatgacacagagggattgctaaaagagattgaggacgtgtataagaaagcgcgagcgtttgatgaaatacttgagggaatgacaaatgctattcaacattcagttagagaaggtattgaacttgatgaagcagtagggattatggcaggtcaagtggtctataaatatgaggaggcgcaggaaaatggctaa

SEQ ID NO: 420392 - DNA, 1056 bp, Staphylococcus aureus
gtgttaaaagaatataacaatgaggaacaaactaaagctgatacggaattaaacactcttgaaaatcaagtactaatgataggttatacattttatcactcgaataaaaatgaagtagaagatttatataacaaattagatatgattcttggttataaagatgaagagagaaaaaagaagagggctaccaatcaaagaatgttcaataataaaaaagaggatttagaaactattattgatgaattctttggagaaattggacaacaaaggccaacatctataccaacattagcgcctaaagaagaaaaagaaacaaatataaaaaatgcaaataaattaaaatctgacactgaagcagcaaaaaatgatgaagcaaaaagaagtttaaatacccacaatcacaaatctgtatctcaagaagtctctgaacaacaaaaagctgactacgaaagaaaagctgaagaaagaaaagcgagatttttagataagcaaaaaaataagaaaactcctgtagtttcattagaatatgattttgaacataaacaacgtgttgacaacgaaaacgacaagcaacttgtggtttctgagccatcaaagaaaccaacaacaccgcctacatacactgaaacaaccacacagctaccaatgcctacagttgagcgtcaaacacagcaacaaatcgtttacaaagcaccaaaaccattagctggattaaatggtgaaagtcatgatttcacaacaacgcatcaatcaccaactacttcaaatcacacgcataatcatcttattgaaattgaagaaacatctgctttacctggtagaaagacaggttcattggttggtttgagtcaaattgattcttcgcatttaactgaacgtgagaagcgcgtgattaaacgtgaacacgtgagagaagctcaaaagttagttgataattataaagatacacatagttataaagaccgattaaatgcccaacaaaaagtaaatactttaagtgcaggtcatcaaaaacgttttaataaacaaattaataaagtatataatggcaaataa

SEQ ID NO: 420393 - DNA, 201 bp, Staphylococcus aureus; identical to SEQ ID NO: 411015

SEQ ID NO: 420394 - DNA, 183 bp, Staphylococcus aureus; identical to SEQ ID NO: 408524

SEQ ID NO: 420395 - DNA, 576 bp, Staphylococcus aureus
atggctactacgaagaagaaacatcagatagcgactcagattcagacagtgactcagactcagatagcgactcagactcagacagtgactcagactcagacagcgattcagactcagatagtgattcagattcagatagcgactcagattcagacagtgattcagattcagacagcgactcagattcagatagcgactcagattcagatagcgactcagactcagatagcgattcagactcagacagtgactcagactcagacagcgattcagactcagatagcgactcagattcagatagcgattcggactcagatagcgattcagactcagatagcgactcagactcagacagcgactcagactcagatagtgactcagattcagatagcgattcggactcagacagtgattcagactcagatagcgattcagattcagacagcgactcagactcggatagcgattcagattcagacagtgattcagattcagacagcgactcagactcagaaagtgattcagactcggatagcgattcagattcaggtaagcacacacctgttaaaccaatga

SEQ ID NO: 420396 - DNA, 432 bp, Staphylococcus aureus; identical to SEQ ID NO: 407983

SEQ ID NO: 420397 - DNA, 171 bp, Staphylococcus aureus
atgactaaagtagaagtagaaatgaatggagaaggtcgaattttagtaagaccttctggaacagaaccattagttcgtgtcatggttgaagcagcaactgatgaagatgctgaaagatttgcacaacaaatagctgatgtggttcaagataaaatgggattagataaataa

SEQ ID NO: 420398 - DNA, 717 bp, Staphylococcus aureus; identical to SEQ ID NO: 406127

SEQ ID NO: 420399 - DNA, 801 bp, Staphylococcus aureus; identical to SEQ ID NO: 406129

SEQ ID NO: 420400 - DNA, 720 bp, Staphylococcus aureus; identical to SEQ ID NO: 406130

SEQ ID NO: 420401 - DNA, 987 bp, Staphylococcus aureus; identical to SEQ ID NO: 411097

SEQ ID NO: 420402 - DNA, 636 bp, Staphylococcus aureus
atgttaggaactgatgaattgtataaattgttatataggcatatgggaccgcaaaattggtggcctgctgataatgacattgaactgatgttaggtgcaattttagttcaaaatactagatggcgaaatgcagaaattgcattgaatcagattaaagaacatacgcattttaatcccaatcatatattagaactacctattgaaacgttacaatcattgatacattcaagtggcttttataaaagtaaatcactgacgattaaaacattattaacatggttagcacgacatcatttcaattatcaagagattaatgagcgatataaaggtggattaagaaaagaattattatctttgaaaggtattggaagtgaaacagcagatgtcttacttgtttatatattcggacgtattgaatttattccagatagctatacaagaaaaatatatgataaattaggatatgaaaacactaaaaattatgatcaattaaaaaaagtagtcacattaccaaatcattttacaaatcaagatgctaatgaatttcatgctctgttagatgtatttggtaaacattactttagagacaaagatataaagaattatgattttttagaaccttactttaaaaagtaa

SEQ ID NO: 420403 - DNA, 1662 bp, Staphylococcus aureus
atgaatattattgatcaagtgaaacaaacattagtagaagaaattgcagcaagtattaacaaagcaggattagcagatgagattcctgatattaaaattgaagttcctaaagatacaaaaaatggagattatgctactaatattgcgatggtactgactaagattgcaaagcgtaatcctcgtgaaattgctcaagcgattgttgataacttagatactgaaaaagcacatgtaaaacaaattgacattgctggtccaggattcattaatttttacttagataatcagtatttaacagcaattattcctgaagcaattgaaaaaggtgatcaatttggacatgtaaatgaatcaaaagggcaaaatgtattgcttgagtatgtttcagctaaccctacaggagatttacatattggtcatgctagaaatgcagcagttggtgatgctttagctaatattttaactgcagctggctataatgtaacacgtgaatattatattaatgatgctggtaatcaaattactaacttagcgcgttcgattgaaacacgtttctttgaagctttaggtgacaatagttattcaatgccagaagatggctataatggtaaagatattattgaaataggtaaagatttagcagagaaacatcctgaaattaaagattattctgaagaagcacgtttgaaagaatttagaaaattaggcgtagaatacgaaatggctaaactgaaaaatgatttagcagagttcaatacgcattttgataattggtttagtgaaacatctttatatgaaaaaggcgaaattcttgaagttttagcaaaaatgaaagaattaggttatacgtatgaagctgatggcgctacatggttacgtacaactgattttaaagatgacaaagacagagtattaattaaaaatgacggtacatatacgtatttcttaccagatattgcgtaccacttcgataaagttaaacgtggtaatgacattttaatcgatttatttggtgctgatcatcatggttatattaatcgtttgaaagcatctcttgaaacgtttggtgtagatagtaatcgtttagaaattcaaatcatgcaaatggttcgtttaatggaaaatggtaaagaagtgaagatgagtaaacgtactggtaatgcgattacattaagagaaattatggacgaagttggcgttgacgctgcacgttatttcttaactatgcgtagtcctgatagtcactttgattttgatatggaattagcgaaagagcaatctcaagacaatccagtttactatgctcaatatgcacatgcgcgtatttgttcaattttaaaacaagcgaaagagcaaggtattgaagtgactgctgcgaatgattttacaacgattacaaatgaaaaagcgattgaattgttgaaaaaagtagctgatttcgaacctacaattgaaagtgctgctgagcatagatcagcacatagaattactaactatattcaagacttggctgctcatttccataaattctataatgctgaaaaagtgttaacagatgatattgaaaaaacaaaagcacatgttgctatgattgaagcggtcagaattacattgaaaaatgcattggcaatggtcggtgtaagcgcacctgaatcaatgtaa

SEQ ID NO: 420404 - DNA, 417 bp, Staphylococcus aureus; identical to SEQ ID NO: 406135

SEQ ID NO: 420405 - DNA, 1011 bp, Staphylococcus aureus
atgagagcagcagttgtaacgaaagatcacaaagtaagtattgaggacaaaaagttaagagctttaaaacctggtgaagcgttggtacaaacggaatattgtggcgtttgtcataccgatttacatgttaagaatgctgattttggtgatgttacaggcgttactttaggtcatgaaggtattggtaaagtcatcgaagttgcggaagatgtagaatcattaaaaattggagaccgtgtgtctatcgcttggatgttcgaaagctgtggaagatgtgaatattgtacaacaggtcgtgaaacactttgccgtagtgtgaaaaatgctggttatacagtagatggtgcaatggctgaacaagttattgttactgcagactatgctgtgaaagtacctgaaaaattagatccagcagcagcgtcttctattacatgcgcaggtgtgacaacttataaagctgtaaaagtaagtaatgtaaaacctggacaatggttaggtgtttttggtataggtggtttaggtaacctagctttacaatatgctaaaaacgttatgggggctaaaattgttgccttcgacatcaatgatgataaattagcattcgcgaaagaattaggtgcagatgctattattaattctaaagatgttgatccagttgcagaagttatgaaattaactgataacaaaggattagatgcaacagtggtaacttcagttgctaagacgccatttaaccaagcggttgatgttgtaaaagctggtgcaagagttgttgctgttggtttacctgttgataaaatgaacttagatatcccaagattagtgcttgacggtattgaagtagtaggttcacttgttggtacaagacaagacttacgtgaagcgtttgaatttgctgctgaaaataaagtaacacctaaagttcaattaagaaaattagaagaaatcaatgatatttttgaagaaatggaaaatggtactataactggtagaatggttattaaattttaa

SEQ ID NO: 420406 - DNA, 507 bp, Staphylococcus aureus
ttgtctgagaaaaaaggctttaattttaatatcataaaaaatgaccctctagatggtcataaaggtacaaatattggttcaattagcttagacaatattgcaccagtttttatcgatgttgctaacaaagaagcatttattgatattggaggcatgcatgctcgcgccaaagttgaaaaaggcgtgaaatggattactgataaagctgctgttgaaggcgatgaagctaaagaatattggttgtgttgggtaacaacagaacgtaatgaacaaggaccatattatgctggtttaacagcgtgctatttattagtgaataaagcaattcgtcgtggttataaaagtatgcctgaacatgttaatatgatggataaatcaatgaaacatcatattatcattgatcaaattggtgacgagaataaagctattttaaaagactttttaatgaaccatgatgaaggtatgtggaagcattcttctgatgctttacatcaagcatttaattaa

SEQ ID NO: 420407 - DNA, 1296 bp, Staphylococcus aureus
atgactaacgcatttgtagatttaaaattagtagaagaaaaagtttttaaagacccgatacatcgatatattcatgttgaagatcaattgatatgggatttaattaaaactaaggaattccaaaggttacgtcgaattagacaactaggaacactgtacctatcttttcacacagcagaacatagtcgctttggacattctttaggtgtgtatgaaatagttagacgattaattgatgagtcatttattggtcatgatgcatgggacaataaagatagaccgttggcattatgtgctgcattattacatgatttaggacatggtccattttcacatagttttgaaaaaatatttaatacagaccatgaagcatacacacaagcgattattactggagatactgaggtgaatgctgtattacgtaaagtggcgcctgagtttccaagagaagttgcggaagtaattaataaaacgcatcataataaattggtcatttcgatgatttcgtcacaaatcgatgcggatagaatggattatttacaacgtgatgcgtatttcacaggtgtatcatatggtgcttttgatatggaacgtattttaagattaatgcgaccttctaaagatgaagtactaattaaagaaagtggtatgcatgcagttgaaaactttattatgagtcgttatcaaatgtattggcaaatttatttccacccagttagtcgtggtggagaagtgctgcttaataattgtttgaaacgcgcaaaacagctttataatgaaggctatgaatttaagttgcatccacatgattttattccattttttgaagagacagttacgattgaacaatatgttgaactcgatgaagcggtagttacgtattatttggaaaaatggacaaaagaagatgatgctattttaagtgatttagcaagtcgatttattaatagagacttatttaaatatattccatttgatggctcaattattacaatatcagaactgcaagaactgtttgaagcaggtggtattaatccagattattattttgtgagtgaagcattttcggatttgccatatgactatgatcgacctgggtcaaatcgcaaaccgattcatttattaagacaagatggtacgattagagaaataagcaatcaatctttagtcattcatagtattacaggcattaatcgccaagactataaattatattatcctagagaaatggttgcaaagattaaagataagacaattagagaagctattgaaaatttgattaatgagcttaattaa

SEQ ID NO: 420408 - DNA, 477 bp, Staphylococcus aureus
atgttcaaggtaagacaagcaactgaaaaagatgttgttcaaattagagatgtcgcaactaaagcttggtttaatacatacttaaatatatacgctgcgacaacagttaatcacttgttagaagcttcatataatgaacatcatttaaagaaaagacttcaagaacaattattcttagtcgttgaagaaggtaatgacatcgttggctttgctaactttatttacggtgaagaattatatttatcagctcattatgttaaaccagaatcgcaacatacaggttatggtacagcattgttaaatgaaggattatcacgttttgaagataaatttgaaggtgtttacttagaagtagataataaaaatgaagaagcagtagcttactataaagagcaaggttttacaatcttacgctcttatcagccagaaatgtatggcgaaaagttagacttagcacttatgtacaaagcattttaa

SEQ ID NO: 420409 - DNA, 537 bp, Staphylococcus aureus; identical to SEQ ID NO: 406140

SEQ ID NO: 420410 - DNA, 939 bp, Staphylococcus aureus
atgaagcaatttgtaaacttaggtaaatctgatgttgaagtgtttccaatcgcacttgggacgaacgcagtaggtgggcataatttatatccgaacttagatgaagaacaaggaaaagatgttgttcgtcaagccattaatcatggtattaatttattagatacggcatatatttatgggccagaacgatcagaagaattggttggagaagttgttaaagaatatccgcgagagcaaattaaaattgctacaaaagggtctcatgaatttgatgaaaatcaagaagtacatcagaacaatcaacctgaatatttaaaacaacaagttgagaatagtttgaaacgtctacaaactgattatatcgatttatattatattcattttccggatgacaacactccgaaagatcaagcagttgcagcattacaagagcttaaggaacaagggaagattaaagccattggtgtatcaaatttcacattagatcaacttaaagaagcaaataaagatggttacgttgatgttgtacagttagaatataatttattgcaccgcgaaaatgaggcagtattgcaatattgtgttgatcaccaaatcacatttattccttatttcccattagcatccggtattttagctggaaaatatgatgagaacactaaatttagtgaccatcgtactacacgtcgtgattttatacctggtgtttttgaagagaatgtgcgtcgcgtaaaagctttggaaagcctagctgcagcacatcaaacttcaattgcgaacattgtattagcattttatttaacgagaccagctatcgatgtgattattcctggtgcaaaacgtgcagaacaagtcgttgaaaatattaaagctgcagatatcgttttatcagatgatgagattcaatatatcgatgaactgtttccgattgaagactaa

SEQ ID NO: 420411 - DNA, 633 bp, Staphylococcus aureus
ttggtttgcgaggtaatagctatatacaaaaatcccaaatatagaattattaaatataatgatgaatatttgatggtgaatataataaataattggttagttttattcattccattgcttaattggttgacaccaaaaagatacatcaagatcagtcaagaagaattagaaagtttaaatactttcaaacctgctaaaaacaatgcattttggccagcattaggtagttcagttttatttagtgtgacttttagaaagtatatgcctttatttaatgttagattggaaaaaacaatagtaatagccatattttttgttgtatttcttggtattttatttttctacctaaatttaaatcgtaggctagcattaagtgtttttactatgaataaagaaaaaagtcagaaaatgatattgctacctaatttaaaacattttttctttataatatttgcatatttatatttcggtggtttttcatttttcactttatatgccctgataactatagatgttcaaaatataattatatttatctgttggggtgcagtaactatgtttttcttttttataaacattgttcccattggcattaaaaaagctcatgtaatacttcttaaaaaagctgaataa

SEQ ID NO: 420412 - DNA, 558 bp, Staphylococcus aureus; identical to SEQ ID NO: 409332

SEQ ID NO: 420413 - DNA, 624 bp, Staphylococcus aureus
gtgttgatttgtgaatcaaaaaatataaataagaacccgagatataaaattataaaatataagaacgagtttttaatggttgatgtaactagttcttggattttcttcttcattccaatgcttaattggggtgtacctaagaaatatgcgaagattagtcaaagtgagtttgaagaattaaatacatttacaccgaaaaatagtagctcagctggatggatagcaggtgggggatcagttttattggcagtattgacgagaaaatatatacagttgttaaatatacaagttaatcaaattgctgtaaatattttatgttgtctcgtacttttgggggttttcctttcagctttatatattaattcgaaatctaaattaaatgtttatgatagaaataactgtgatgaaaagataattttaataccaacttttaaaaatttatgcttaatgctcctttcgtatattatttttggtggtttaagcatacttgctttttatatgtttatcacagaaggtattcaaaacatcattttatttattacttggattatgcttgtaataatgttcttacttagtaatgtagctttggtagtcaataaaaaagtatatgttataaaaaggtag

SEQ ID NO: 420414 - DNA, 1407 bp, Staphylococcus aureus
atgagtattgacatgtatttagacagatctcgaaaccaagcttcaagtgtggggaatttgagtcaaacaatgaattcaaattatgatgcgttggaaaaagcaattactcaatttattaatgatgatgcgcttaaagggaaagcgtatacgtcagctaagcaattttttagtacggtgttaattccattatcaacaagtatgaaaacattgagtgatttaacgaagcaagcttgcgataattttgtgtcacgttatacgagtgaggttgatagcatatctttaaaagaatcagagcttgaagaagatatcagatcattaagtcaacaaattacgcgatatgaaaatttgaataacaatttgaaaaagcatgcttccgataatcagcaagccatttcatcgaaccaacaaataatacgaacattaggtcaacaaaaacatgaattagaagagaagctacgcaaattgcgtgagtttaatcaaaaatcaccagaaatatttaaagaagttgaagaatttcaaaaaattgtccaacaaggacttacccaagcgcagaatttttggaacttttcaacaaatcaatttaatataccttcaggtaaagaacttgattgggctaaagcaagtcatgaaaaatatttgaaagttgctatggggaaaattgaacataaagcagagaaagaaactttaaataaagcagactttgctgttataaaggcatatgccaaagagcatccagaagacgatatcccgaaaagtataatgaaatatataaatgacaataaagacagtattaaaagagatataggattagatatcacttcaacacttttagagcaaggcggtataaatgcaagtaaattcggtgtatttatcaatacagcaggtggagtgaaaggcccagccggtccaaattcatttgtggaagtcaaacgtacatcaggtaatgtgtttatagaaaatggtagtaaatttgctaaaggtggaaaatatctaggtaaaggtgttgcaggtgtaggatttggtataggtatgtatgatgaccttgcaaatgatgataaaacatttggggaggcgttgtcgcataatgctttaactacaggaataggtactggtgctggaattgctacttcagcaacaatagtcgcacttgctagtaacccagttggttgggctgctttaggaggtttggcagtaggtattggagctacccaccttgctgattgggcttaccaagcaaatattttggggttaaaagataaaactgattgggttggacataagatagatgaaggtattgataatttcaaaaagtcaacggtaaatacagtagatagcattggaaatgtcgttggtgaagctacaaaaagtattagcaatcatataaaccctatgaaatgggagtggtaa

SEQ ID NO: 420415 - DNA, 441 bp, Staphylococcus aureus; identical to SEQ ID NO: 406155

SEQ ID NO: 420416 - DNA, 1323 bp, Staphylococcus aureus
atgaaaacatatgatttaattgtaataggatttgggaaagctggtaaaactttagcgaaatacgctgcatcaacaggtcaacacgtcgcagttatcgaacaatcttcgaaaatgtatggaggcacttgtataaatataggatgtataccttcgaagacacttgtacatgatggattagaaggcaaatcttttgaagcaagttataaccgtaaaaacgatgttgtcaatgcgctaaacaataaaaattaccacttattagcagacgataacaacattgatgtactggattttaaagcgcagtttaaatctaatactgaagtgaatttattagatcagcatggcgatatcgccgatagtattactgcacctcatatcattattaataccggtgctacctctgtcattcctaacataaaagaccttgatcaagctaaacatgtcttcgattcaacaggtttattaaacattaactatcaacctaagcacctcgttattgtaggtggcggttatatcgccttagaatttgcttcaatgtttgcgaatttaggtagtaaggttacagtattagaacgtggtgaatcatttatgccacgcgaagatcaagatgtcgttgcacatgctattactgacttagaaaataaaggcattgcattgcatacaaatgttgaaacgactgaattgtcatctgacgatcatcatacaacagtccgtactaacgttggcaactttgaggctgatgcagtacttttggctatcggacgcaaaccgaatacagatttagctttagaaaatactgatatcgaattaggcgacagaggcgaaattaaagtcaatgctcatcttcaaacaactgtgccgcatatttatgctgcaggtgatgttaaaggcggacttcaatttacgtatatatctttagatgattatcgaattatcaaatcagcgttatatggtaatcagtcacgtacgactgacaatagaggcagcgtgccttatacagtatttatagatccaccattatcacgtgttggattaactagtaaagaagcagccgctcaacattatgattacactgaacaccaacttttagtaagtgcaatacctcgtcacaaaattaacaatgatccaaggggtttatttaaagtagtcattaataatgaaaataatatgattttaggtgctacattatatggtaagcaatctgaagaattaattaatataattaaacttgcgattgatcaaaacattccatataccgtattacgagataatatttatacacatcctacgatggccgaatcatttaatgatttatttaatttctag

SEQ ID NO: 420417 - DNA, 342 bp, Staphylococcus aureus
atgaaaaatacattccttatttgtgatgaatgtcaggcagtcaatattagaacgttacaaaagaagttggaaaaattagatcccgatgctgaaatcgtgataggttgtcaatcttattgtggacctggacgccgaaaaacattcacttttgttaataaccgcccactggctgcgcttactgaagaagaattaatcgaaaaagtttctcaacaattaaagaaaccacgtgatcctgaagaagaagagcgtttaagaaaacgacatgaagaacgtaaacgtcgtaaagaagaacaagatagaaagcttaaagaaaaattagaaaagcgaaaagcacaacaataa

SEQ ID NO: 420418 - DNA, 1077 bp, Staphylococcus aureus
atgattcaggtcaaagcacccggaaaactttatattgctggagaatatgctgtaacagaaccaggatataaatctgtacttattgcgttagatcgttttgtaactgctactattgaagaagcagaccaatataaaggtaccattcattcaaaagcattacatcataacccagttacatttagtagagatgaagatagtattgtcatttcagatccacatgcagcaaaacaattaaattatgtggtcacagctattgaaatatttgaacaatacgcgaaaagttgcgatatagcgatgaagcattttcatctgactattgatagtaatttagatgattcaaatggtcataaatatggattaggttcaagtgcagcagtacttgtgtcagttataaaagtattaaatgaattttatgatatgaagttatctaatttatacatttataaactagcagtgattgcaaatatgaagttacaaagtttaagttcatgcggagatattgctgtgagtgtatatagtggatggctagcgtatagtacttttgatcatgaatgggttaagcatcaaattgaagatactacggttgaagaagttttaatcaaaaactggcctggattgcacatcgaaccattacaagcacctgaaaatatggaagtacttatcggttggactggctcaccggcgtcatcaccacactttgttagcgaagtgaaacgtttgaaatcagatccttcattttacggtgacttcttagaagattcacatcgttgtgttgaaaaacttattcatgcttttaaaacaaataacattaaaggtgtgcaaaagatggtgcgtcagaatcgtacaattattcaacgtatggataaagaagctacagttgatatagaaactgaaaagctaaaatatttgtgtgatattgctgaaaagtatcacggcgcatctaaaacatcaggcgctggtggtggagactgtggtattacaattatcaataaagatgtagataaagaaaaaatttatgatgaatggacaaaacatggtattaaaccattaaaatttaatatttatcatgggcaataa

SEQ ID NO: 420419 - DNA, 984 bp, Staphylococcus aureus
ttgattaaaagtggcaaagcacgtgcacatacgaatattgcacttataaaatattggggtaaaaaagatgaagcactaatcattccaatgaataatagcatatctgttacattagaaaaattttacactgaaacgaaagtcacttttaacgaccagttaacacaggatcaattttggttgaatggtgaaaaggttagtggcaaagaattagagaaaatttcaaaatatatggatattgtcagaaatagagctggcatcgattggtatgcagaaattgaaagcgacaattttgtaccaacagcagcagggttggcttcatcagcaagcgcatatgcagctttagcagcagcttgtaatcaagcactagacttgcagctgtcagataaggatttatcgagattggcgcgaattggttcgggttctgcatcgcgtagtatttatggtggatttgcagaatgggaaaaagggtataatgatgagacgtcatatgccgttccacttgaatcgaatcattttgaagatgaccttgccatgatatttgttgtgattaatcaacattctaaaaaggtacctagtcgatatggtatgtcgttgacacgaaacacatcaaggttttatcaatattggttagatcatattgatgaagatttaactgaagcaaaagcagcgattcaagacaaagattttaaacgccttggtgaagtaattgaagaaaatggtttgcgtatgcatgccacgaatctaggatcaacaccgccgttcacatatcttgtgcaagaaagttatgatgtcatggcgctcgttcacgaatgccgagaagcgggatatccgtgttattttacgatggatgcgggtcctaatgtgaaaatacttgtagaaaagaaaaacaagcaacagattatagataaattattaacacagtttgataataaccaaattattgatagtgacattattgccacaggaattgaaataattgagtaa

SEQ ID NO: 420420 - DNA, 921 bp, Staphylococcus aureus
atgacaagaaaaggatatggggaatcgacaggtaagattattttaataggagaacatgctgttacatttggagagcctgctattgcagtaccgtttaacgcaggtaaaatcaaagttttaatagaagccttagagagcgggaactattcgtctattaaaagcgatgtttacgatggtatgttatatgatgcgcctgaccatcttaagtctttggtgaaccgttttgtagaattaaataatattacagagccgctagcagtaacgatccaaacgaatttaccaccatcacgtggattaggatcgagtgcagctgtcgcggttgcttttgttcgtgcaagttatgattttttagggaaatcattaacgaaagaagaactcattgaaaaggctaattgggcagagcaaattgcacatggtaaaccaagtggtattgatacgcaaacgattgtatcaggcaaaccagtttggttccaaaaaggtcatgctgaaacgttgaaaacgttaagtttagacggctatatggttgttatagatactggtgtgaaaggttcaacaagacaagcagtagaagatgttcataaactttgtgaggaccctcagtacatgtcacatgtaaaacatatcggtaagttagttttacgtgcgagtgatgtgattgaacatcataactttgaagccttagcggatatttttaatgaatgtcatgcggatttaaaggcgttgacagttagtcatgataaaatagaacaattaatgaaaattggtaaagaaaatggtgcgattgctggaaaacttactggtgctggtcgtggcggaagtatgttattgcttgccaaagatttaccaacagcgaaaaatattgtaaaagctgtagaaaaagctggtgcagcacatacttggattgagaatttaggaggttaa

SEQ ID NO: 420421 - DNA, 837 bp, Staphylococcus aureus
atggatttagcgagtaaatattttaatggcgtcaactggcgatatatcgatcattcttctggattagaacctatgcaatctttcgcattcgatgatacattttgcgaaagtgtgggcaaagatatatcagataatgttgtgcgtacttggattcatcaacatactgttattcttggtattcatgattcaagattgccgtttttaaaagatggcattgattatttaacgaatgagattggttataatgccattgttagaaattctggtggcttaggtgtcgttctagatcaaggtgtattaaatatatcgctgatgttcaaaggacaaacagaaacaacgattgatgaagcgtttactgtgatgtatctcttaattagcaaaatgttcgaagatgagaatgttgatattgatacgatggaaattgaacattcttattgcccaggaaaatttgacttaagtatcgatggtaagaaatttgcaggcatatcgcaacgaagagttagaggcggtattgctgtacaaatttatctttgtgttgaaggctctggttcagaacgtgcattgatgatgcaaacattttatgaacatgctttaaaaggtgaagtgactaaatttaaatatcctgaaattgaaccatcttgtatggcctcattagagacattgcttaacaaaacgattactgttcaagatgtaatgtttttactattatatgcaatcaaagatcttggcggtgtattaaatatgacgccaattactcaagaagaatggcaaagatacgatacgtattttgataaaatgattgaaagaaacaagaaaatgatagatcaaatgcaatag

SEQ ID NO: 420422 - DNA, 987 bp, Staphylococcus aureus
atggctgatttattaaatgtattaaaagacaaactttctggtaaaaacgttaaaatcgtattacctgaaggagaggacgaacgtgttctaacagctgcaacacaattacaagcaacagattatgttacaccaatcgtgttaggtgatgagactaaggttcaatctttagcgcaaaaacttgatcttgatatttctaatattgaattaattaatcctgcgacaagtgaattgaaagctgaattagttcaatcatttgttgaacgacgtaaaggtaaagcgactgaagaacaagcacaagaattattaaacaatgtgaactacttcggtacaatgcttgtttatgctggtaaagcagatggtttagttagtggtgcagcacattcaacaggagacactgtgcgtccagctttacaaatcatcaaaacgaaaccaggtgtatcaagaacatcaggtatcttctttatgattaaaggtgatgaacaatacatctttggtgattgtgcaatcaatccagaacttgattcacaaggacttgcagaaattgcagtagaaagtgcaaaatcagcattaagctttggcatggatccaaaagttgcaatgttaagcttttcaacaaaagggtctgctaaatcagacgacgtgacaaaagttcaagaagctgtcaaattagcacaacaaaaagctgaagaagaaaaattagaagcaatcattgatggcgaattccaatttgatgctgcgattgtaccaggtgttgctgagaaaaaagcgccaggtgctaaattacaaggtgatgcaaatgtctttgtattcccaagtttagaagctggtaatattggttacaaaattgcacaacgtttaggtggatatgatgcagttggtccagtattacaaggtttaaattctccagtaaatgacttatcacgtggctgctcaattgaagatgtatacaatctttcaattattacagcagcgcaagccttacaataa

SEQ ID NO: 420423 - DNA, 753 bp, Staphylococcus aureus
atgagtcaagcagccgaaacattagatggttggtatagtctacatttattttatgcagttgattgggcatcattacgtctagttccaaaggacgaacgcgatgcacttgtcactgaatttcaatcatttttagaaaatacagcaactgtaagatcatcaaaatctggtgatcaagctatttataatataactggtcaaaaagcagatttgttattatggttcttacgtcctgaaatgaagtctttaaatcatattgaaaatgaatttaacaaattgcgcattgctgacttcttaatccctacatattcatatgtatcagtcattgaattgagcaattatttagctggtaaatctgatgaagatccttatgagaaccctcatatcaaagcaagattatacccagaattaccacattctgattatatttgtttctatccaatgaacaaacgtcgtaatgaaacttataactggtacatgttaactatggaagaacgccaaaaattaatgtatgaccatggtatgattggtagaaaatatgctggcaaaatcaaacaatttattactggttctgtagggtttgatgatttcgaatggggcgtaacattgttctcagatgacgtattacaattcaaaaaaattgtatacgaaatgcgctttgatgaaacaacagcacgatacggtgaattcggtagtttctttgtaggacatcttattaacacaaacgaattcgatcaattctttgcgatttcttaa

SEQ ID NO: 420424 - DNA, 765 bp, Staphylococcus aureus
atggacataaattcagaagaatacaaacaagaggtacttatcaaagacgttgtcatgcttgctgctcgcatactattagaatctggtgcagaaggtacgcgtgtagaagataccatgacacgtattgcaaaaaaacttggttacagtgaaagtaacagctttgttacaaacactgtcatccagtttacgttacattcggaatcgtttcctagaatatttagaattacctctcgagatacaaacttaataaaaatttctcaagctaataaaatttcgcgtcaaattacaaacaatgaaatttctttagccgaagcaaaaacgcaacttgaaaaaatatatgttgctaagcgtgacagcagtcttccctttaaaggttttgctgcagcaatgattgcaatgagtttcttatatttacaaggtggtagattgattgatgttttaactgcgatattagcaggtagtctaggatacctagtcactgagattttagatcgcaagttacatgcacagtttatcccagaattcattggttcattagttattgggattatcgccgttattggacatacacttatcccaacaggtgacttggcaactattatcattgcggcagtcatgcctattgttcctggtgtattaataacaaacgcaatacaagatttatttggtggacacatgttgatgttcacaacgaaatcattagaagcattggttactgcgtttggcatcggtgctggcgttggtagcgtattaattttagtatag

SEQ ID NO: 420425 - DNA, 453 bp, Staphylococcus aureus
atgttttggatcttaaactttatctttagctttttagcttcaatgttcttctgcgtcatttttgatgcacctagaaaattatatctatcatgtggtttcgttggtacatgtggatggatggtttacaccttattcttcaacggctttaatgtgcacactatatactctagtttctttggtagtttagcattaggcttgttaagtcattatatggctcgtaaacaaaaagaacctgccatcatttttatggtaacgggtatcattccattagtacctggtggcttagcatacgatgctacaaaaaatttagtcttattaaatttcagcacagcaataaatacaatgttagaagtaacacttattgcaggagccatcgcattaggtttattattcgccgaccaaatttctaaattaattgtttctgggttcgtgaaatcttttaaacgattataa

SEQ ID NO: 420426 - DNA, 1485 bp, Staphylococcus aureus
atggaaaaaaagaataagcaaatagatagaggcgatttaaaacaaaacctatctgaaaagtttgtatgggcgattgcatatggttcatgtatcggatggggcgcattcatcttaccaggagactggattaagcagtcaggtccgattgcagcatcaattggtatagttattggtgcattattaatgatattaattgcggttagttatggcgcattagtagagagatttccagtatcagggggcgcgtttgcctttagtttcttaagtttcggcagatatgtgagtttcttctcatcatggtttttaacttttggttatgtctgtgtcgttgctttaaatgcgaccgcattcagtttactagttaaattcttattgccagatgtcttaaataatgggaaactatacaccattgcgggctgggacgtttatattacggaaatcattattgcgaccgtattactacttgtattcatgctagtaacgattcgtggcgcaagtgtatctggatcattacaatattatttctgtgtggcgatggtaatcgtcgtattattgatgttctttggttcattctttggtaataattttgcacttgaaaatttacaaccgttagctgaacctagcaaaggatggttagtgtctattgtggttattgtatccgtggcaccatgggcatatgttggatttgataatattccacaaacagcagaagagtttaactttgcaccaaacaagacatttaagcttatcgtgtacagtttattagcagcatcattaacttatgttgtcatgattttatacactggttggttatcaacaagtcatcaaagtttaaatgggcagttgtggttaacaggtgctgttacacaaacagcatttggttatattggattaggtgtattagcaattgcaattatgatgggtatatttactggtttaaatggattcttgatgagttcaagtcgcttgttattttctatgggacgttcaggtattatgccaacaatgtttagtaaattacatagtaaatacaaaacaccatatgtcgcaatcatattcctagtaggtgtgtcgttaattgcaccttggctaggaagaactgcattgacttggattgtagatatgtcatctacaggtgtatccattgcctactttattacatgtttgtctgcagcgaaattattcagttataacaaacaaagtaatacgtatgcaccggtttacaaaacgtttgctattatcggctcatttgtatcattcattttcttagcgttgttattagtgccaggttctcctgcagcactgactgcaccgtcttatattgcattacttggatggttaatcatcggtttaatattctttgtgattcgatatcctaaattgaaaaatatggataatgatgaattaagtcgcttgattttaaatagaagtgaaaatgaagttgatgatatgattgaagaacctgaaaaagaaaaaactaaataa

SEQ ID NO: 420427 - DNA, 369 bp, Staphylococcus aureus; identical to SEQ ID NO: 406167

SEQ ID NO: 420428 - DNA, 378 bp, Staphylococcus aureus
atgttgaatagagaaactttaatagcacgaattgagcaagaattagtacaagcagagcaggcacagcatgaccatgactttgaaaaacatatgtatgccatacatatattaacatctttatatgcttcaacatcaaatacaccacatattggtgaacaacaaatgaatcgtcgtattgctaaccataatcaaatgccacaatcacaaataacgcagccaactcatcaagtgacagctgctgaaattgaagcgatgggtggtaaagtaaatacgcattcagcacatcatcataagtcatattcacaaccttcaaaccaacaacaaagattagcgacagatgatgacattggcaatggtgaatccatatttgatttttaa

SEQ ID NO: 420429 - DNA, 657 bp, Staphylococcus aureus
atggaatggtcgcaaatttttcatgacataacaacgaaacatgactttaaagctatgcatgattttttagaaaaagaatattcgactgcaatcgtataccctgatagggaaaatatatatcaagcgtttgatttaacaccgtttgaaaatatcaaagttgttatattaggacaagacccgtatcatggtccaaaccaagcacatggattagcattttcagtgcaacctaacgcaaaattccctccatctttacgtaatatgtataaagaattagcagatgatattggatgtgttagacaaacaccgcatttacaagattgggcaagagaaggcgtcttgttattgaatacagttttaaccgtaagacagggtgaagcaaattctcatcgtgatattggttgggaaacatttactgatgaaattattaaagcagtgtctgattataaagaacatgttgtctttattttgtgggggaaacctgcacagcaaaaaataaagcttatcgatacatctaaacattgtattataaaatcagtgcatcctagtccactgtctgcatatagaggattctttggatcaaaaccgtattccaaagcgaatgcctatttagagtcagtaggaaaatcaccaattaattggtgtgaaagtgaggcgtag

SEQ ID NO: 420430 - DNA, 831 bp, Staphylococcus aureus
atggctttaaagaaagttttaacaattgccggttctgacacaagtgctggcgcaggtatgcaggcagatttaaaaacatttcaagaattggatacgtatggcatggtcgctttaactgccatcgttactatggataaagatacatggtcacacgatgtcacaccattacctatggacgtatttgaaaagcaacttgaaacggctttatcaatcggacctgatgctattaaaacaggtatgttaggtactgaggagataatcaaacgtgctggagaagtatatgaggcatctaatgcacaatattttgtagtagatcctgtcatggtttgtaaaggcgaagatgaagtgcttaaccctggaaatactgaggcgatgattaaatatttactacctaaagcaacggtagtgacgccaaacttatttgaagcgggtcaattatcaggattaggtaaattaaattcaattgaagatatgaaaaaggctgcaacaattatctttgataaaggcgcacagcatgtcatcattaaaggtggcaaagctttagatcaagataaatcgtatgacttatactatgatggtcaaacattttatcaactaactacagacatgttccaacaaagttataaccatggtgctggttgtacatttgctgcggcaacaactgcatatttagctaacggtaagtcaccgaaagaagctgtgattagcgcgaaagctttcgtcgcttctgctattaaaaacggttggaaaatgaatgattttgttggtcctgtggatcacggtgcatacaaccgtattgaacatatcgatgttgaagtaacagaggtttaa

SEQ ID NO: 420431 - DNA, 168 bp, Staphylococcus aureus; identical to SEQ ID NO: 406171

SEQ ID NO: 420432 - DNA, 237 bp, Staphylococcus aureus
ttggcgctcgtaaatgatgataatccaatacataatgagattgtgccaggacaattagtgagtcaaatgatgctgatggctatgtcattagagacaaaccagtgtcaaattaactacgttaaacctattttaataaatgaaaatatcgaattcattgaacaacacgagcaagaaattatagcaattaatgacgatggagagattaaaataaaaatttctttgagcacaaaaaaataa

SEQ ID NO: 420433 - DNA, 366 bp, Staphylococcus aureus
atgcagcattattcactcgattctaaccagcgattaaatgtgtcattttctaaggatagtgtggctgcatattatcagtgttttaaccaaccttatagaaaagaagtaccaccattaatgtgtgcgtcattatggtcaaaatttgatttatttaaaaaatatgcaaatagcgaactgattttaacaaaatcagcaattaatcaaactcaaaagatagaagtagacacaatatatgtaggacgtttagaagatattgaatgccgacagattcgcaatatcacacgttatacaatggctttaacattaactaaaaatgatcaacatgtcataacggttacacaaacttttattaaggcgatgaagtag

SEQ ID NO: 420434 - DNA, 1140 bp, Staphylococcus aureus
atgaatcaagcagtcatagttgcagctaaacgaactgcatttgggaaatatggtggcactttaaaacatttagagccagaacaattgcttaaacctttattccaacattttagagagaagtatccagaggtaatatctaaaatagatgatgtagttttaggtaatgttgttgggaatggtggcaatattgcaagaaaagcattgcttgaagcggggcttaaagattcaatacctggcgtcacaatcgatcggcaatgtgggtctggacttgaaagtgttcaatatgcatgtcgcatgatccaagccggagctggcaaggtatatattgcaggtggtgttgaaagtacaagtcgagcaccttggaaaatcaaacgaccgcattctgtgtacgaaacagcattacctgagttttatgagcgtgcatcatttgcacctgaaatgagcgacccatcaatgattcaaggtgctgaaaatgtggccaagatgtatgatgtttcaagagaattacaagatgaatttgcttatcgaagtcatcaattgacagcggaaaatgtaaagaatggaaatatttctcaggaaatattacctataaccgttaaaggagaaatattcaacactgatgaaagtctaaaatcacatattccgaaagataactttggccgatttaagcccgtgatcaaaggtgggaccgttaccgctgcgaatagttgtatgaaaaatgatggtgcagttttattgcttattatggaaaaagatatggcatacgaattaggtttcgagcatggtttattatttaaagatggtgttacggtaggtgttgattctaattttcctggcattggtccagtaccagccatttccaacttactaaaaagaaatcaattaacgatagaaaatattgaagtcattgaaattaacgaagcgttcagtgcacaggtggttgcctgccaacaagctttaaatatttcaaatacgcaattaaatatatggggtggtgcattagcatcaggtcatccatacggtgcaagtggtgcccaattagtgactcgattattttatatgtttgacaaagagactatgattgcatctatggggatagggggaggtctaggaaatgcagcattattcactcgattctaa

SEQ ID NO: 420435 - DNA, 1377 bp, Staphylococcus aureus
atgaacgtaatattagaacagttgaaaacacatactcaaaataaacctaatgacatagcattacatatcgatgatgaaacaattacatatagtcaactaaatgcccgcatcactagcgcagtggaatctttgcagaaatattcacttaaccctgtcgttgctattaatatgaaatcaccggtgcaaagtattatttgttatttagctttgcatcgtttacataaagtgcctatgatgatggaaggtaaatggcaaagtactatacatcgtcaattgattgaaaaatatggtattaaagatgtaattggagatacaggtctcatgcagaatatagactcaccgatgtttattgattcaacgcaattacagcactaccccaatttattacatattggttttacttcagggacaactggactgccaaaagcatattatcgtgatgaagattcatggttggcttcttttgaagttaatgaaatgttgatgttaaaaaatgaaaatgcaatagcagcccctggaccactatcgcactcgttaacattatatgcgttattgtttgctttaagttccggtcgtacttttataggacagaccacttttcatcctgaaaagttacttaatcaatgtcgtaaaatatcatcatacaaagttgctatgtttcttgttccaacgatgattaaatcattattgttagtttacaacaatgaacatacaatccaatcattttttagcagtggagataagctgcattcttctatttttaaaaagataaaaaatcaagcaaatgacataaatttgattgaattttttggtacatcggaaaccagttttatcagctataatttgaatcagcaagcaccagttgaatcagtaggtgtgctatttccaaatgtggaattgaaaacaacgaatcacgatcacaatggtataggaactatttatgtaaaaagtaatatgatgtttagtggctatgtaagtgaacaatgtataaataatgatgaatggtttgttactaatgataatggctatgtaaaagagcagtatttatatttaacgggacgtcaacatgatatgttaattattggtggtcaaaatatatatccagcacatgttgaacgccttttaacgcaatcgttgagcattgatgaagcaattatcatcggtattccaaatgagcgttttggtcaaataggcgtattgctttattctggtgatgtgacacttacacataaaaatgtaaaacaatttttaaaaaagaaagtgaaacgctatgaaattccatcgatgattcatcatgtagaaaagatgtattacactgcaagtggtaaaattgctagagaaaaaatgatgtcgatgtatttgagaggtgaattataa

SEQ ID NO: 420436 - DNA, 1401 bp, Staphylococcus aureus
atggattttaataaagagaatattaacatggtggatgcaaagaaagctaaaaaaaccgttgttgcaaccggtatcggtaatgcaatggaatggttcgattttggtgtctatgcatatacaactgcgtacattggagcgaacttcttctctccagtagagaatgcagacattcgacaaatgttgactttcgcagcattagccattgcgtttttattaagaccaattggtggtgtcgtatttggtattattggtgacaaatatggacgtaaagttgtattaacatctacaattattttaatggcattttcaacattaaccattggattattgccaagctatgatcaaattggactttgggcaccaatactattattgcttgcaagagtactgcaaggattttcaacaggtggagagtatgcgggggcaatgacatatgttgccgaatcatctccagataagcgtcgtaactcattaggtagtggactagaaattgggacattatcaggttacatagctgcttcaattatgattgctgtattaacattctttttaacagatgaacaaatggcatcatttggttggagaatcccattcttactcggtttattcctaggattatttggcttatatttacgtcgtaagctggaagaatcaccagttttcgaaaatgatgttgcaacacaaccagaaagagataacattaactttttacaaatcatcagattttattacaaagatatatttgtatgttttgtagctgttgtattcttcaatgttacgaactatatggtaactgcatatttaccaacctatttagaacaagttattaaattagatgcaacgacaacaagtgtattaattacttgtgtcatggcaataatgattccattagcattaatgtttggtaagttagcggataaaataggtgaaaagaaagtatttctaattggtactggtgggctaacattattcagtatcatcgcatttatgttattacattcacaatcatttgttgtaatagtaatcggtatatttatattaggatttttcttatcaacttacgaagcgacaatgccagggtcgttaccaacgatgttttacagtcatataagatatcgaactttatcagtaacatttaatatctctgtttcgatatttggtggtacgacgccattagttgcaacatggttagttacgaaaactggagatccattagcacctgcgtattatttaacagcaatcagtgttattggctttttagttattacattcttacatttaagtacagcaggaaaatctctaaaaggttcgtatccaaatgtagataacgagcaagatagagcttattatgcagaacatccaaaagaagcattatggtgggttaaagaacgtaagaattag

SEQ ID NO: 420437 - DNA, 648 bp, Staphylococcus aureus
ttgaagtttgacaattatatttttgattttgatggtacgttggcagacacgaaaaaatgtggtgaagtagcaacacaaagtgcatttaaagcatgtggcttaacggaaccatcatctaaagaaataacgcattatatgggaatacctattgaagaatcatttttaaaattagcagaccgaccattagatgaagcagcattagcaaagttaatcgatacatttagacatacatatcaatctattgaaaaggactatatttatgaatttgcgggtataactgaagccattacaagtttgtataaccaagggaaaaaacttttcgtggtgtctagtaagaagagtgatgtattagaaagaaatttatcggctattggattaaatcacttgattaccgaagctgttggatccgatcaagtaagtgcatataaaccaaatcctgaaggcatacacacaattgtgcaacgctacaatttaaatagccaacaaacggtttatattggtgattcaacatttgatgttgagatggcgcaacatgctggtgtaccatctgcagcagtaacatggggagcacatgatgcaaggtcattacttcattcaaatccagattttataatcaatgatccatcagaaattaatacagtattataa

SEQ ID NO: 420438 - DNA, 549 bp, Staphylococcus aureus; identical to SEQ ID NO: 406179

SEQ ID NO: 420439 - DNA, 633 bp, Staphylococcus aureus
gtggaattacaattagcaattgatttattaaacaaagaagacgcggctgagttagcaaataaagtaaaagattatgtagatatcgtagaaatcggtacgccaatcatttacaacgaaggtttaccagcagttaaacatatggcagacaacattagtaatgtaaaagtattagcagacatgaaaattatggatgcagctgattatgaagttagccaagcaattaaatttggcgcggatgtaattacaatactaggtgttgcagaagatgcatcaattaaagcagctattgaagaagctcataaaaataataaacaattactagttgatatgattgctgttcaagatttagaaaaacgtgcaaaagaactagatgaaatgggtgctgattatattgcagtacacactggttatgatttacaagcagaagggcaatcaccattagaaagtttaagaaccgttaaatctgttattaaaaattctaaagttgcagtagcaggtggaattaaaccagatacaattaaagatattgtcgctgaaagtcctgatcttgttattgttggtggcggaatcgcaaatgcagatgatccagtagaagctgcaaaacaatgtcgcgctgcaatcgaaggtaagtaa

SEQ ID NO: 420440 - DNA, 759 bp, Staphylococcus aureus
atgaaagtattaaacttaggatcgaaaaaacaagcatcattctatgttgcatgtgagttatataaagagatggcatttaatcagcactgtaaacttggtttagcaactggtggtacaatgacagatttgtatgagcaacttgttaagttattaaataaaaatcagttaaacgtagacaatgtatccacgtttaatttagacgaatatgtaggtttaaccgcatcacatccgcaaagttatcactattatatggatgacatgcttttcaaacaatatccttattttaatagaaagaacattcatattccaaatggagatgccgatgatatgaatgcggaagcgtcaaaatataatgacgttttagaacaacaaagtcaacgtgatattcaaattttaggtattggagaaaatggtcatattggatttaatgaacctggtacgccgtttgatagtgttactcatatcgttgatttgactgaaagtactattaaggctaatagtcgatattttgaaaacgaagatgatgttccaaagcaagccatttcgatgggacttgctaatattcttcaagccaaacgtatcattttactcgcatttggtgaaaagaaacgtgctgctattacacatttattaaatcaggaaatttctgttgatgttccagccacattacttcacaaacacccgaatgttgagatatatttagacgacgaagcttgcccgaaaaatgttgcgaaaattcatgtcgatgaaatggattga

SEQ ID NO: 420441 - DNA, 363 bp, Staphylococcus aureus
gtgttggaaccaattaaagaacaagaagttatagatttacttgcttcttttgaacataaacctgtgtatctgcatgttgaaacgacaaatggggcctatgcgaaccatttcgatcaacgtgtttttaatgctggtacatttttaagaaacatacaagtaacatatacgcatgcacaactaaaaggtggtaataaagaaccttatcgcattggtcttaaactatcaaatggtggttgggtttatgtacaaggtctaacgcattttgaggtcaatgaacatgatgaatttttaattgcaggttttaattacgaaggtcaactcgctgcagcacttcaaattagtgagcgaccatttaatttatag

SEQ ID NO: 420442 - DNA, 666 bp, Staphylococcus aureus
atgactgacgaaagacatgtattagtaatatttccacatcctgatgatgaaaccttctcatctgcaggcacattagcaagttatatccaaaaaggcatacctgtaacatatgcatgtttaaccctaggacaaatgggcagaaatttaggtaatcccccatttgcaacacgcgaatcattaccaagtattcgtgagcgtgaactagaagaagcttgtaaagttattggtattactgatttaagaaaaatgggtttacgtgacaaaactgtcgaatttgaaccctacgaacatatagatggtatgattaaatctttaatcgatgatacaaatccatcattgattatttcattttatcctggatatgcagtacatcctgatcacgaagcaacagcagacgctgtaattcgaacggttgaacgcatgcctaaagaagaacgccctcgtttaactttagttgcgttcagtaatgatgcaaccgaagctcttggagaacctgatattcaaaatgatattacagattttaaagaacttaaaattaaggcatttgaagcacatgcttctcaaacaggtccatttttaaaacaattagcaagtcctgaaatcgatggtaaacaacacagctttttaacagtcgaaccatattggacatatcactttaaatcttaa

SEQ ID NO: 420443 - DNA, 879 bp, Staphylococcus aureus
atgactgaatttgatttatcgacacgagaaggtcgttggaaacactttggttccgtagatcctattgaaggcacgaaacctactactaagaacgaaatgacagacttacaaagtacacataaagattttttatttgaaatagaagaagttggtattaaaaacttagtgtaccctgtacttgttgaccagtatcaaacagctggcacatttagtttttcaacaagtttaacaaaagacgaaaaaggtattaatatgagccgtataattgaaagtgttgaaaagcactatgataatggtattgaacttgaatttaatacactttatcaggtgttacgcactttacaaacgaatatgaaacaaaatgcggcaggcgttgatgtttctgggaaatggttctttgatcgctatagtccaaccacaaatattaaagcagttggtaatgccgatgtcacttatggattagcaattgacggtgataaagttacacgtaaagaacttactattgaagcaactgtcacaacgctatgcccttgttcaaaagaaataagtgagtattcagcgcacaaccaacgtggtgttgtcactgttaaaacatatattaataaagatcaagacatagttgatgactataaaaataaaattttagatgcaatggaagctaatgcaagttcaattctataccctattttaaaacgtcctgatgaaaaacgtgtgacagagcgtgcatatgaaaatccacgttttgtcgaagacttaattcgtttaattgccgcggacttagttgaatttgattggttagacggtttcgatatcgaatgtcgtaatgaagagtctatccatcaacatgatgctttcgctaaattaaagtatcgcaaataa

SEQ ID NO: 420444 - DNA, 1491 bp, Staphylococcus aureus
atgaattattttgtaggtaatagtttaggtgttaatttaactgggatagagaaagcaattattaatcgtttaaatttatttaaagaaatgggaagaccagcgcaatgtgtatttctgtcatggaatagatatttatatagaaatgcccaaaattatattactagttctgactatattaatatgtatgatttcttccaagaagcaacatatttagaacgcaatgaaccatttgactggttgtcgtattggactgatgaatgttattatactttaaaacatgttgaaaatagtcatgactttagaatatatgatcaagagcgtttcttaatgtatgcccattttcaagatcctaaatatcgtatattagattatgtgaatcattttgatagtcaaagacgaaaagtaaaacgtgatttttatgatgtgcgtggctttttaagttgtagtaggattcttgttgataaacaacaaacattatgtgaatttttctataatccagaaggtgacacaaaattagaaaagtatttttcttacaaggatggcaaaccagaagtacaaaaaattattgtttactatgctaacaaacaatatttctttaataatgaaacggaattaggcgcatttttcattaaacaactatatcaacatggggatttatttttcagtgaccgtaatgtgtatacagcacctattttcaacttaacacctgagtcaatcccagtagtagctgtgcttcacagtacacacattaaaaatattgatgcattagattcatcgccatttaaaaatgtatataaagcgatgtttgaaaatttatctcgatatcgtgcaattatcgtttctactgagcagcaaaaattagatgttgaaaaacgtattaaccatactattccagttgttaatattcctgtcggctatagtgaaacaattgatacaccagtccaaacattagatcagcgcagtgttaaattaatttccgttgctcgttattcacctgaaaaacaattacatcaacaaattgaattaattaaacgcttagtatcgtatgtcccaaaaatagagcttcatatgtatggttttggttctgaaagtaaaaaattaaatgaattgatacaaaaatatggattggaaaatcatgtttacttacgcggctttttaagcaatctagaccaagaatatagcgatgcctatttgagtttaataacaagtaacatggaaggtttctctttagcgctacttgaatctttagcacatggtgttccagttattagttatgatattaaatatggacctaacgaattaattacgcctgatttcaatggttatttaattactaaaaatgatgaagatgccctatttgataaagtaaaatatgtgattgatcatcctgaagtacagcaacgactgtcaaaaggtagtttggcaaaagcacaacaatatagtaaagcgtcgttaattaaacaatgggaccaatttgttcgtcttatataa

SEQ ID NO: 420445 - DNA, 282 bp, Staphylococcus aureus
ttgaaacatattaatgattataaagatggtgacatttcatataatcctaatgttccaagttattccgcaaaatatcaattgaaaaacgatgattacaatgtgaagcaacttcgaaaaagatataatattccaaccaacaaagctccgaaactattattgaaaggtgatggtgatttaaaaggttcatcaataggatcaaaaaatctagaatttacctttgtagaaaataaagaagagaacatttatttttctgatagtattaatttcaaacctactgaatag

SEQ ID NO: 420446 - DNA, 1485 bp, Staphylococcus aureus; identical to SEQ ID NO: 413930

SEQ ID NO: 420447 - DNA, 576 bp, Staphylococcus aureus
atggggaaaaaagatccagcagtattagaagaatcgttaaatatttctattgaagaaatgaatcgtatcataaaattagtcgaagaattacttgaattgactaaaggagatgtaaatgacatttcttctgaagcgcagaccgtgcatattaatgatgaaattcgctcgcgaatacactcattaaaacaattacatcctgattatcaatttgatacggatctgacatctaaaaatttagaaattaaaatgaagcctcatcaatttgaacaattatttttaatctttattgataatgcaatcaaatatgatgtgaagaataagaaaattaaagttaagacaaggttaaaaaataagcaaaaaataattgaaattacagatcatggaattggtattccagaggaagatcaagatttcatttttgatcgcttttatcgagtggataaatctcgttcaagaagtcaaggcggtaatggactcggattatctattgctcaaaaaatcattcaattaaacggtggatcgattaaaattaaaagtgaaattaacaaaggaacaacgtttaaaatcatattttaa

SEQ ID NO: 420448 - DNA, 300 bp, Staphylococcus aureus
atgatgaaaccaccaaataagtttaagacaacagccgttacaacatatttaggttcaattaaggtaaagtatgcaccgataattgaagcagaaacagtcgacattgctgaagctgttaatgtgtataaacgttgcttaggtatgtatggtaattgttttttaattgaaataaatacttcagattgtcccaaaattgctgcagcaactgcattgtatgattctaaacgtcccataccattaattttagaaattaagaatcctaaaacattaatgattaaaggtaaaatctttgtgtattga

SEQ ID NO: 420449 - DNA, 147 bp, Staphylococcus aureus
atgaactatgttgaacgttatattgaacagtttttgagagcaacagtaagaaataatatcaagcactaccttttaatgctagatgaaaaaatgaaaaatttagatgattatatgcgttatttaattactaaaaaaagaacaacttag

SEQ ID NO: 420450 - DNA, 234 bp, Staphylococcus aureus
gtgaaagatttaactgatgacgaattaggtcgcatccgtgaagttgtagacggttataaagtcgaaggtgacttacgtcgtgaaactaacttaaatatcaaacgtttaatggaaatttcatcataccgtggtatccgtcaccgtcgtggtttaccagttcgtggtcaaaaaacgaaaaacaacgcgcgtactcgtaaaggaccagttaaaacggtagctaacaagaaaaaataa

SEQ ID NO: 420451 - DNA, 279 bp, Staphylococcus aureus
atgaaccttctagatagtatggaagattttggtttgccatttgctattgattcatttgtaaaaaatgagacagactcaatagcattggaaaaaatgtttggtgcaattgataaatattttttgacattaaataaccaaacatttttttcaataataaaagaaaatttaaagtttatagaaaatcctgttaatgagataaaaatagatagacctttattaaaagagaaatttttttctgatatagagaaagaactaattcaaaatttaaatattttataa

SEQ ID NO: 420452 - DNA, 864 bp, Staphylococcus aureus
atgaataaattaacaataacaagtttatcgatacttgataataaagaaaaaaaagcgaataagttcgaattttcagaaaaatctaatttgataattagcgaaaggaacggggaagggaaatctagccttataaaatcaatacagtattgtttaggatcaaatttaaaagcgtttccaaaaggatgggactacaaaaattatgtttttcaattagaaatagttattgataaaaataagatattgattcagagatataataatataataacagttttagatgatgggaaaattaaaaagtttggatacttaaaagactattctgattggtttcaagataagatggagatgaatttaaaattagttagtaagaataaaaatacttctagtttagcttcactggaagctattttgagcccattgtatattgatcaagataaatcatgggatggaaatctatataagaactcatttgagggtttagcacaatataaaagtcaaagttttcctaaagaagtatttgaatactatttaggtatttctaataatataatgaatgataaaataaataaactcaataaatataaagagaaatcggaagaaaaaaaagtaaaaattgaacaagtagattctgtatataaaaattatagttctcaaaagaacatttcgaaaacgataccaaaagaatttgaagagtttaaaaaacaagtagatttctatattaaagaaacagatcgattttctcaaatgatcactcaaaaaacagacaagttatctaaagaaaaaatgaagcttgatattttacaacaagacagggaagaattgagaaaattattaacaaaaacaaaaaaagattatcagaagtaa

SEQ ID NO: 420453 - DNA, 204 bp, Staphylococcus aureus
atgttatattggcaggagggccccaacatagagaaattggaaccccaatttaaacaggcaatgcaagttggcggggccccaacacagaagctgacggaaagtcagatttcaataatgtgcaagttggggatggggccccaacacagagaatttggtaaagaaattcaacaggcaatgcaagttggggacggggccccaacatag

SEQ ID NO: 420454 - DNA, 333 bp, Staphylococcus aureus
atgatcgcgacgatactgacggctactgcggtatatgtagcaacaggaattgattatctcgtcatattaattcttttgttttcgcaagtaaaaaaaggtcaggtaaaacatatttggataggacaatatatagggactgcaattgtgataggagcaagtcttttagttgcacagggggttgtaaatttaattcctcagcaatgggttatcggactacttggacttttaccactttacctaggcgtgaaaatatggattaaaggagaagaggatgaagatgaaagtagcattttatctttattctcctctggaaaatttaacagttatttttga

SEQ ID NO: 420455 - DNA, 711 bp, Staphylococcus aureus
  misc_feature (429)..(437): n is a, c, g, or t
ttgctttgcgacgttgaagtggttaataaaaactcaaaatatagaattattaaatataatgatgaatatttgatgatcgatttagtaagtacctggttaactttatttcttccgatgatgaattggttaatccctaaaaaatacgtgaagattagtaaaaaagaatttgacgatttaaacattgttaaacctactaaaaatagagctttttggtcagctgtaggtggctcagttttatttggagttacgttcagaaagtatactcatttgctcgatgtccaactagaaaaaagtttagttattaccatatgttttataacattcttaagtattttaatcttttttatgaaattaaatcaaaaattaaaattaaaagtttttaataaaaataaagaacataaagaaaaagttatgctactacctactttnnnnnnnnntcgtcggcagcgtcagatgtgtataagagacagaaataaagaacataaagaaaaagttatgctactacctactttcaaacatttttgttttgtaatattttcttatttattttcgggatttttttcaataatgagtctatgcatgttaataactttagattcacagaacataatagtatttattgcttggattataatgacaatgcttttctttctagtgaatatggcttcgataggtaataaaaatgttcatgtcatacttaaaaagcattag

SEQ ID NO: 420456 - DNA, 1431 bp, Staphylococcus aureus
atgtgcattgcttttgttaatattggttatatattgtctttctgggaaggtattaaatggcatgatggtaatgaattgaaaattgatgattggatttattcaattgaagtcttagctaacaaggattacgaaggtgcttattatccaagtgtagaaaatatccaaggtgcgaaagattatcatgaaggaaaaactgatcatattagcggattgaagaaaatagatgactacactatgcaggttacatttgataaaaaacaagaaaattacttaacaggatttattactggacctttattaagtaaaaaatatttatcagatgtaccaattaaagatttagctaaatcagataaaatccgaaaataccctattggtattggaccgtataaagttaagaaaattgttccaggtgaggctgttcaactcgttaaatttgatgattattggcaaggtaagcctgcactagacaaaatcaatttaaaagttattgatcaagctcaaattattaaggcaatggaaaaaggcgatattgatgttgcgaatgatgctaccggtgcaatggcaaaagatgctaagtcatctaatgctggtctcaaggtattatctgcgccaagcttagactacggtttaataggattcgtatctcatgattacgataaaaaagctaataaaactggtaaagtgagaccaaaatatgaagacaaagaattacgtaaagcaatgctttatgcaattgatagagaaaaatggatcaaagcatttttcaatggttacgctagtgaaataaatagttttgtaccatcaatgcattggatagcagctgatcctaaggaactaaacgattataaatatgatcctgaaaaagctaaaaaaatcttagataagttaggttataaagatagagatggtgacggatttagagaagatcctaaaggtaataaatttgagattaactttaaacattattcaggttcaaatcctacttttgaaccaagaactgctgcgataaaagatttctgggaaaaagttggcttgaaaacaaatgtgaagttagtagaattcggtaaatataatgatgacttagcaaatgcatctaaagatatggaagtgtacttcagatcgtgggcaggaggtacagatccagatccatcagatttataccatactgatagacctcaaaatgaaatgagaacagttttaccaaaatcagatcaatatttagatgatgcattagacttcgataaagtaggcattgatgaaaagaaacgtaaagatatttatgttaaatggcaaaaatatatgaatgatgagttacctggattaccaatgttccaaggtaaatcgataactattgttaacgataaagtacgaaacttagacattgaaattggaactgatcaaagtttatataatttaactaaagaagcttag

SEQ ID NO: 420457 - DNA, 402 bp, Staphylococcus aureus
atgaaaatcaaagttaaaaaagaaatgagattagatgaattaattaaatgggcgcgagaaaatccggatctatcacaaggaaaaatatttttttcaacaggatttagtgatggattcgttcgttttcatccaaatacaaataagtgttcgacgtcaagttttattccaattgatatccccttcatagttgatattgaaaaagaagtaacggaagagactaagtttgatgggttgttagaggtatatgagattcaagaaggagtctatatgtcagcgctgcacacaaataccagtatcaaagaacgtttagagaacacgtctttccctaccaaagcattctatatcttaaacgacgacctaactatgacgttaatctggaaagatggggagttgctagtatga

SEQ ID NO: 420458 - DNA, 684 bp, Staphylococcus aureus
atggctactaaggaaaatatagacattcttcgaaagccaggtgcacaagccttaagtttagcatcattatttatgatacttttttcatgtctaactttcttttttggtttagattatgaaaggtttccaaattatttaaagataacgacaattatagaattaataattatcataattagtttacttcaatggattagatttatagatttcgaaaaggaaagcgcacagaaatataaaaaaatatatgcccgatttttagttgttataaatgtgctaactactatcactgcagtatttgcaacatgtaatctttactattttgttgctttacaaaatcattatgacctattcaattattggttgatgggcacgatttcaatcataattagctatttgttattagtaattggcggaatgttcacgttattaaaattacctaaagtaacaaaacgttggggtggtaaaactaaaacccatttttgtttattattaactgcgttgagcgcattcatatatattgaaagaattatcgaatatatattggttcctaatgtagtagaatccaagtttgtcataatggtaagtatcattattattgtttgtacacaatttgcagcctttcaatttattatgcaatacagtagattctatatttttgaattaaacactgaagatgatgactaa

SEQ ID NO: 420459 - DNA, 501 bp, Staphylococcus aureus
atggcacatggccgtcaacaagatgaattacaagatataactttattaggaaatcaagacaatacttacaattttgactatcgtcccgatgtattagaatcgtttgataataagcatcaaggtcgtgactatttcgtaaaattcaactgtccagaatttacatcattatgtccgattactgggcaaccagattttgcaactatctatatttcatatattccaaatgttaaaatggttgaatcaaaatctttgaaattatacttatttagtttcagaaatcacggtgatttccacgaagattgtatgaatattattatgaatgatttgatagagcttatggacccacattatattgaagtttggggcaagttcacaccacgtggtggaatttctattgatccttatacaaactatggacgtccaaattctaaatatgaaaaaatggctgagcatcgtttaatgaatcatgatttatatcccgaaaaaatagataatcgttaa

SEQ ID NO: 420460 - DNA, 405 bp, Staphylococcus aureus
atggacaataaagttgaaaagattcttgaagatattaataaattacaaggctataaagtaacatatcaatatgctactgctataaatataaaagataataacatgaactcttggtttgaaaaaattgaggaaattctattgaatgtaaaaggagttatacgcattttatctcctgaccaccccccggtaaattatgattattgggttttacctggaagatataaaagacatacaaaagaatatcacgaaaaactagaaaaatttttagaaaaatttgctactaatgtaaatattaatgatggattgtttgatcaaaataatatacatggatacaaatataaaaaatatatattcactccacatattgaaattactcatgagaacactttgaatttatttttttaa

SEQ ID NO: 420461 - DNA, 261 bp, Staphylococcus aureus
atggagatgaatggattaggttcattcaatacggagattctaccaaaaccgaaaggcgcaagggatgtcattatacaaaaaggtgatttagtaaaaatagatatgcaagcaaaaagtgttgtcatcaatgaggaaccaatgttgagcgagaaatcgtttggaagtaattatttcaatgttgattctgggtacagtgaattaatcatacaacctgaaaacgtctttgatacgacggttaaatggcaggatagatatttatag

SEQ ID NO: 420462 - DNA, 1941 bp, Staphylococcus aureus
ttgtgggataaagtacgtaatatcttcggaaacatgcgtgacggtttaaaatctatcattggtaaaattaaagatcatatcggcggtatggtagatgctattaaaaaaggacttaataaattaattgaaggcttaaactgggtcggtggtaagttaggtatggatgaaatacctaggttacacactggtacagagcacacacatactactacaagattagttaagaacggtaagattgcacgtgatacattcgctacagttggggataaaggacgtggaaatggtccaaatggttttagaaatgaaatgattgaattccctaatggtaaacgtgtaatcacacctaatacagacactactgcttatttacctaaaggctcaaaagtatacaacggtgcacaaacttattcaatgttaaacggaacgcttccgagatttcatttcggtactactatgtggaaagatattaaatctagtgcatcatcggcatttaactggacaaaagatcaaataggtaaaggtaccaaatggcttggcgataaagttggcgatgtaatggactttattgataatccgggtaagcttttaaattatgtgctcaaagcgtttggtgttgactttagctctctaactaaaggtatgggtattgttggcgatataacaaaagcgtcttggaataagattaaaagtaaggcgattaattggataaaagaaggattagagagccaagcgggagatggttctgtgtttgatagtttcagaatactacaaccttattcagcaccgccaaaacctcctaaccccaattatccatttaacggaggcgttcatcatggtgttgactatgatacgccgaccggtacccctatacgtacgccaatgggtggacgtgttagaagttggtatgacaactatggtggcggtaaagcaattactgttcaaaaaggtcgaacatttttgtggttcatgcacttatctgaacaattgcgtagaacaggtgaacaaattaaagctggtcaattaattggtaaatcaggtaatacaggttctatgactaattaccgccatttacatttccaagtcaatcaaggcggagagtccaataggtattcgacagaccctattccttggttacggaaaaacgacaaaactggtggaaagaattcacctggagggagtggttctgaaaatgcgcgcagagcgattagaacagctcaaaatatacttggaggtcaatacaaagctagctggattacacacgaaatgatgcgtgtagcaagacgtgaatccaattatacagctaatgcagttaataattgggatagcaacgcaagagctggtacaccttcaagaggtatgttccaaatgatagatccttcatttagagcgtacgcaaagtcgggttacaataatcctcttaacccaactcatcaagctatatcggctatgagatatattgtgggtaaatgggtaccaagaacgggctcatggagagctgcgttcaaacgcgctggtgattacgcatatgctactggtggcaaagtctacaacggattgtaccacttaggagaagaaggatatccagagtgggttattcctactgatcctgcacgtaaaaacgaagcaatgaagatgttacattatgcagcagcagaagtaagagggagaaaagcgagtaaaaataagcgtcctagtcaattgtctagtgtaaatgggtttgatgacccaagcttattattgaaaatgattgaacaacagcaacaacaaatagctttattactgaaaatagcgcaatcaaacgatgtgattgcagataaagattatcagccgattattgacgaatacgcttttgataaaaaggtgaacgcgtctatagaaaagcgagaaaggcaagaatcaacaaaagtaaagtttagaaaaggaggaattgctattcaatga

SEQ ID NO: 420463 - DNA, 1920 bp, Staphylococcus aureus
ttgtgggacaaagtacgtagtatctttggaaatatgcgtgacggtttaaaatctatcattggtaaaatcaaagaccatatcggtggcatggtaagtgctattaaaaagggtcttaataaactgattgaaggtttaaactgggtaggtggtaagttgggtatggacaaaataccgaagttacacactggtacagagcacacacatactactacaaggttagttaaaaacggtaagattgcacgtgatacattcgctacagttggagataaaggacgaggcaatggtcctaatggtttcagaaatgaaatgattgagtatcctaacggtaaacgtgtacttacgcctaatacagatacgacagcgtacttacctaaaggctcaaaagtatacaacggcgctcaaacttattcaatgttaaatggaacgcttccaagatttagcataggtactatgtggaaagacattaaatctggcgcatcatcagcgtttaaatggacaaaagaccaaataggcaaaggtactaagtggcttggtgataaagtcggcgatgtcatggactttatcgataatccgggcaagcttctaaattatatacttaaagcattcggtgttgatttcagctctctaactaaaggtatgggaattgcaggagacattacaaaagcggcttggaataagattaagaagagtgctaccaattggataaaagaaaacttagaagcaatgggtggcggtgatttagttgggggaatattagaccctgacaaaattaattatcattatggacataccgctgcatacactgctgcaactggaagacctttccatgaaggtgtagacttcccgtttgtataccaagaagttagaacaccgatgggtggtaggctaacaagaatgccgtttatgtctggcggttatggtaattatgtaaaaattactagtggcgtaattgatatgctatttgcacatttgaagaacttcagtaaatcacccgctagtggcacgatggtcaagccaggtgatgttgttggtttaacgggtaatacaggttttagtacaggaccgcacttacattttgaaatgagaagaaatggacgtcactttgaccctgaaccttatttaagaaacgctaagaaaaaaggtagattatcaattggtggcggtggtgctacttccggaagtggtgcgacgtatgctagcagagtaattcgacaagcgcaaaatatcttaggtggccgttataagagtaaatggattcacgaccaaatgatgcgagttgcaaagcgtgaaagtaactaccaagcgaacgcagtgaataattgggatattaatgcgcaaaggggtgacccttcaaaaggattattccaaattatcggttcaacatttagagctaatgcgaagtctggttatactaacttcaataaccctgttcatcagggtatctcagcaatgcagtacattgttagacgatatggttggggtggttttaaacgcgctggtgattacgcatatgctactggtggcaaagtctacaacggattgtatcacttaggagaagaagggtatccagagtggataattcctactgatccaagtagagcgaatgaagctcataaattattagctttagctgctaatgatattgacaatcgatctaaaaacaaaagacctaacaatctaccaaatccaagtgtaagtaatagtgatacaaactatattcatacattagagaataaactgaacacagttatcaattgtttagttagtttagttgaatctaatcaagttattgcagataaggattatgaaccagttattaataagtatgtgttcgatgatgaagtaaacgattctatcgataagcgagagcgtcatgaagctacaagggttaaatttagaagagggggtacgataatctaa

SEQ ID NO: 420464 - DNA, 753 bp, Staphylococcus aureus
atgagtaatacacaaaagaaaaatgtgccagagttgaggttcccagggtttgaaggcgaatgggaagagaagaagctaggggaattagccaaaatatatgatggtactcatcaaactcctaaatatacaaacgaaggtataaaatttttgtcagtagaaaatataaaaacgttgaattcaagcaagtatatttcagaagaagcgtttgaaaaagagtttaaaatccgaccagaattcggagatatattaatgactcgaattggtgatataggtacaccaaacatagtgagttcaaatgaaaaatttgcttactatgttagcttagcattattaaaaactaagaatcttaattcctattttttgaaaaatttaattttatcatcatctatccagaatgaactatggagaaaaactttacatgtggcatttcccaaaaaaataaacaaaaatgaaattggaaaaattaaaattaattaccctaaaaagcaagaacaacaaaaaattggtcagttcttcagcaaactcgaccgacaaattgaattagaagaacaaaaacttgaattacttcaacaacagaaaaaaggctatatgcagaaaatcttctcgcaagaattgcgatttaaagatgagaatggtgaagattatccagattggaaagagaagaagttaggggatattacagaacaatctatgtatggtataggtgcatctgcaacaaggtttgattcgaaaaatatatataagaattactga

SEQ ID NO: 420465 - DNA, 390 bp, Staphylococcus aureus
atggctgcagctaaaaatagagtaagtacttactttattaaatgtcatcatttgatagagaatttaagaaaagcaaaacttgagaacagattagaaaatagattgaagcactatagcaagtataagttattaatcatagatgagattgggtacttacctattggaagtgaagatgccaaactattctttcaattaatagatttaagatatgagaagaaaagcacaatatttaccacaaatatcaatttcaacttatggaatgaaatatttgatgatcccaaaatcgcaaatgcgattttggataggatattgcatcattcaagtgtagttaaaatcactggcaaatcgtatagattaaaagatcattcgcctaagaaggaaattacttag

SEQ ID NO: 420466 - DNA, 255 bp, Staphylococcus aureus
atgattataaaaacttttttaaaacatttaaaaaacatattgattttaattaaacaaggaaaaaagccattagctcaagccggtcattttaaattaagcttttacgaagaggatttaaaattgttacaaaaaaattataagactacgctagtcgatattaaaggattgaataaacatttttataaggaatgtgataggtgcttaaaagcatataatatttttattgagggtataaataaacatttatatgaatga

SEQ ID NO: 420467 - DNA, 381 bp, Staphylococcus aureus; identical to SEQ ID NO: 409383

SEQ ID NO: 420468 - DNA, 267 bp, Staphylococcus aureus; identical to SEQ ID NO: 417358

SEQ ID NO: 420469 - DNA, 2013 bp, Staphylococcus aureus
atggataatagctatttctttgaacacttggatgctaatacagagagtaatccaaggattcattctataataagggatctgaaaaaactatcccaagaggaaaaaaaacaagtatatgtaataaacaaaccagtaggtgaaagaaaatataaatacgcttataaagatgcggttgtaattcttattccaaaagttaagctattagttattaatgttggtaatgatacggatgcgtttgaagacttttctgcggattttattgaagatcttgggattatatcagataaatataattataataattttttgggtagaccaagaaaatggagagataagcttgtaaaaaaagttgacttccagactactgatgatataacttcgattatcgaaagttgttcattaactggtatagatgcacgtaaaggtgagttattgatatctttactaactggaagtatcaatgatattgatcgtgttgatggagaactccctggaaatacgttagaacaaattaagaaaaatattactctatttgatggagaacaaacaaggttcatttacaaacaaccagataaaaaagtagtaacaattcaaggtttagcaggcacgggtaaaacggaattactgttacataaacttaaggatatttacgttaacgaggaaaagtcaaaaatatttttcacctgttatagtaagattttagcacaagatttgaatgagcgaatccctgctttttttgatttcatgaaagttaatgagcaaattaaatggggcgagcgactttgggtagaacgtagctggggctctaaagtagataaaaattcaggtttatatagttttatttgtgattattacgaaattccttttcaaaggtacaactggtctatatcttttgaatcggtatgtaaagatgctttagaaaagctgaatcaacttgaatcagaagggatatttgagccgttctttgattacattctaatcgatgaaagtcaagattttaatgaagtttttttcgaattatgtaaaaaagttacaataaaacaagtttatattgccggagacatctttcaaagtatttattactataatgaaaacacagaaatagtgcctgactttcttttgaatagagtttataggactgatccaaaaacgctaatgtttgcacacgcaataggatttggacttttagagaggccggtagttagatggttaagtgatgaagaatgggaagcctgtggatacacaattgaaaaagaaggggattattacagtttttcaagagagcctttaaaaagatttgaaaatattgcagaagatattaccagcctcaaactttctgttgctttagatgacaagtatttggataaagttctatcggctattcaagatattcgagaaaaaaatcctactgtcgaaccaggtgatattggagtcgtattccttgaagacaataattcaaactatgaacttgctgaacaattgattattaaggttgatcaaatgtttgggtggaaatccattaaaggttatgaagtaaaaaataaaacaaaaaatgctttgtttataagtaatcgaaataatataaaaggtctagaatttccctttattatttgtataaccacctctgtacttaatagtaatacaaatattagaaactcactatatatgatgcttaccaggtcatttatcacaagctatttaatactttcagaagaaaatggagaactcaattctaaacttggagatgcagcagaaaagttaaacgatacgggacaacttaaggtggaaaagccaaaacctgatgaaataatggataaatctaaattgatgctagaagctagtgaaaataaatctcaataccaaattgtagaagagattttgcgccaatcgtttcatattcaagatcaaaaagcaaaagaaaaaattcatgaaatggttaatgtattgttaccggggagtgtggattttgaaaaaatttataaggtaattaacaaaaatattgatatggtatag

SEQ ID NO: 420470 - DNA, 195 bp, Staphylococcus aureus
atgaagttatggacttacattggtaaaaaagtaatgatcgagttaactaatgggcaaaaatttattggagaagttacaaattatgacgatgaaatagataacgaaagtggagaagattctatacatttagatgacggaatagatttatatgattttgatgaaagccaaatcaaatatattgaagttttaaaataa

SEQ ID NO: 420471 - DNA, 255 bp, Staphylococcus aureus; identical to SEQ ID NO: 409441

SEQ ID NO: 420472 - DNA, 441 bp, Staphylococcus aureus
atgaaattacatgatttaaaaccggcagaaggttcacgtaaagaacgcaatcgtgttggacgtggtgttgcgacaggtaacggtaaaacaagtggtcgcggacacaaaggtcaaaaagctcgttcaggcggtggtgtaagaccaggattcgaaggtggtcaattaccattattccgtcgtttaccaaaacgtggttttactaacataaatcgtaaagaatatgctattgttaacttagaccaacttaataaatttgaagatggtactgaagtaaatccagctttattagtagaatctggtgttgttaagaatgaaaaatctggtatcaaaatactaggtaatggttcacttgataagaaattgacagtgaaagctcataaattctcagcttcagcagcagaagctattgatgctaaaggtggagcacacgaggtgatctaa

SEQ ID NO: 420473 - DNA, 738 bp, Staphylococcus aureus
atgaaatctttaatattagctgaaaaaccatcagtcgcaagagatattgctgatgctttacaaataaatcaaaagcgtaatggttactttgaaaataaccaatatattgtcacgtgggcgttagggcatctagtaacaaatgcgacacctgaacaatacgataaaaatttaaaggaatggcgattagaagaccttccaattatacctaaatatatgaaaactgttgttattggtaaaacaagcaaacaatttaaaacagtaaaagcgttaattttagataataaagtgaaagatattattattgcaacagatgctggacgagaaggtgaactagttgcaagattgattttggataaagttggtaacaaaaagccactccgtcgattatggattagctcagttactaaaaaagctattcaacaaggttttaaaaatttaaaagacggtcgccaatataacgatttgtattatgcagcgttagcgagaagtgaggcggattggattgttgggattaatgcaacgcgtgcactaacaacaaagtatgatgcacagctatccctgggacgtgttcagacaccaacgattcagttagtaaatacacgacaacaagagattaatcagttcaaaccacaacaatactatacattatcattaacggtaaaagggtttgattttcagctagaatcaaatcagcgatataccaataaagaaactttagaacagatagttaataattaa

SEQ ID NO: 420474 - DNA, 336 bp, Staphylococcus aureus
atgaaacttaaaaatatcagaaactacacacaccaagaacttcaagatgttttaactcaagtgaaagcagaattacaattaggagaaatcaatgatgaagcggttatcatattagcaaactaccaagaacaagaagaagatggtcaacaatattacgaaatctatcattcagaaattagaattgatgaagatacaactttagaagatgcacaagaacaacaaatcgaaacagaaaaacttgtccgtgaatataaaacgaagcgtggattgttacaagcctttatcaacgaagaagaaattaaaggtgcttattataaaattcatacgcaactataa

SEQ ID NO: 420475 - DNA, 144 bp, Staphylococcus aureus
atggaaaagaatgcatttaaaaaagcaatttctaaattaaaaccaaaagaacaagcttgttgttctgtagaaattgaggaaaaaaaagagaaaatagaagaaaataaagaaaaaaatcagcataaaaatgatggatgctgttaa

SEQ ID NO: 420476 - DNA, 885 bp, Staphylococcus aureus
atgttagaatcaattatagaattcataaaaacatttttaatgctattttttgaattattaatactgttcataatcgtaagttttattgtaagtctaatccaacaagtaatttcggaagataaaatcaaaagcatgttaagtaagcctaaccaaggaatcaattatttttttgggatgatatttggtgcgattactcccttttgttcttgttcaactattccaatacttgcaggtctattaaattctaaagtaccttttggtccagcgatgagtttcttaattgcttcaccattaatgaatccattaatggtgtttatgctatgggttttattgggctggaaagttgcaatagtttattttattgtactagcaatatttagtatctttacaggtcttgtgttttcaaaaatgaatttggctgaaagttataaaggcgtaaatgttaaaggagatggattttttgccaataaaacgggatctcgttttaaacaagcattaaatgatgcgtgggcatttttatatccaatgcttccttacctatttattggtgtatttattggagcattcatatatggatttgtacccgaaacatttattacaaaatacgcaagtggagatggcgttatatccgtattcattggatctgttataggcattccaatgtatatcagacctgaaacaatgttacctatagctgaggcattagtatcaaaagggatgtctttaggaacagtagttgcgttgataataggtggtgccggtgcaagtattccagaagtagtattattatctaaattattcaagaaaaaatttgtagtctcattcgtaatcgcaattttagttgtagctattgctacaggattaatagttaatacgattgtttaa

SEQ ID NO: 420477 - DNA, 321 bp, Staphylococcus aureus
atggaaataatcaaggtcaatccagatgcagatgaagaagaacaattaaacttttatgaaaagatgtttgaagcacttgctgataaaattagacttaaaattttacattcaatacgtcagagtgatacaaaatctttgtgtgtctgtgatttggaagaattattagaattaaagcaatctaaactttcttatcatctaaaaaaattagtagatgcgaatattcttattgttgaaaagtatggtacatggaactattataaaattaatgagcgacaaatacaggtagttttaaataaagatacttgctgtaagatactatga

SEQ ID NO: 420478 - DNA, 192 bp, Staphylococcus aureus
gtggtaaatcatgcaggtaatttatctgtagattattttattggttatttaaagttagttatgacttcaaaagacatatatttaaatgaagctgtagcatatatgaaaagttctttcttcaaagataatattgaagcatacggtgaaataacagcacataactttaaacaagcaattcaagaacttaaataa

SEQ ID NO: 420479 - DNA, 414 bp, Staphylococcus aureus
atgttactcaattctaacattccagatgaatataaatatgaaacggactatagaaaaatcccaagagaatatttgaatcccaaaatccctcaaggtcgtggaaacatcaaatggagagcttttgccactttgcctgaacaatacgaaatattaaatgaagtgatgcaaggtcaaaacaaaattgcaaatcccttattatctgatgatgctttgaaccaattagattatatagttaatcaaaaacttcaatccaatgaaccttgtacaattgaatattggagtaacggttatataaaaacttatactggattcattttgaaattcaatgtattagaaaaatccttttcatttttcaatacttccaataataaatactatactttatatagagaatatattaacaacatattttaa

SEQ ID NO: 420480 - DNA, 366 bp, Staphylococcus aureus
atggggaattatgatagaaaaaaacaaatgaaagaaatacataaaagaaaaaaagctaatacagaaataaaagtaaattctgcaatagaaaggctcttaaaagaaaatatagagattaactttaatgttgtttctaaatatgcaaatgtttcaaaagctactttgtataatcataaagaaatccgaaataaaattgaagaattgcgtaaacacaacactcaatcaaatgtaattcaagccaaaaatgatgggaaaaatgcaattattgaatccttgaaaagaaaaattaaaaaattagaaaaagagaataaagcattaaagaatgaagttaacgttttatataataaaatgtatgaaaacctgtaa

SEQ ID NO: 420481 - DNA, 2073 bp, Staphylococcus aureus
atgaataatagcgttcaaaatacaaatgaattttttcaaagtaaatttaaaaaggaactttgctttttaaaaagtaaaagtataaattctgaggggaatatcacttacacggatatttatagtgactatttttataaaaatgatgtatggcatgtttctaattttaagattttcaatcaatttcatgatgatttaaaaagatatagtggtaaaaggaaaaatgtgttttttaatttcaaaaataagaacttaaatctagaatttaaatatatttgtcttaaatttattgttactgagtattggtctttaaactctttattcaatagtggtgcagtacatattaataaaattgcttctttttgtaatgaaatattccctgatttaaattccttgcttgactacgaatttagtagtttagaaaaagaatggattaaatggttggaaaatcgaaatgcaccaacttggaaaaggtcgaaaagtgttgtttttggaaattacaaagtaaaagcgcctttagctgcaagcttaaaaaagttttataggcagttttcaaaaatggttgacgacagagaagagtgggataaagacatatgggatataagaaatttagaaatgtatggtttggcttataataaaacacttactggtaactatttaaatttcaaaagtataggctcatttaatataagaaattccgtgaaacgatatttgaaacaacgattaataacaggaaatctaaattttgcgacaggtagagtgtacgtcagggttttaagtagattttttaacagtgtacataatcaagaacctaattggaatgacttgaataatttagaaagaaaccatatggaagtgtatatagattctatttttaaatatgcaaaaagtaaaaacgtacgaagtgtaaaaaactttgtgcgggaagaactcaaattagttagaaggtttttgaatgatataattatggaaaaatatagcatagcaccaatagaagatataagatttctatttttgccacaagacctgcctaaacatgaaaaaatcgaaaaaaatcaaattgattatattcctgattttgtattagatcaattatttgaaaatataaattccttacctgaagaaatcatacctattatttggatagcatttaaaacgggtttacgtatatcagatgtattaactttaaaagataactgtcttactaaaattaatggtaaatattctttagttactgatattgcaaaaacttttgtaaaaggacatagaatacctatagatgaacaattagctaatatattagcagttttaattgcaaattctaaaagacaaagtactaaggacaataatcctaataattatatatttgttatatacaaaggtaagagaaaaggaatgccatatacgcaacacttaattcgttctcatctaaatcatttagctaaaactaaaaatattgttgatgaaaagggagagatttttcactttaaaacacatcagtttaggcatacatatgctgttaagttgcttaatggtggagttgatattctaacaattcaagaactgttagctcatgcctctcctgaaatgacccttagatatgcaaaacttcttgatgatactaaaagaaaagcatttgaatcagttattgatcaaggggcatttacctttgatattgatggtaaagtaaaaaatattaaacatagcagtgaactttctgaggatgcattgaactctttatggcaagagcataaattaaatgctatggacaatccatatggtacgtgccatgcaaggttaaaaggtaactgcccatatatggaagcaccaccatgtttaacttgtaattcaggtaaaccatgcaaagatttagcaataggattttcaaatttagatgtagaaaagtatgaattgcttgttaaatctaccattaattctatagaggtagctaaaaattttaatagagatgatatggtagaaaagcatgtcaatttattagaaaaatatgaagacatattaaaaaatataaaagatggaaatattatttttggtagaaataataggatgaaaacatag

SEQ ID NO: 420482 - DNA, 1104 bp, Staphylococcus aureus
atgaaaatagtaaatgtgaattctaacagtggaaagaactttatgataattgacagtaatttaaatccagttgaagatgttacctattatttaaagtatttagagagtgttgataaaagtgagaatactttaaagacatatgcttattgtttaaaaagatattttatgtaccttgagttaatagacaaaaatcataatgatgcaacttttgatgacttagtagattttgtaatgtggttaaagacacctaagagatataaaaaagttatatataaagatagactactaaatagtaaaagtgccagaactataaacttaactattactgtagttactaatttttacgattacttatttagaactaaaaaaattaatgaagatattgctaaatcagttttaaaagaaagtaatcgtaaatcttcatataaaagctttttagatcatgtaaatactaataatttgttatttacaaacacattgaaagtcaaagagccaagagaaaaaatgaaaatattgagtaccagtgaaataaaagagttaataaatgcatcaaaaaacctaagagataaatttatggttcaattattatatgaaacgggattgcgtattggggaattgttgtcactttacatagatgatatcaaatatgatttgactaacggacatcaaattattttgaaaactagaagaaataaaaatggagctagattaaaaagtggagaacgtaaaatatatatttcacaatctttgattgatttatatgatgattatctgtatgaagtattggatgaagtttcaactagttctgaatttttgtttattaaaattagaggtaagcatgttggagatcccttagattataatgacgtaaattcgatatttaaacgtttaagaaagaaaactggaataaatgttcatcctcatctgttaaggcatactcatgctactattttttacaataaaagtaaaaatataaaacaagttcaagaacggcttggtcacagtaatatacaaacaactatggatttgtatatacacaatgacgatcagcttatacgtgagaattgggagaaagtgaaagattcgttccaaatatttgaatag

SEQ ID NO: 420483 - DNA, 144 bp, Staphylococcus aureus; identical to SEQ ID NO: 420475

SEQ ID NO: 420484 - DNA, 885 bp, Staphylococcus aureus; identical to SEQ ID NO: 420476

SEQ ID NO: 420485 - DNA, 321 bp, Staphylococcus aureus; identical to SEQ ID NO: 420477

SEQ ID NO: 420486 - DNA, 192 bp, Staphylococcus aureus; identical to SEQ ID NO: 420478

SEQ ID NO: 420487 - DNA, 414 bp, Staphylococcus aureus; identical to SEQ ID NO: 420479

SEQ ID NO: 420488 - DNA, 366 bp, Staphylococcus aureus; identical to SEQ ID NO: 420480

SEQ ID NO: 420489 - DNA, 2073 bp, Staphylococcus aureus; identical to SEQ ID NO: 420481

SEQ ID NO: 420490 - DNA, 1104 bp, Staphylococcus aureus; identical to SEQ ID NO: 420482

SEQ ID NO: 420491 - DNA, 339 bp, Staphylococcus aureus; identical to SEQ ID NO: 410839

SEQ ID NO: 420492 - DNA, 225 bp, Staphylococcus aureus; identical to SEQ ID NO: 408376

SEQ ID NO: 420493 - DNA, 261 bp, Staphylococcus aureus
atgaaaagaatacttatcattgttgttttattgttttgttattcacaaaatcatatcgcaaccgctgatgttggagttttgaatcttaggaactattatggtagctatccaatcgaagaccatcaaaatattaatcctgacaataatcgtctttcacatcaattagttttttctaaggataattcgacagtaacagctgaatttaagaatgttgaagatgtaaaaaattcaaaaatcgtgctgttgatgtatacggcctaa

SEQ ID NO: 420494 - DNA, 381 bp, Staphylococcus aureus; identical to SEQ ID NO: 408523

SEQ ID NO: 420495 - DNA, 558 bp, Staphylococcus aureus
atggcaataattagacaacgatatcaggagcaacttgatgatttaataaaagaattacgtcggttaggtgcaaatgtctatgtgagtattgaaaatggtataaaatcattaagtattgacgatagaggctttgcacgacaaacagttaaaaacgataaacatatcaatcaattaaattataatattaatgagcgagttatcatgttaattacaaagcaacagcccattgcgagtgatttgcgtacgaagattacagatgattatgtgttaacccgtttaaagacaatgggtaaattagctatgttaatgttaaaggacttagatcaagcatttaaaaagaaagataccgtattaataagagaaataattgagcgtgatgaagatatcgatgacttatatagtcatattattaacgcaacgtatcttattgataacgatccatttgtcgctgcacaagctcatttagcagcaagacatttagaacgtattggtgatcatattattaacatcgctgaaagtgtttatttttatttaacaggtacacattacgaacaataa

SEQ ID NO: 420496 - DNA, 423 bp, Staphylococcus aureus
gtggctaaaaaagtagataaagttgttaaattacaaattcctgcaggtaaagcgaatccagcaccaccagttggtccagcattaggtcaagcaggtgtgaacatcatgggattctgtaaagagttcaatgcacgtactcaagatcaagcaggtttaattattccggtagaaatcagtgtttatgaagatcgttcatttacatttattacaaaaactccaccggctccagtattacttaaaaaaacagctggtattgaaaaaggttcaggcgaaccaaacaaaactaaagttggtacagtaactaaagatcaagtacgcgaaattgctaacagcaaaatgcaagacttaaacgctgctgacgaagaagcagctatgcgtattatcgaaggtactgcacgtagtatgggtatcgttgtagaataa

SEQ ID NO: 420497 - DNA, 513 bp, Staphylococcus aureus
gtgtttcatcatatcagcgttatgttaaacgaaaccattgattatttaaatgtaaaagaaaatggtgtgtacattgactgtacgctaggtggagcgggacatgccctttatttactaaatcaattaaatgacgacggaagattaatagcaatcgatcaagaccaaactgcaattgataatgctaaagaggtattgaaggatcatttgcataaggtgacttttgttcatagcaacttccgtgaattaactcaaatattaaaagacttaaacattgaaaaagtagatggaatttattacgacttgggtgtttcaagcccacaactcgacattccagaacgaggattcagttatcaccatgacgcaacattagacatgcgtatggaccaaacacaagaactaacagcatatgaaattgttaacaattggtcatatgctgttagtgaagattttttatcgttatggcgaggagaaattttcaaaacagatagctcgaagaatcgaagcacatcgtga

SEQ ID NO: 420498 - DNA, 1458 bp, Staphylococcus aureus
atggaaaataaaaataataggtattcaattcgtaaattttcagttggtgtaggatctattttaatagctagttttataatgatttttcaaaatgaagctcatgcttctgaaaaagcaatagaaacacctaaagaagaaaaagcaatagaaacacctaaagaagaaaaagcaatagaaacacctaaagaggaaaaagcaatagaaacacctaaagaggaaaaagcaatagaaacacctaaagaagaaaaagcaatagaaacacctaaagaagaaaaagcaatagaaacacctaaagaggaaaaagcaatagaaacacctaaagaggaaaaagcaatagaaacacctaaagaagaaaaagcaatagaaacacctaaaaattctaatgatttgaagtttttaaaggatgcaaaattttcttcagattcagaaaatttagatatacgtcttagacctgaatataatgttgggaatgcattagtcgtaagagtagataaagaaataaatcctgaaaaatttgtggattatccagaaggatacacagtacaaagttatgtgtcaaaaggatcagattatccaagtgttgaaaagatagttaaaaataaaataacaggtatgtataaaataacgtatactcttatggataaagctggaaatcctgttaatggttctgatgggcaggttgtcattcgtagccttaatatatatttttatgatcctacaccagtattagaaagtattgataaagtaaataagaaaataaaagatgggaactacagtaatggagatgaagttaagaaagagctagataaaataagagttgacattgaaagacctaaagaaataccaaatatcaaagaatttttaagtaaggttgatatggaagaaaaaaaattaaaagtaacagatacaactgcaccagaggcaccaagtgtaaatgacacagaagtaggaagtaaaaaagtgtcaggaaaaggacacgaagtaggaaatactgtaactgttacattcccagatggaaaaacagcaacaagtaaagtagatgaaaaaggcaactggacagtagatgttccagagggaacagagttaaaagtaggtaatgaaattacagcgactgaaacagatatgtcaggtaacaaatcagagtcagggaaaggaaaagtaacagatacaactgcaccagaggcaccaagtgtaaatgacacagaagtaggaagtaaaaaagtgtcaggaaaaggacacgaagtaggaaatactgtaactgttacattcccagatggaaaaacagcaacaagtaaagtagatgaaaaaggcaacaattataaaaatgaaaagcttctaccaaatacaggtatgaaacaagaaggaaaaaatacagctttttcatcaatcataataatattgatggcatcaatgttatttattaataaacgtagaaaaaaagaaaataaagaaatatag

SEQ ID NO: 420499 - DNA, 888 bp, Staphylococcus aureus
atgacctttcttaaaagtattactcaggaaatagcaatagtcatagttatttttgctttatttggcttaatgttttacctgtatcatttgccattagaagcatatttactagcacttggcgttattttattattattactcatattcataggtattaaatatttaagttttgtaaaaactataagccaacaacaacaaattgaaaatttagaaaatgcgttgtatcagcttaaaaatgaacaaattgaatataaaaatgatgtagagagctactttttaacatgggtacatcaaatgaaaacacccattactgcagcacaactgttacttgaaagagatgagcctaatgttgtgaatcgtgttcgtcaagaggttattcaaattgataactatacaagtttagcacttagttatttaaagttattaaatgaaacttctgatatttctgtcactaaaatttcgattaacaatatcattcgcccaattattatgaaatattcaatacagtttattgatcaaaaaacaaaaatccattatgaaccttgtcatcacgaagtattaactgacgttagatggacctctttaatgatagaacaattaataaataatgcacttaagtatgcgagaggtaaagatatatggattgaatttgatgagcaattcaatcaattatacgtaaaagataatggtatcggtattagtgaagcggacttgcctaaaatatttgataagggctattcaggttataatggccagcggcaaagtaactcaagtgggattggtttatttatcgtaaaacaaatttcaactcacacaaaccatcctgtttcagtcgtatctaaacaaaatgagggtacaacatttacgattcaatttccagatgaataa

SEQ ID NO: 420500 - DNA, 330 bp, Staphylococcus aureus
gtgagacttgtatcgtatagtcctgttccagaagaccatgcctatattcgattccctgtttcagatggtacacaagagctgaaaattgtctcttcaactcaaattgatgatggagctgaaacaaattatgattatactaaattagtatttgctaaacctatttataacgatccttcacttgtaaaatcagatacaaatgatgcagtagcaacgaatgatcaatcaagttcagacgcaagtaatcaaacaaacacgaatacatctaatcaaaatacatcaacgaccaacaatactaatgatcaaccgcaggcaacgaacaatatgagttaa

SEQ ID NO: 420501 - DNA, 324 bp, Staphylococcus aureus
atgattgatattcataaccatatattgccgaatatcgatgacggtccgacaaatgaaacagagatgctggatcttttaagacaagcgacaacacaaggtgttacagaagtcattgtaacatcacatcacttacatcctcgatataccacacctatagaaaaagtgaaatcatgtttaaaccatattgaaagcttagaggaagtacaagcactaaatctaaagttttattatggtcaggaaataagaattaccgatcaaatccttaatgatattgatcgaaaagttattaccggtattaatgattcacgctatttactaatataa

SEQ ID NO: 420502 - DNA, 366 bp, Staphylococcus aureus
  misc_feature (310)..(319): n is a, c, g, or t
atgacaggagagacagttgtatataaaaatgaaatgaatttagttccattaaggcgatttacagctactgaaattaatttattttttgcgatgtgtaataaattaaaagagcaagatactaatacattacgtttgtcttttgatgaattaaaaaaattaagtaattatagtccagaaacacgtaatattaatagatttgctaatgatttagataatgtgtataaaaagatgttgaatttaaccattagatatgaagatgatgatgtaatagaaagattcgttttattcaatcattatagaatccataagnnnnnnnnnncgttttattcaatcattatagaatccataagcgagaacaatatctag

SEQ ID NO: 420503 - DNA, 300 bp, Staphylococcus aureus
atgtatgggctacaaacatatgtagaatcaaataatagtgatgtgtttgagtacctagaaaatggatttgatacagatacacttgagggcattcaatcaagtaatactgatgtgatagcgaatattgaaatgttgtatcagttagctacgggaatcaatgaaccagcacgagagttagttgagggattaaaattagtaactgagtttgtacaagatgagaatgcgacacaagaggattacaaggcgttagaacgtaaattgaatgatctaaaagcgtcttactatagcttgagtaaataa

SEQ ID NO: 420504 - DNA, 846 bp, Staphylococcus aureus
atgaatactaaatatttatatttaaatttcgataaaatttatgaagaaaaagattttttcaacgttttacatgtagacattaaccttaaaatatcagaaataaaggaaagtaatgaagtattatatagtattgattcaattacttgtaagaaattgaatcattatgatccaaaattagaatcatacagagacagtatatatttattgaatgaacgtctaaataattataattttaatggtaaaaaagaatggaaattattttacttgtataaagaattaatccaaacttttgaaatattatatgatgatacttcaaccacgaattattatagaggtcaagcaaatgattggccaatgaaagcaggattattaagaaatgatataatagatgatttaaaaaaagagtttgagaatatatacgaagatatggcttataagtacccagatttaatagagtatacgtgcttaaataaaaaagaatataaagcagaagattttaaaaaaagagaaaacaatatggcttatttacaacattatgggctaagaactacattaattgatattactgaaaacccctttatagcgctcctatttttaacttctaactcacaagtgtttaacaatgcaaccttagacatgtataatatcaatcctaaaatacacagcgaacaaaatttgttttcaagagtaaaaatgattagtaaaaacaaaagaataatagctcaaaagggtgcgttttttaacttcgaaaagctattgatttttcagaatgaacaaaatgtaaatagagataaaattaataaaatacctctagttcgtttaaagttaaaaaacgcacccttttga

SEQ ID NO: 420505 - DNA, 267 bp, Staphylococcus aureus
atgacaacagaaggtctattagttgcagagaaagaaatcgaagtgaatggttacgacattgatgcgatgggtgtcgttagtaatatcgtttatattagatggttcgaagatttgagaacagcgtttattaatcagcacatgaattactcaacaatgatcaatcaaggcatttcacctatacttatgaaaacggaagcagagtataaagtacctgtcacaatacatgacaaaccagtaggtcgtatttacttagttaaagcaagatga

SEQ ID NO: 420506 - DNA, 186 bp, Staphylococcus aureus
atgacaggtaaaacacatgcttcatgcggcatgctcgttggagcgctaacaacacaatattttcaaacggatattttttcgtcggttacggttatcattctagcaactctagctagcttattacccgatatatgtcacactcaaagtaagattggcagaaggtttaaggtaattagttttttgtga

SEQ ID NO: 420507 - DNA, 180 bp, Staphylococcus aureus
atgttaagttatggtggattgcttaaacaaaagcataaaattttaaacttagacgatgccgaagatggtaatttaattaatacaagtgatgaagataaaacgacagacgaagaagcaaaagcacattcaattacggcaatttggaattttgaaaagcaaaattattatttaagacattag

SEQ ID NO: 420508 - DNA, 150 bp, Staphylococcus aureus; identical to SEQ ID NO: 409943

SEQ ID NO: 420509 - DNA, 180 bp, Staphylococcus aureus; identical to SEQ ID NO: 412388

SEQ ID NO: 420510 - DNA, 180 bp, Staphylococcus aureus; identical to SEQ ID NO: 409937

SEQ ID NO: 420511 - DNA, 426 bp, Staphylococcus aureus
atgttaaacagaacagtattagtaggacgcttaacaaaagatccagaatatagaacaacgccaaatggtgtgagtgttaccactttcactatcgcagttaacagaacatttactaacgctcaaggagaacgtgaggcagactttattaactgtgtaacttttagaaaacaagcagaaaatgtaaataattatttatccaaagggtcattggctggcgttgatggacgtttacaatcacgcagttatgaaaacaaagacgggcaacgtgtgtttgttacagaagtagcagcggacagtgttcaattcttagaaccgaagaatagcaaccaacaaccaaacaacaattatcatcaacaaagacaaactcaaactggtaataatccttttgataacaacgcagactctatagaggatcttcctttttag

SEQ ID NO: 420512 - DNA, 174 bp, Staphylococcus aureus; identical to SEQ ID NO: 407440

SEQ ID NO: 420513 - DNA, 135 bp, Staphylococcus aureus; identical to SEQ ID NO: 407441

SEQ ID NO: 420514 - DNA, 192 bp, Staphylococcus aureus; identical to SEQ ID NO: 410719

SEQ ID NO: 420515 - DNA, 501 bp, Staphylococcus aureus
atgaatctgagtcgttgtctgatcctgtgtcactcgttgaatcagaatcggaatcactcgctgagtctgagtcactgtctgagtcggaatcacttgatgaatcggagtcactacctgagtcggaatcactcgctgaatccgaatcgctgtctgagtctgagtcattatctgagtctgaatcgctgtctgaatctgaatcgctatccgaatctgaatcgctgtcggaatctgagtcgctgtctgagtctgaatcgctatctgagtctgagtcactgttggaatctgaatcgctgtctgagtcggaatcgctatctgaatcggagtcactcgctgaatcggaatcactcgctgaatctgaatcgcttgctaaatctgaatcgctgtctgagtcggaatcgctatcggaatctgagtcgctatctgagtctgaatcacttgctgaatctgaatcgctatctgagtctgagtcgctgtctgagtctgaatcgctatctgatctga

SEQ ID NO: 420516 - DNA, 435 bp, Staphylococcus aureus
atgtattcaaaacaagcaatagtagcagaacccgctggcgctttaagtgtaagtgcgcttgaaaactataaagatcatattaaaggtaaaacagtggtttgtgtcattagtggtggtaataatgatattaatcgaatgaaagaaattgaagaacgttcattactatacgaagaaatgaagcattactttatcttaaatttccctcaacgtccaggtgcattgagagaatttgtaaatgacgtattaggacctcaagacgacattactaaatttgaatacttaaaaaaatcttctcaaaatacaggtactgtcattattggtattcaacttaaagatcataatgatttaatacaactcaaacaacgtgtaaatcatttcgatccttccaatatttatattaatgaaaataagatgttatattcattgttaatttaa

SEQ ID NO: 420517 - DNA, 297 bp, Staphylococcus aureus
atgaattatcaatataaacatatttataaaaacttttgtaaagatgtgcattcaactgacagtataattaatgatactataagattttttggtaaaaatattgctattagaaatggagaaatagaagaactactaaatgaagaacctttaacgagtgaaatagaaatttcttcttttacaaactatatagttagtgagttcttgaaatgtagtagtttatttttaaatgataaaaaattgtgggaagattactcggcggaatttgaaaaatattataatcaaaaatggtattcatag

SEQ ID NO: 420518 - DNA, 264 bp, Staphylococcus aureus
atggcaatgattaagatgagtccagaggaaatcagagcaaaatcgcaatcttacgggcaaggttcagaccaaatccgtcaaattttatctgatttaacacgtgcacaaggtgaaattgcagcgaactgggaaggtcaagctttcagccgtttcgaagagcaattccaacaacttagtcctaaagtagaaaaatttgcacaattattagaagaaattaaacaacaattgaatagcactgctgatgccgttcaagagcaagactaa

SEQ ID NO: 420519 - DNA, 492 bp, Staphylococcus aureus
atgactttcgaagaaaaattaagtgaaatgtacaatgaaattgcgaataaaattagtagcatgataccagtagaatgggaaaaggtatatacaatggcttatatagatgatggaggaggtgaagtattctttaattatactaaaataaacagcgatgaattgaattattacaccgatatacctaaggagtataacatttctgtgcaagtatttgatgatttatggatgaatctttattacttgtttaagaatttaaggaatttatttaaaacagaagaacatgaaccatggacatcatgcgaatttgactttacaagagacggaaaattgaatgtatcttttgattatatagattggatcaatacagagtttgatcaattgggccgtgaaaattattatatgtataaaaaatttggggttataccagaaatggaatacgaaatggaagaaattaaagaaatcgagcaatatattaaaagccaagaaagttaa

SEQ ID NO: 420520 - DNA, 198 bp, Staphylococcus aureus
ttgaaacattttgatattcctactttagttatatgcactaaagaagacaaaattccaaaaggcaaagttcaaaagcatattaaaaatattaagacacaattagatatggacccagacgatacaattgtaagttattcatcaattcaaaataataaacaacaacaaatatggaatttaattgaaccgtatatttcatag

SEQ ID NO: 420521 - DNA, 453 bp, Staphylococcus aureus
atgggttataactacgaacgtgttttaaatttcttagaacgttatttagttattatgattgtattagctgtagctacttattttgtgtttattgcgttagcaaatggagactattggaacgttaccagcttttcatattcattaacaccatataatagtattatgtttattgttatcttgggtatttgcacgcattttaaaacaatgttatttaatacgattcaaatgattagtgctttctcattctttatttatttattacatccaatcattctagactcattgtttgcatatacaaatatatttgaggataatacaatggtctttctagcgatatcactactattcattttaggattatgtataggtgtcggtatgatattgcgtgaattctatatctttaggtttattattggaaaacaaccatataaattgaacattaatgcttattaa

SEQ ID NO: 420522 - DNA, 480 bp, Staphylococcus aureus
atgaaaatcaccattttagctgtagggaaactaaaagagaaatattggaagcaagccatagcagaatatgaaaaacgtttaggcccatacaccaagatagacatcatagaagttccagacgaaaaagcaccagaaaatatgagcgacaaagaaattgagcaagtaaaagaaaaagaaggccaacgaatactagccaaaatcaaaccacaatcaacagtcattacattagaaatacaaggaaagatgctatcttccgaaggattggcccaagaattgaaccaacacatgacccaagggcaaagcgactttgtattcgtcattggcggatcaaacggcctgcacaaggacgtcttacaacgcagtaactacgcactatcattcagcaaaatgacattcccacatcaaatgatgcgggttgtgttaattgaacaagtgtacagagcatttaagattatgcgtggagaggcgtatcacaaataa

SEQ ID NO: 420523 - DNA, 360 bp, Staphylococcus aureus; identical to SEQ ID NO: 412184

SEQ ID NO: 420524 - DNA, 144 bp, Staphylococcus aureus
atggcgtatatcacaactactagatggctagataatgatgaacaagatttagatataattatccaaaaacttttggatgtaagtgaattgaacgagaatataaacacagatttaaaaacatatcattataattttaaaacatag

SEQ ID NO: 420525 - DNA, 348 bp, Staphylococcus aureus; identical to SEQ ID NO: 406294

SEQ ID NO: 420526 - DNA, 429 bp, Staphylococcus aureus
gtgagtagtaaattggataaaaaagtaagtattcatacaaagcaagtgttgaaacagcacaacgaaaaagaaaaatttgaatttactactgaaggaacttggcaacaaaggcaatctaactttattcggtatgtagaacaaattgaggatgcaacagttaatgttacaataaaagtggatgatgatagcgttaagttgattcgtaaaggcgacattaatatgaatttgcattttgttgaaggacaaacgacaacaactttttacgatatatcggctggacgaattccactagaagttaaaacattacgcattttacatttcgtaagtggagacggtggcaagttaaagattcattatgaattatatcaagataatgaaaaaatgggttcttatcaatatgaaattaactataaggagataggcgaatga

SEQ ID NO: 420527 - DNA, 450 bp, Staphylococcus aureus; identical to SEQ ID NO: 408383

SEQ ID NO: 420528 - DNA, 495 bp, Staphylococcus aureus
atgatttcacacttgataacggatacttcgaagaagaaacatcagacagtgactcagacagtgattcagattcagatagcgattcagactcagatagcgattcagactcagacagtgaatcagactcagacagcgactcagattcagacagcgactcagactcagacagcgattcagactcagatagcgactcagattcagaaagcgactcagactcagacagcgattcagactcagatagcgactcagattcagacagcgactcagattcagaaagcgactcagactcagacagcgactcagattcagacagcgactcagactcagatagtgattcagattcagacagcgactcagattcagacagcgattcagaatcggatagcgactcagacagcgactcagactcagacagcgactcagactcagatagcgactcagattcagacagtgactcagatagcgactcagattcaggaaaacatacacctgtga

SEQ ID NO: 420529 - DNA, 129 bp, Staphylococcus aureus
atgttagacctaaaaaccataaaaaccctagaagaaaacctaggcaataccattcaggacataggcatgggcaaagacttcttcatgacaagaacaccaaaagcaattgcaacaaaaggccaaaattga

SEQ ID NO: 420530 - DNA, 168 bp, Staphylococcus aureus; identical to SEQ ID NO: 412185

SEQ ID NO: 420531 - DNA, 201 bp, Staphylococcus aureus
atgcaatcaacaagttatgatgcttggaatgctactcagaaagaaatagttaatccaattactgagtatgcagaatggactcctgctgagaaaacagcagcagcagtaaatgcaaaagcaataaatatgttgttttgtgcattagaccaaaatgaatataaccgtgttagtatctgcactactgcatatcaaatgcagtag

SEQ ID NO: 420532 - DNA, 159 bp, Staphylococcus aureus
atggaatcattatcgaatggaatcgaatggaatcatcgaatggaatcgaatggaatcatcatcgaatggaatcaaatggaatcatcaaatggactcgaatggaatcatcaccaaatggaatcgaatggaatcattgaatggaatggaatggaatcataa

SEQ ID NO: 420533 - DNA, 501 bp, Staphylococcus aureus
atgattttcgaagaaaaactaaatgaaatgtacaacgagattgcgaataaaattagtagcatgataccagtagaatgggaaaaggtatatacaatggcttatatagatgatggaggaggtgaagtattctttaattatactaaaccaaacagcgatgaattgaattattacaccgatatacctaaggagtataacatttctgtgcaagtatttgatgatttatggatggatttatatgatttgtttgaggagttaagagatttatttaaagaagaagatttagaaccatggacatcatgtgaatttgattttacaagtgaaggtaaattaaaagtttcacttgattatattgattggataaatacagagtttgatcaattaggccgtgaaaattattatatgtacaaaaaatttggggttataccagaaatggaatatgaaatggaagaaattaaagaaatcgagcaatatattaaagagcaagatgaagctgaactatag

SEQ ID NO: 420534 - DNA, 699 bp, Staphylococcus aureus
atgaatttcgattggataaaaacgcgttcagacttcgatgatgacaagcctgccgttattgatcacgcaaaacaaacatcttggacataccaacaactcaatgcacgtgctgataatatggcacattatttaacatctcaaggtgttaaaaaaggcgatgttatcggtatttttgcgccaaatgatattgcaatattagatttattatttgcttgttttaaaacaggtgcggtttttttaccattgaattggcggcttaacccaaaagaaattgcagccattgtggaagatgcacaattaaaactgctcttctatgctgaaaaacatttaagttcactcaccgatattgaccaaaacttattgcatatggatattgatgtagcgcaatatgatgaaatcgtaaatccagattatcaccaaccttttcaagcaacacctgttgaaccacaagatcttgcagcattaatttatacaagtggtacaaccggatcacctaaaggtgtgatgttctcatatgaatcatttgttcataacggcgcaaacttagagctgacgtataagttcaattcaaactatattacgattgtatcaacaccaatgttccatgttttagggtttaacgatactgtattaccagtattaatgtcaggtggcacacttattcttcaacgttactttaacggcgaaagaattgaatga

SEQ ID NO: 420535 - DNA, 819 bp, Staphylococcus aureus
atgaataactttaataatgaaatcaaattgatattacaacaatatttagaaaagtttgaagcgcattacgagcgtgtattacaagacaatcaatatatcgaagcattagaaacattgatggatgactatagtgaatttattttaaatcctatttatgaacaacaatttaatgcttggcgtgacgttgaagaaaaagcacaattaataaaatcactgcaatatattacagcgcagtgtgttaaacaagtggaagtcattagagcgagacgtctattagacggacaggcgtctaccacaggttactttgacaatatagaacattgtattgatgaagagtttggacaatgtagtatagctagcaatgacaaattattgttagttggttcaggtgcatatccaatgacgttaattcaagtagcaaaagaaacaggtgcttcagttatcggtattgatattgatccacaagccgttgacctagggcgcagaatcgttaacgtcttagcaccaaatgaagatataacaattacggatcaaaaggtatctgaacttaaagatatcaaagatgtgacgcatatcatattcagctcgacaattcctttaaagtacagcattttagaagaattatatgatttaacaaatgaaaatgtcgtagttgcaatgcgctttggtgatggcatcaaagcaatatttaattatccgtcacaagaaacagcggaagataagtggcaatgtgtgaataaacatatgagaccacagcaaatttttgatatagcactttataaaaaagcagctataaaggtaggtattacggatgtctaa

SEQ ID NO: 420536 - DNA, 750 bp, Staphylococcus aureus; identical to SEQ ID NO: 418290

SEQ ID NO: 420537 - DNA, 1578 bp, Staphylococcus aureus; identical to SEQ ID NO: 417068

SEQ ID NO: 420538 - DNA, 258 bp, Staphylococcus aureus; identical to SEQ ID NO: 410863

SEQ ID NO: 420539 - DNA, 267 bp, Staphylococcus aureus; identical to SEQ ID NO: 418294

SEQ ID NO: 420540 - DNA, 444 bp, Staphylococcus aureus; identical to SEQ ID NO: 418313

SEQ ID NO: 420541 - DNA, 492 bp, Staphylococcus aureus
atgactttcgaagaaaaattaggtgaaatgtataatgaaattgcgaatgagatcagtgggatgataccggtagaatgggaaaaggtatatacaatggcttatataaatgaaagaaatggagaagttttctacaattatactgagccaagcagtgatgaattattttactatacgagcgtgttaaataaatataatataccaagatcagaatttatggactcagtatatgaattatataagcaatttgacaaattaagagagttgtttatagaagaaggactcgaaccatggacatcatgtgaatttgactttacaagcgacggtaaattaaacgtatcatttgattatatagattggataaatacagagtttgatcaattaggtcgtgaaaattattatatgtacaaaaaatttggggttataccagaaatggaatatgaaatggaggaggttaaacaaatcgagcaatatattaaagagcaagaagaatag

SEQ ID NO: 420542 - DNA, 372 bp, Staphylococcus aureus
gtgagagaagaaggaaaagccttttatcgtttaacgcttgttattaatagtgagacattaatttcacctcaagatttattacaagttgaagaaatgattacagattatgaagaaaacgaaaatcaatttgtatatattgatgagttaaaaatacaatatgcacaaaatgatgagtcacctttagttaatgaattttcagcggaattattagtcgatcaaactgtttttgataaagcgatgtcagacttatatttaaatccaagggcatctaagttcctagacgattatggaacattcgaccatacagcattagttaatcgtgctgaagaaatattaaaagctgaaatgagaggtgaacaaaatgataattaa

SEQ ID NO: 420543 - DNA, 357 bp, Staphylococcus aureus
atgacgcaagtatttgataatgtcattaccaatgcgatgaaatattctagaggcgataaacgtgtcgagttccacgtgaaacaaaatccactttataatagaatgacgattcgtattaaagataatggtatcggtattcctatcaataaagtcgataaaatattcgaccgattctatcgtgtagataaggcacgtacgcgtaaaatgggtggtactggattaggactagccatttcgaaagagattgtggaagcgcacaatggtcgtatttgggcaaacagtgtagaaggtcaaggcacatctatctttatcacacttccatgtgaagtcattgaagacggtgattgggatgaataa

SEQ ID NO: 420544 - DNA, 864 bp, Staphylococcus aureus; identical to SEQ ID NO: 411464

SEQ ID NO: 420545 - DNA, 180 bp, Staphylococcus aureus
atgtgtttaggtatgaatcctgaccaagtaccagatggtgtacattgtgcttctacaagtaatcgaaactttgaaggacgacaaggtaaaggtgcaagaacacatttagtatcccctgctatggcagcagctgcagctatacacggtaaatttgtggatgtgagaaaggtggttgtttaa

SEQ ID NO: 420546 - DNA, 183 bp, Staphylococcus aureus
atgtatgctttagtatattgttttaaattagatgaatttgaatttaatttaaaaagtaagtataaaaatacaatccagttatatcaaggtgttcaagagctttgtatgcaatatatatgtgagttccaaataataaaaaaaccattatacataaagttaacaacaatcttaactttttattaa

SEQ ID NO: 420547 - DNA, 702 bp, Staphylococcus aureus
atggctagaaaagttgttgtggttgatgatgaaaaaccgattgctgatattttagaatttaacttaaaaaaagaaggatacgatgtgtactgtgcatacgatggtaatgatgcagtcgacttaatttatgaagaagaaccagacatcgtattattagatatcatgttacctggtcgtgatggtatggaagtatgtcgtgaagtgcgcaaaaaatacgaaatgccaattataatgcttactgctaaagattcagaaattgataaagtgcttggtttagaactaggtgcagatgactatgtaacgaaaccgtttagtacgcgtgaattaatcgcacgtgtgaaagcgaacttacgtcgtcattactcacaaccagcacaagacactggaaatgtaacgaatgaaatcacaattaaagatattgtgatttatccagacgcatattctattaaaaaacgtggcgaagatattgaattaacacatcgtgaatttgaattgttccattatttatcaaaacatatgggacaggtaatgacacgtgaacatttattacaaacagtatggggctatgattactttggcgatgtacgtacggtcgatgtaacgattcgtcgtttacgtgaaaagattgaagatgatccgtcacatcctgaatatattgtgacgcgtagaggcgttggatatttcctccaacaacatgagtag

SEQ ID NO: 420548 - DNA, 327 bp, Staphylococcus aureus
gtgatattattgttaggttctagttatggaacaattgatagtgaagaaaatattagctatacagaaatggagtacaattttgctaaatctttaggtaaacctatatatgtttttgagatgaataaagcatctaccgaatccgcggaaaagtctaaaaaattagatgagtttaagacaaaagttaaagaaaatagactaattagtccaaatattaatgatatttcggaattaaaaagtaaagtcacttccatgatctgtgtagaatttttcgggtataccacacactggccaattggtatcatttttattccatattgcttggtgtag

SEQ ID NO: 420549 - DNA, 771 bp, Staphylococcus aureus
atgaaaataaatttagtagagctgtatcatcaaaaaatagcacttaatgcaattataaatgaatttccaaagattgatttaggtgaattagattatcatggggttagcaagatgttcgaaaatccaacaataaaagggcgataccaaagtaatagtaatattgatataaaaatggaaacggggactggtaaaacatatgttggtactcgaatgatgtacgagttacatcaaaagtttggtttatataaatttattgttatagtaccatctccagctattaaagagggctggaagaattttttaacagcaagatattcgcgacaacattttgctgagtattatgaaaatgtgaaattggatgttaatacaatatatgctggtgattttaacacaaagtctggtaggcgtatatttccacctcaattgaataatttcattgaagggactagactaaatactaatcagatagaagtactattaataaacgttgatatgttgaaatccaaaaatatgacacgggacgattataatcaaactttacttaataattactcaagaccttttgatgcactaaaagcaactaaaccaattattattatcgatgaaccacacagatttccgagagataaaaagaactatcaagttatagaaaaacttaaaccgcaagtcattattagatttggagctacatttccagaaatgaaaaaaggaactggaaaaaagcgattaatattaaagattactatcgtggcaagcctcaatttgaattaa

SEQ ID NO: 420550 - DNA, 162 bp, Staphylococcus aureus
ttgtggcgtgatagtatagggaacttagctaaagttaatttgtggcgtgatagtatagggaacttagctaaagttaatttgtggcgtgatagtatagggaacttagctaaagttaatttgtggcgtgatagtatagggaacttagctaaagttaatttgtag

SEQ ID NO: 420551 - DNA, 489 bp, Staphylococcus aureus
atgacgaaatataaagatattgctagcgacatcagagataaaataatcgcaggggattggttttatggaatgaagatacctccacagaggcagttggcgatacaatacaacgtaaatagagtgacgattattaaaagtattgagttattagaggctgaaggatttatctatactaaagtggggagtggaacatatgttaatgactatttgaacgaagcacatattacaaataaatggtctgagatgatgttatggtcctctcgacaaagaagtcagtatacggtgcaattaattaataaaattgagacagatgactcgtatatacatataagtaaaggtgaattgggtcaaccattaatgccacatattcaattgaaaaaagccatgtctaatacagccagtcatatcgaagacttatcttttggttataataatggctatggttatatcaagttaagagatatcatcgttgaacgaatgtcaaagtaa

SEQ ID NO: 420552 - DNA, 501 bp, Staphylococcus aureus
atggctttcgaagaaaagctaagtcaaatgtataacgagattgcgaatgagattagtgggatgataccagtagaatgggagcaagtatttacaatagcttatgtaactgatcaagctggggaagtcatttttaattatactaaaccaggtagtgatgaattgaattattacacatatatccctagagagtataatgtctctgaaaaagtattttatgatttgtggacggatttatatagattgtttaagaagttaagaaacgcatttaaagaagaagatttagaaccatggacatcatgtgaatttgactttacaagcgaaggtaaattaaaagtttcatttgattatattgattggataaatacagagtttgatcaattaggccgtgaaaattattatatgtataaaaaatttggggttataccagaaatggaatacgaaatggaagaagttaaagaaatcgagcaatatattaaagagcaagatgaagctgaactatag

SEQ ID NO: 420553 - DNA, 1488 bp, Staphylococcus aureus
gtgaaaacaattcaattacacaagacaactttgatattaattgcgatattattgttttatacttttatgggtatcttactaccactcatgcacgatgatttacaatggtttagcaattataatactgatattttaaaagtaggatttgcatcacttaatggtcgctatatcggaaatatctttgaaattatagctgtacatgtaagctggttacgttggctttcatatggcctcattagtatgggcatcatttggatgattatgcacattacacgttgtaaagcgtggacaagctattatttgttagcattttctttaatgttaattttaccaagtgctatttatgcagatacatatggctggtttgcaggattttataattatgcgacatcaacactaatttcactctttattatttattattgtattaatgcaattatatataaagaaaagcagccggtaagtgttactgtactattctatgttttatgcttcttcggtcaattatttatggagaatgtgacattattccactgtatcattttaattttagcttttctgtatgaatttactgcaaatcgaacacttaattataaattattgttttcatttatgattgctactataggtacaatcattatgttttccaatccaaattatcgcaaaattttatttgaaggatcagaatatcaacaagtttcaaataatcaaggtatcttttcaaaatttgcagaaatgatatcaacgtcacttccatatggtgtcattttcagtcagattataattttaagtatgattgcagcgcttattatttatctactgcttagaagtgatcggtatgtacatttaacaatattaaagcgtcgtatcattatgataggatttatcactttaccgctttattatttactattttacaatcagtttttattaaataaaaatacagatattggattggttggttttgtgaacgtaattgtatgtggttactttgcgttttcgatatttgtaggtatttatttgtctattaatgatcgtaaaacacaaattactttatattccttacttattgcaatatgtgtttcggcgtcgacactagtcattgttactccaattgaaccaggtaattttttgattgtttatacgatacatgtaatcattttaattattttattaaaagaatttcggaaatataagtcaatcaatgttaattttattaaaggtgcatcactagttttagctgttatatatcttagtgcatttatttatgttcattatgaacatgaaaaaagagttcagttattaaaacaacaaattaaagatcatccacgacaagaggtttatacagtggaatcattgccgtttgaacattatatgcatcatccgtcaccaatcaataaaaattaccaagagtggtttaataattatgaagaattaccgaaaatgaccaaagttaaatatattccatttggttcagacgattcataa

SEQ ID NO: 420554 - DNA, 171 bp, Staphylococcus aureus
atgaacaaagtccacaaacctttatatttttatttaatgcttttcttctctacaactatcataggtgcacttttattgtatttacctttcactggtaaaaagccaatatcttttttagatgccctatttatagcttcaagtgcatttacagttactgatgtgtattactaa

SEQ ID NO: 420555 - DNA, 141 bp, Staphylococcus aureus; identical to SEQ ID NO: 411802

SEQ ID NO: 420556 - DNA, 477 bp, Staphylococcus aureus
atgcaaaatcaatattttacagtgcaagaaaattacaaagaaagattttatcaaatccctaaagtattctttaccagtgaaaattataaaaatctaactaatgatatgaaaatagcctatgctatcttacgtaatcgcttaaatttatctattaaaaatagctgggttgatgaagatggtaacatttactttgtttattcaaatgaaaagctaatggaaatcttaaattgtaaaaaagaaaagttaacaaaaataaaaaaagggttagaaaacgatggtctactcattcaaaaacgacgtggtttaaataaaccaaatattctatatttaatgaaacctattgtcacagaacgtgatatttacaaaatagaaaaagaagaaaacgatgttgaaccttacggcgagaaggaagttcgaaaatcgaacgtccagaagttcgaaaatcgaacatccagaagttcgaaaatcgaacactaa

SEQ ID NO: 420557 - DNA, 201 bp, Staphylococcus aureus; identical to SEQ ID NO: 411612

SEQ ID NO: 420558 - DNA, 327 bp, Staphylococcus aureus
ttgacttcaataacaggtgttactaccttaccttgttccactggtttagaaggttttttaggttcttctttagcaggtggtactggtttaccaggttcagctggtacctctggtgttggtggtactggtgtgcctggctcacttggtacttctggtgtcggtggtgttggtgtttccggctcacttggtacctctggcgttggtggtgttggcgtttccggctcactcggtacttctggtgtcggtggtgttggtgtttccggctcacttggtacctctggcgttggtggtgttggcggcgttgtatcttcttcaatcgtttgttga

SEQ ID NO: 420559 - DNA, 246 bp, Staphylococcus aureus
atgacaggtgttactaccttaccttgttccactggtttagaaggctttttaggttcttctttggcaggtggtgttggtgtttccggctcacttggtacctctggagttggcggcgttggtgtttccggctcacttggtacctctggagttggcggcgttggtgtttccggctcgcttggtacttctggtgtcggtggcgttggtggcacgattggaggtgttgtatcttcttcaatcgtttgttga

SEQ ID NO: 420560 - DNA, 171 bp, Staphylococcus aureus
atgttgagttatggtggattgcttaaacaaaagcataaaattttaaatttagatgacgctgaagatggtaatttgattaacacaagtgatgaagataaaacgacagacgaagaaaaaaagcacattcaattacggcaatttggaatttcgaaaagcaaaattattatttaa

SEQ ID NO: 420561 - DNA, 183 bp, Staphylococcus aureus; identical to SEQ ID NO: 420546

SEQ ID NO: 420562 - DNA, 210 bp, Staphylococcus aureus
atgagaacaaataatcatataaccgatttagatgctattgaattaagcagtgcttggaattacaattcgaaattgataactggcaaaaatgtaaatgtcaataaccatgtttatcgtgttatagataaagttgagcctaccaacaccggactaggctataaattatatgaacgttatgataatgataaaagtagaatgctgcattattaa

SEQ ID NO: 420563 - DNA, 711 bp, Staphylococcus aureus
atgagaaaagtagctggttttgtactgtgtacatcacttattttaggaggctgttcttttatgcataaagatcacacaaaaggtattccaaaggcggttagcgtcaaagattatgatggtaaatatattggtgaacataaaaaaagaaacgaagtatttctgaaaaaacataaagatgaagcaatcaaaaaatataaagactatgtgaaagatacatttggttatgattgtaaaattaatttagttgaggcctatactaataaatctggatttagcgaaaaaagtaaggtagatggtatctcagtggttggtactgtcaattatgacgttccttttcaactccaattgctttttgttgaatctggaaatggcataataatttcaacatttacacctggtcatataaatgaaacatcagcggccgtttcagccatgatgtacaaacggtatgaacatgaaattgaacaagctcgattaaagcttaaatgtgaaattgaaaaagatagctattatgcgatgagcgaaaaacttcaagtaaaacaagaatttaacggcgttacaaggcaatacttgaatttcagaacagatagtatcgatgatctggataagttcaaaaaagaattcaaacctgttatgcacctaaaaggtgatgcattcaatcaacagttacaatctttgattaacaaatatccacaaatacaaaaaatatga

SEQ ID NO: 420564 - DNA, 945 bp, Staphylococcus aureus
atgagaaaactgataggcttcacattatgcacatcaatcatagtaagcggttgctctttcataccaaagtaccatacaaaaggtattccaaagacggttagcgtcaaagattatgatggtcaatatattggtgagcataaaaaaagaaatgaagtatttctgaaaaaacataaagatgaagcaatcagaaaatacaaagactacgtgaaagacacctttggttatgattgtaaagttaatttagttgaggcctatactaataaatctgggtttagtgagaaaagtaaaacagatggcttagtagtcgttggtacggtcaattatgatgttccttttcagtttagactgatatttgttgaatctgacaatggcataactatcacaacatttacacctggccataaaaacgaaacgtcagccgcagttgcagccatgatgtataaacgttatgaacctgaaatcgaacgagctcggttaaaatttaaatcagaagttgagaaaaacggttattacaccatgaatgaaaaacttcaaaagaagcaagaattcaatggcgttactaaacaatatttaaattttaataccgttagtatagatgacctagataagtttaaaaaggaattcaagcctgtcatgcacttaaaaggagatgcattcaatcaacaattacaaaatttaattaataaatatccacaaatacaaaaaaatatgaagtccgagtttattgcctattacgataaagatgcaaataaagaaactgtagctgattatgcttggagtctaaaaaaacccactaacgaaattatgaaaacatacccaggtgaaaaacgtatgagattttacaaagataaagtatcaccttatgaacttgatcaatatgggcgcttaaatcctgatgcagatgaaatatatgttatcgggggcaattataatgagaataaataa

SEQ ID NO: 420565 - DNA, 159 bp, Staphylococcus aureus
atgaaagcacataaaaacttctggttaaacttagtagcgaacattaatacttatgctgtaattatagaaacatccaaatcatctattaaaattccacattataaaaacacctcacataactcgttcaactgtaccaaaccacaacacgttagattttag

SEQ ID NO: 420566 - DNA, 267 bp, Staphylococcus aureus
atgacgaaacgtaaccctaaattagcggcattattatctgttatacctggtttgggacagttttataataaaagacccattaaaggtacgatattttttatctttttcatcagttttatttctgtattttatagctttttaaatattggtttttggggattgttcacattagggacagtacctaagttagacgattctcgtgtcaaggcattatttctatcttactcgttgcttttgcaatcatgctatatatcattaatattttag

SEQ ID NO: 420567 - DNA, 306 bp, Staphylococcus aureus
gtgttatattggcgggccccaacacagaagctggcgaaaatacagcttacaataatgtgcgagttggcaggcccccaacacagagaaattggaacagcaatttctacagacaatgcaagttggcgggcccccaacatagaagctggcgaaaagtcagcttacaaaaatgtgcaagttggaaggcctccaacacagagaacttcgaaaagaaattctacaggcaatgcaagttggcggggccccaacatagagaaattggaacaccaatttcaacaggcaatgaaagttggggaaggacagaaataa

SEQ ID NO: 420568 - DNA, 261 bp, Staphylococcus aureus
ttgtttaatcttagtttgctgcaatttaaaattgctgatatttctaggaagaatcattcgaaattggaagatcaaagtgaaaacgaactcataagtgcctcaataacaaattgtataaaaaatattgatgataacatcgatagactcatcgataaaattaccgagatgcaaaatgaagttaattcattagatagtacattatctgtactagaaaatgcaaaaaattcaatagttgctgctattgaaaaattaactaattaa

SEQ ID NO: 420569 - DNA, 1713 bp, Staphylococcus aureus
gtgaaacattatttgactaaaattatagcaatgctaattactgctgctatggtgtgtaactttgggttattgaaaagtcaggcagcagaacaacaaagtattagtgatgtatatagtgtgataacggattcgaaatctgcactttctaataattcgatatcgaatgacaataagcagaaagcaattgagcaagtggtaagtgcagttaagaaattatcgcttgaagataatagcgaaggtaatgctgtcaaatcaaatgtgagaaagcttgaagatgcaaaagcgaatgataatcaaaaagatacactttcgcaattaacgaagtcattaattgcttatgaagagaaattggctagtaaagatgcgggttctaaaattaaactattacaacagcaagtcgatgccaaagatgctgcgatgacaaaagcgattaaagacaaaaataaagcggaattagaatctttgaacaatagtttgaatcagatttggactagtaatgaaacagtgattcgcaattatgacgtaaatcaatatggacaaattgaagtcgcattattacaacttagaattgcaattcataagtcaccattagatacggcaaaagtgtcacatgcttggacaacttttaaatcaaatattgatcatgtcgataaaaaaagtggtacgtctgcaaatgatcaataccatgtatcacaattaaatgatgagttagagaaggcgattaaagctatcgacaacaatcaattgtcggatgctgatgctgcgcttacacattttatagaaatttggccgtatgttgaagggcaaattcaaactaaagacggtgctttgtatacgaaaattgaagataaaataccatattatcaaagtgtattagacgaacataataaagcacatgtgaaagatggcttagtagaattaaataaccaaattaaagaggttgttggccatagttatagcttcgtcgatgtgatgattatctttttacgtgaaggactagaagtgttattaattgtaatgacattgactactatgacgcgtaatgtcaaagataagaagggtactgcaagtgtaattggtggtgcaattgccggacttgtattgagtatcgttttagcaattacattcgtagaaacactagggaatagcggtatgcttcgtgagagtatggaagcgggattaggtatcgttgcggtcatattaatgtttatcgttggtgtttggatgcataaacgttcgaatgcgaaacgctggaatgatatgattaaaaatatgtatgccaatgcgattagtaatggtaatttggtattgttagcgacgattggtttaatatctgtgttgcgtgaaggtgttgaggttatcattttctatatgggaatgataggcgaattagcgaccaaagattttgtcataggtatcgccttggccatcgtgatattaattgtctttgcgctattatttagatttatcgtcagattgatacctatattttatatatttagagtattgtcgatctttatttttattatgggattcaaaatgcttggcgtaagtattcaaaaattacaattattaggtgtgatgccaagacatgttattgaaggattcccaacgattaactggttgggcttctatccaagttatgaaccattaatagcacaagctgcctatattatggtagttgctatcttaatctttaaatttaaaaaataa

SEQ ID NO: 420570 - DNA, 435 bp, Staphylococcus aureus
atgatattttcgcaaaatttatttcgtcgtcacaccccaacttccattgtctgtagaaattgggaatccaatttctctatgttggggccccgccaacttgcacattattgtatgctgcctttccgccagctactatgttggggcctcgccccccaacttgcattgtttgtagaatttcttttcgaaatcctctatgttggggccccgcaattattgtatgctggctttccatcagcttctgtattgggcccaaccccaactcgcactgcctgtagaatttcttttcgaaatcctctatgttggggccccgcaattattgtaaaaaggttgttacaatcgtattttcattcaatcaactactgcttatataatattgtaaagctttggacattgattgaagtcacagaatcatataggctttcacttaatacataa

SEQ ID NO: 420571 - DNA, 798 bp, Staphylococcus aureus
atgcaagcattacaaacatttaattttaaagagctaccagtaagaacagtggaaattgaaaacgaaccttattttgtaggaaaagatattgctgagattttaggatatgcaaggacagacaatgccatcagaaatcatgttgatagcgaggacaagctgacgcaccaatttagtgcatcaggtcaaaacagaaatatgatcattatcaacgaatcaggattatacagtttaatctttgatgcttctaaacaaagcaaaaacgaaaaaatcagagaaaccgctcgaaaattcaaacgctgggtaacatcagatgtcctaccagccattcgcaaacatggtatctacgcaacggacaatgtaattgaacaaacattaaaagatccagactacatcattacagtgttgactgagtataagaaagaaaaagagcaaaacttacttttacaacagcaagtagaagttaacaaaccaaaagtattattcgctgactcagtagctggtagtgacaattcaatactcgttggagagctagcgaaaatacttaaacaaaacggtgttgatataggacaaaacagattattcaagtggttaagaaataacggataccttattaaaaagagtggagaaagttataacttaccaactcaaaagagtatggacctaaaaatcttggatatcaaaaaacgaataattaataatccagatggttcaagtaaagtatcacgtacaccaaaagtaacaggcaaaggacaacaatactttgttaacaagtttttaggagaaaaacaaacaacttaa

SEQ ID NO: 420572 - DNA, 186 bp, Staphylococcus aureus
atggaatcatatgaagaaattgagcatatacacattaacactggtagaaaaaaacttacacaagaggaaattgaagaagctaacgcgtttatcgaaagtcaagaatttaaaaatatggttaaacaagctaaagaatcgcgtcaaagagttatgaattctaaaataacaaataggacaaaaatgtaa

SEQ ID NO: 420573 - DNA, 1407 bp, Staphylococcus aureus
atgccatgggataaaccatacggcgaggaagtcgtcgaacagttaaaaccgcaattcgaaacacaagaagaaatgattgtcagattaattgatgatcatagaaaacaattagataaaattacagttggacaaaggtattacgacaaagacaacgacatcgttaagcaaatgaaaaaagtagatgtgcacggcaatatcgattatgacaaaccggattggcgcattactaccaactttcatcaaaacctcgtcgaccaaaaagtcagttatgttgctagtaaaccagtaacatattcgtgcgaggacgagagtgtgttaaaagtaattcatgatgtgctagatactcgttgggataataagttgatagatatcttgactgctacaagtaataagggtatcgactggctacaagtttacattaatgaaaacggagagatgaaattattccgtgttccagctgaacaagctataccgatttgggttgataaagaaagagaagaattgaagtctttcattcgttactacaagtttaacaacgaggagaaagtggagttttggactgatactactgttacttattatgtattagagaacggtggattaataccagattattattatggtgctaatcatattcaatcacatttcagtaatggtaattggggtagagtgccgtttatagcatttaagaacaacccagaagaagtgtcagacatatggatgtacaaatcaataatcgatgcaatcgacaaaagattatctgacgcacaaaacatgttcgatgaatcagttgaactcatctatatcttaaaaggttatgagggcgaagacttagaagaattcatgcgtggacttaagtactataaagctatcaatgttgatggagatggtggcgtagagacgatacaagttgaagtgccggtctcgagtactaaagaatacatcgacctaatgagagcttatattatggaatttggacaaggtgttgacttccaaactgataaattcggctcagctccaagtggtatcgcactaaaattcttatacggcaacttagatttgaaagcgaacaaacttaagaataaagcaactgtagcgatacaagagttaattggttttatcatagactttaataacttaaagatggacgttaaagacatcgagatatcgtttaactttaacagaatgatgaatgatgctgagcaatcacaaatcatcgcgcaatctcaatatttatctagagaaacacttgtgaagagttctccgcttgttgatgattataaagcagaactcgaacgaatagaacaagaacaaatggagtacaacaagcaactgcctaatttagatgacggaggtgctgacggtgcccaacaacaagaaagatctaacgataaagaatcagaatga

SEQ ID NO: 420574 - DNA, 489 bp, Staphylococcus aureus
atgaacgaactgaataaacgtcaaagaacatttgtcgaggcttatgcgatacctggaacagagtgctacggtaacgctactaaatcagctattaaggctggatataaagagagtagagcagaagtgacagggtgcgagttagtaagaaatagtaagatacaggaatatattaaaggggtcgagcaaaaactttttgacgagcaaataatgagtggtaaagaagttttgtatcgactgacaagaactgctagaggcgaaacggtcgaaattgaaccggtagtgacaaagcaaggtacttacaagatcaatcccacaacaggcaaacataacctagtctatgatgaagatatagaattgattgagaaaccaccgaagataagcgaccagaacaaagcccttgaattgttaggtaagcatcacaagttattcactgatgtacaagatatgaatgtcaacggagttgttacgtttaatgacgatatcaattaa

SEQ ID NO: 420575 - DNA, 411 bp, Staphylococcus aureus
atgaaaatcaaagtaaaaaaagaaatgagactagatgaattaattaagtgggcatgggataaccctgaattagtaagaggagagaaattttatccgcaaggcaatagatatgaaacatgtgtgtatttccatctttacgacggaagaagatgcctcatgagagattttataaaagccgatgacactttcgaagttgaatatgaagaggaaatcacagaagagactaagtttgataggttgcttgaggtatatgagattcaagaaggagtctataaatccgcattacacaaaggtatcagtttgaacgaacgttttgaagacgacaacatttttcctaccaaagcattctacatcttaaatgacgacctgaccatgacgttaatctggaaagatggggagttggtcaaatga

SEQ ID NO: 420576 - DNA, 243 bp, Staphylococcus aureus
atgacagataacgcacgcaaagaatacttaaaccaatttttcggttctaagagatatctatttcaggataacgaacgagtggcacatatccatgtagtaaatggcacttattactttcacgggcatatcgtaccaggttggcaaggcgttaaaaagacatttgatacagctgaagagcttgaaacatatataaagcaacatggtttggaatacgaggaacagaagcaactaactttattttag

SEQ ID NO: 420577 - DNA, 438 bp, Staphylococcus aureus
atgaaattctacagacaatggaagttggggttggacgacgaaataaattttgagaaaatatcatttctgtcccactcccatattcccgatagaaaaacaggacttgaacttgcagaaaaatatggcattgatggcgtcatgattggtagaggcattttccacaatccattcgcttttgaaaaagaaccacgtgaacacacaagcaaagaactattagatctgttgagattacatttatcattgtttaacaaatatgaaaaagatgaaatacgacaattcaagagcttgcgtagattctttaaaatctatgtgcgtggcataagaggcgctagcgaacttcgacatcaattgatgaacacacaatcaattgcagaagcacgagcattactagatgaatttgaagcccaaatggacgaagaccttaaaatagaattatag

SEQ ID NO: 420578 - DNA, 264 bp, Staphylococcus aureus
atgacgggagtatccggagtaaaagagacaactagaacaagtaacagctatagggctataggcctcactatccatagtgataagtttattaatataggttacatattcacaaatgcagctggtggccctatcgactcgaacaaaattagcaacattattaaagggggcactatcaaagagacaactgagattagttctattaagaaacctgtaacgacgcatacattatacatcattcgcatatatctgcacttgctcaattag

SEQ ID NO: 420579 - DNA, 648 bp, Staphylococcus aureus
atgattttgttaaaaagaatgagagacgatataaaaatggtatttgagcaggatccagcggcacgttcaacattagaagtcattacaacgtatgcaggtttacatgcagtttggagtcatttgattgcacataagttatacaaccaaaaaaaatatgttgcagcacgcgcgatatctcaaatttcaagatttttcacaggtatagaaatccatccaggtgctaaaattggaaagcgtctatttatagatcatggtatgggcgttgtaataggagaaacatgtacaattggtgataatgtgacaatctatcaaggcgtgacacttggtgggacagggaaagaaagagggaaaagacacccagatataggagacaatgttttaatagcagcgggtgcgaaagttttaggaaatattaaaataaattcaaatgtaaatattggtgcaaattcagttgttttacaatcagttccaagttattcaacggttgttggtataccaggacatattgttaagcaagatggtgttcgagttggaaaaacatttgatcatcgccatctacctgatccaatttatgaacaaattaagcatttagaacgacaacttgaaaagactaggaatggagagattcaagatgattacattatataa

SEQ ID NO: 420580 - DNA, 2004 bp, Staphylococcus aureus
atgttaatttctgaacttcatataagtaattttagatcgtttggaaatgagtcacaaatgatcgaaattgcagatttaacagcgctcattggtgctaatagttctggtaaaacaagtttaatcatggctttattaagattgtttggacaaaaaaatacagatagaactttaataaaaacagactttcatattccagagagcgctgatatatctaaaattaatgaaatagatcttatgatagaagcgaaggtaatatttccagaattaaaattagagtcacctgctaatataaaaactgttccagaattcattaaacatttaattattgaagaaacagatgctgatccttatttacgaattagattaaaggggaagtggatacaaggttcaactcctgaaggtaatatagaacaagaattagtttatgtaaaaattccctatggtcgtgaagaaaaagaagaagatttaactagagtaccaattcatcatcaaaaattaattcaaatgatgtatatacctgcaatgagagatccagcaaagcaattaaaaaatgcttctggtactttattatggcgtatatttgatggtattgactggccagaaaatttaaatgactatataaaatctttaacgtctcctattgaaacgttatttaaagagattcctagcataaaagatattcagggaattttaaataatcaatggaataaatatcataaagataaaagatattctaatagtcaatttaaatttaatggtaatagtttgcaggaatttttgaaaaatgcggaaattttatttaatcctactattgatggaaattccgtaaaagtggatagtttaggtgatggtttaaaatctttattttatataactttagtatcaactctacttgaaatagaaaataaacaagaaaaagatgataaacctttgttaaacatcctagctattgaggaacctgaaaaccatatttcacagcatttgttaggaagaatagttagaaacttaaaagaaatatccaagaaagataatgctcaagttattttatcatcacacaattcatctataattggaaaagtagatccagagtatattagacatttacaaatacagaactcagaatcaattgtaaataatattaccctccctgaaaaaaatgatgatgctcatacctatatcaaagaagctgtaaaagcatatccagatttatatttttcgaaattagtgattttaggtgaaggagatagtgaagaaatagtattacccaaactactgagcgcagacaatatatatttagatgatttcaatatttcagtagttcctttaggaggaagatatgtaaatcatatgtggaagcttttaaatgatttatcaataccacacgttactttattagatttagatagagaacgaggtggaggcgattggggaagaattaagtatgtgttaaaacaacttgatgagaataatagatgttcagaacaacttcgtacagttctattaattccaagtaacacatatcatacttatagtatggaagagatagaagactttcataatagaaaaagtaatagattaaattcacttaatacttggatagaaaaattagaaaaagaagatgttttcttttcatatcctctcgatcttgatttcactatgttaatgagttttcaagaagaatatcagaacactatggaaagagggcctcaaattccaaaagattcaaattcgacagaatatgatgaaaaattaaaaaaatctatacaagcaactttaaaaaatgagaaagctattgcaaagacatattcggaagatgaaaaaaagctgatgatttggtataactccttatttttaggtagagggaaaccaagtacgcatatagcggctctaaaagatattgatgagaatgaaataatagaaaatgctcctaaagaactcttgcgacttatacaacgtgtaaaagaaaaagttgggttagtaggaggaagtaacatagatgaataa

SEQ ID NO: 420581 - DNA, 1926 bp, Staphylococcus aureus
atgaataataggatattagagcatgaatggaagccttcagacgatgtaacactagaagattcagccttacatgctataagagcttcaagtcatgtagcgattgccgctggaccaggtgctggtaaaacagaattgttagcacataaagctggataccttatcgaaactggaatgtgtccatatcccaaaaaaatattagctattagctttaaaacggatgctgctagaaatctgcaagaacgtgttgaattgagatacggtaaaggtgtagaaaaaaggtttgaatcgaaaacctttgatgcctttgctaagggaatattggatcaatttatacacgcattacctaaagagtatcagccccaaaaaaattatgagattattttaaacgaaaaatcactaaacgatattataaatgcttatattacagagccttactcttattattctaattggcaatatgaatatcatattaatagtgtgttgagaaccatgaaagaaacaaagttaccaatagttagttttgaagatgatttatactcttggataaacgaaagactgtggatggctttattgaatggtaagggaaatttaaaaagttcactaactttttcaatgatatcaattttagttgagtatttattaaaagaaaatccattactagttaaggcattacaagcgacatatagtcatgtttttttggatgaatttcaagatacaacacacattcaatacaaccttctgaaaacaatttttttgaaatcaaatactgttattactgctgttggagataataaacagcgtattatgggctgggctggagctttacagaatgcatttggaatatttaaaactgattttaatgcaactcagtatacacttttgaataatttcagatctgctcctaatttagtttatatacaaaatatcttttctaaaactcttaatgatgcctccatagaagttctcccagctggagagtggaacaaaaatgaaggggtttgtgaaatatggaattttaaaaatcataatatcgaagcaatcctattagcgtcttatataagtaaatggatgaaagtagaaaatctaaagcctagagatttttgtatcatcgttaaacaacacgaacatatctatgcagctgaaataatgaaggaactttccaaaattaatataaaaagtagaatagaaaaagattatcaagacctattatctgaggaattagttttgcttattattaggtttttaaaattaagttatgaagaaaaatcccctgaattatggctaaatgtcattgatgaaatcatagatatgaagtacagtgatgctgattctgaaagtataaactatttaatcatagaaaaagaattggtaaaaatgttagatgaggttagaaaactctattcaaatattaatgatacaaacttcaatacacaattcgcagaaatattacaagaaattgtagtttttttaggagaagatatcataaaagctacttatccgaaatataaccaagctaattatttcaatgaagtaatgcaaaaaatgatagataaactacaatatcaaaattgtatttcaatgagggggctagtacaagagttttgtggagaatatagtatacctattatgacaattcataaaagcaagggactagaatatcatactgtgttttttattggagttgaagatgatgcgttttggagtttttctactcaaaaagaggcagataaaaatgcattttttgtagcgttatctagagcgaaacaaaaaataatatttactataagtgaaaaaagaaacattttaaagtttggtgaggagaaaaatatattgcaagagactaaaaatatttctgagctgatacaaacattaatggatgcaggtgttcctttaattgaaaagagtggtttggataatatattatag

SEQ ID NO: 420582 - DNA, 267 bp, Staphylococcus aureus
gtgcctgataaccaattgccaccattagttcaaagtggctttaacccatcatttatcactacactatcacatgaaaaaggttcaagtgatacgagtgaatttgaaatttcatatggcagaaacttagatattacatatgcgactttattccctagaactggtatttacgcagaaagaaagcataatgcatttgtaaatagaaactttgtagttagatatgaagttaactggaaaacacacgaaattaaagtgaaaggacataattaa

SEQ ID NO: 420583 - DNA, 132 bp, Staphylococcus aureus
atggaaagtacattagaattaacaaaaattaaagaagtattacaaaaaaacttgaagattttaattattttaccgctattgttacatttttcgtcttatcacctaaatatcaagctaatactcaaatcttag

SEQ ID NO: 420584 - DNA, 402 bp, Staphylococcus aureus
atgagtaacgcaaataatgctgataataaacagtttttcagtaagattttaaattctattggtgctggtgttgttattgcacttgttccgaatgctctattaggtgaagtattaaaaatatttaaaagtggtaatgaaattttagaattaacgtatcagttagtgatactaattcaatcatttatggcatttattattggggttttagctgctcatcaatttaaatttaatggcgcaggtgctgctatagtaggtacatcagctatgattggttcaggtgctgttgtatatagtaataatagttttatgttaaaaggtataggtgacattataaatacgagtttggttgttattattgcatgtcttatatatggtattacaaaacaaacttggatcttttga

SEQ ID NO: 420585 - DNA, 216 bp, Staphylococcus aureus
ttgcaatttgtagttaaaaataatatttcattaaaagatatccaaaaagcttatggcaaggacttgaaaaaagaaaatggtaaaacaaaggaagctgatagcggtattttttactatcaaaatgctaaaaagacattaggcatctggtttgtcgttgatcataatagagttgtcgaagtaacagttggacatacaccatacaaaacaagtaaataa

SEQ ID NO: 420586 - DNA, 435 bp, Staphylococcus aureus; identical to SEQ ID NO: 407896

SEQ ID NO: 420587 - DNA, 213 bp, Staphylococcus aureus; identical to SEQ ID NO: 407844

SEQ ID NO: 420588 - DNA, 147 bp, Staphylococcus aureus; identical to SEQ ID NO: 407426

SEQ ID NO: 420589 - DNA, 1377 bp, Staphylococcus aureus; identical to SEQ ID NO: 413350

SEQ ID NO: 420590 - DNA, 951 bp, Staphylococcus aureus; identical to SEQ ID NO: 415466

SEQ ID NO: 420591 - DNA, 459 bp, Staphylococcus aureus; identical to SEQ ID NO: 415506

SEQ ID NO: 420592 - DNA, 384 bp, Staphylococcus aureus
gtggtaaaagaattaattgatccaaacggtagactatctactgttggtggtgtgactaagaaaaataacaaatcttctgaaactaatacacatttatttgttaataaagtgtatggcggaaatttagatgcatcaattgactcatttttaattaataaagaagaagtttcactgaaagaacttgatttcaaaattagaaaacaattagttgaaaaatatggtttatataaaggtacgactaaatacggtaagatcactatcaatttgaaagacgagaaaaaggaagtaattgatttaggtgataaactgcaattcgagcgcatgggtgatgtgttgaatagtaaggatattcaaaatatagcagtgactattaatcaaatttaa

SEQ ID NO: 420593 - DNA, 501 bp, Staphylococcus aureus; identical to SEQ ID NO: 410354

SEQ ID NO: 420594 - DNA, 207 bp, Staphylococcus aureus; identical to SEQ ID NO: 408205

SEQ ID NO: 420595 - DNA, 282 bp, Staphylococcus aureus
atgtatttgagtaattttgcaacagtaggtttgtttttaactttaagaaaatacactactgatcctgcaatactcttaccattatatatactttctttttcatcagtttcattattagcgacatatttggtaagaatatctctaaagaaatttaaaaaatcatacttatctttaaataaaacttatatgattataatttcattcgtattatttgcaacatttgcatttttttatatttattctacaaatacaagttcaaacggtgatagcttaattccatag

SEQ ID NO: 420596 - DNA, 600 bp, Staphylococcus aureus
gtggaagctgcagcaattaaggcgactgctgaaaaatttgaacgcgaaaaagcgaaaggacttaaacctagagcgataagagcaatgatcgttggaattccaaatgttggtaaatccacattaataaataaactggcaaagcgtagtattgcgcagactggtaataaaccaggtgtgaccaaacaacaacaatggattaaagttagtaatgcattacaactattagacacaccagggatactttggcctaaatttgaagatgaagaagtcggtaagaagttgagtttaactggtgcgataaaagatagtattgtgcacttagatgaagttgccatctatggattaaactttttaattcaaaatgatttagcgcgattaaagtcacattataatattgaagttcctgaagatgcagaaatcatagcgtggtttgatgcgatagggaaaaaacgtggcttaattcgacgtggtaatgaaattgattacgaagcagtcattgaactgattatttatgatattcgaaatgctaaaataggaaattattgttttgatatttttaaagatatgactgaggaattagcaaatgacgctaacaattaa

SEQ ID NO: 420597 - DNA, 768 bp, Staphylococcus aureus
atgacgctaacaattaaagaagttacgcagttgattaatgcggttaatacaatagaagaattagaaaatcatgaatgctttttagatgagcgaaaaggtgttcaaaatgccatagctaggcgcagaaaagcgttagaaaaagaacaagctttaaaagaaaagtatgttgaaatgacttactttgaaaatgaaatattaaaagagcatcctaatgctattatttgtgggattgatgaagttggaagaggacctttagcaggtccagtcgttgcatgcgcaacaattttaaattcaaatcacaattatttgggccttgatgactcgaaaaaagtacctattacgaaacgtctagaattaaatgaagcactaaaaaatgaagttactgcttttgcatatggtatcgcgacagctgaagaaatagatgaatttaatatttataaagctactcaaatcgccatgcagcgagctattgatggattatcagtacaaccaacgcatttattgatagacgcgatgacgcttgataatgcactgcctcaagtatctttaatcaagggtgatgcaagaagtgtgtccattgcagctgcaagtatcatggcgaaggtttttcgtgatgattatatgacacagttatctaaagattatcctgaatacggttttgaaaaaaacgcgggttatggtaccaaacaacatttactagcaatcgatgatattggcattatgaaagagcatagaaaaagctttgaacctataaaatcgttactgtaa

SEQ ID NO: 420598 - DNA, 1167 bp, Staphylococcus aureus
atgaatatccacgagtatcaaggtaaagaaatatttcgttcaatgggcgttgcagttccagaaggacgagtagcatttactgctgaagaagcggtggagaaagcaaaagaattaaattctgatgtatatgttgtaaaagcacaaattcatgctggaggtagaggtaaagcaggcggagtaaaaattgctaaatctttatctgaggtagaaacatatgcaaaagaattattagggaaaactttggtgacacatcaaactggtccagaaggtaaagaaattaaacgtttatatatcgaagaaggttgtgctattcaaaaagaatattacgttggattcgttattgatcgtgcgactgaccaagtaacattgatggcgtctgaagaagggggcactgagattgaagaagttgctgcgaagactcctgaaaagatcttcaaagaaactatcgatccagtaatcggactttcaccattccaagcaagacgaattgcgtttaatattaatattcctaaagaatctgttaacaaagctgctaaattcttattagcactttataatgtattcattgaaaaagattgttcaatcgtagaaatcaacccattagttacaacagctgatggtgatgtattggcattagatgctaaaattaattttgatgataatgcattattcagacataaagatgttgtagaattacgtgatttagaagaagaagatccgaaagagattgaagcgtctaaacatgatttatcatacattgcattagatggtgacatcggatgtatggttaatggtgcaggtttagccatggcaacaatggatacgattaatcatttcggtggaaacccagccaatttcttagatgcaggcggaagcgctactagagaaaaagtaactgaagcatttaaaatcattttaggtgatgaaaatgttaaaggtatttttgtaaacattttcggtggcattatgaaatgtgatgttatcgcagaaggtatcgttgaagctgtaaaagaagtagatttaactttaccactagttgtacgcttagaaggtacaaatgttgagttaggtaaaaaaatcttaaaagactcaggattagcaattgaaccagcagcaacaatggctgaaggtgcacaaaaaattgttaaactagtcaaagaagcataa

SEQ ID NO: 420599 - DNA, 909 bp, Staphylococcus aureus
atgagtgtatttatagataagaatactaaagtaatggtacaaggtattacagggtctactgcccttttccatacaaaacaaatgcttgattatggtacgaaaatagtagcaggtgtgacgcctggtaaaggtggtcaagttgttgaaggcgttcctgttttcaacactgttgaagaagctaaaaatgaaactggggcaacggtttcagtcatttacgttccagcaccatttgctgcagactcaattttagaagcagctgatgcagacttagatatggttatttgtatcactgaacatattcctgtattagacatggttaaagttaaacgctacttacaaggtagaaaaacacgtttagttggtccgaactgtccaggtgtgattacagcagatgaatgtaaaattggtattatgcctggctatattcacaaaaaaggtcatgttggtgtagtatcacgttcaggtacactaacatatgaagcagtgcaccaattgactgaagaaggtattggtcaaactacagctgttggtattggtggagacccagtcaacggaacaaactttattgatgttttaaaagcattcaatgaagatgacgaaacgaaagcagttgttatgattggtgaaatcggtggtacagctgaagaagaagcagctgaatggattaaagcgaatatgacaaaaccagttgtaggctttatcggtggacaaacagcacctcctggaaaacgtatgggacatgctggtgcaatcatttcaggtggtaaaggtactgctgaagagaaaataaaaacattaaatagttgtggtgtgaaaacagcggcaacaccttcagaaattggttcaacattaattgaagctgctaaagaagcaggtatttatgaatcattattaacagttaataaataa

SEQ ID NO: 420600 - DNA, 1119 bp, Staphylococcus aureus
atgaataaacaacaaagtaaagtacgctattcaattagaaaagttagtattggaattttgtcaatttcaataggtatgtttttggcattgggtatgtcgaacaaagcatatgcagatgaaattgataaatctaaagattttacaagagggtatgagcaaaatgtattcgcgaaatcagagttaaatgctaataaaaatacgacaaaagacaaaataaaaaatgaaggtgctgttaaaacatcggacacaagtttaaagttagacaacaaatcagcaatttcaaacggaaatgaaattaatcaagatataaagatttcaaatactccgaaaaactcaagccaaggtaacaatctagttattaataacaatgaacctactaaagaaattaaaattgcaaacttggaagctcaaaattctaatcagaagaaaacgaataaagttactaataattactttggttactacagttttagagaagctccaaaaacacaaatctatactgtaaaaaaaggagacacacttagtgctatagcattaaaatacaaaactacagtttcaaatattcaaaatacaaataatatagcaaatcctaatttaatatttattggtcaaaaattaaaagtgccaatgacaccattagtagaaccaaaaccaaaaacagtgtcttcaaataataaaagtaatagtaatagcagtacattaaattatttgaaaacattagagaatagaggatgggatttcgacggtagttatggatggcaatgtttcgatttagttaatgtatattggaatcatctttatggtcatggattaaaaggatatggagctaaagatataccatatgcaaataattttaatagtgaagctaaaatttatcacaacacaccaactttcaaagctgaacctggggacttagtggtttttagtggaagatttggtggaggatatggtcatacagctattgtcttaaatggtgattatgatggaaaattaatgaagttccaaagtttagatcaaaactggaataatggtggatggcgtaaagcagaggttgcacataaagttgttcataattatgaaaatgatatgatttttattagaccatttaaaaaagcataa

SEQ ID NO: 420601 - DNA, 432 bp, Staphylococcus aureus
atgtacgatatcgctggtttaagaatgatgtgccaatttgtagaagatattgatgttgtcgtcaatattttaagacaaagaaaagattttaaagtaattgaagaacgagattatattcgtaacactaaagaaagtggttaccgctcgtatcatgtcattattgaatatccaattgaaacattacaaggccaaaaatttatattggctgagattcagattcgtacattagcaatgaatttctgggcaacgattgaacatactttacgatataaatatgatggtgcttatccggatgaaattcaacatcgtttggaaagagcggcagaagcagcgtatttacttgatgaagagatgtctgaaattaaagatgaaattcaggaagctcaaaaatattacacgcaaaaacgttctaaaaaacatgaaaatgattaa

SEQ ID NO: 420602 - DNA, 1428 bp, Staphylococcus aureus
atggctgtaaaaagagaagatgtaaaagccatcgtaagcgctattgggggaaaagaaaatcttgaagctgcaacgcattgtgtaacacgattacgtttagtgcttaaagatgaaagcaaagttgataaagacgcattaagtaataacgcgttggtcaaggggcagttcaaagcagaccatcaatatcaaattgtcattggtccaggaacagtcgatgaagtgtataagcagtttattgatgaaacaggtgctcaagaagcttcgaaagatgaagcgaaacaagcagctgcgaaaaaagggaatccagtacaacgtttgatcaaattgttaggggatatttttataccaatattacctgcgattgtgacagctggtttgttaatggggatcaataatttacttacaatgaaaggtttatttggtccaaaagcacttattgagatgtatccgcaaattgctgatatttcaaacatcattaatgtgattgcgagtacggcatttattttcttaccagcattaattggttggagtagtatgcgtgtatttggtggtagtccgattctaggcatagtcttaggtttgattttaatgcatccgcaattagtatctcagtatgatttggcaaaagggaatattccgacgtggaacttatttggcttagagattaagcagttgaattaccaaggtcaagtgttgcctgttttaattgcagcttatgttctagctaaaattgaaaaaggattaaataaagtcgttcacgattcgataaaaatgttggtcgttggacccgtagcgcttttagttactggatttttagcatttattatcattggaccagttgcattattgattggtacaggtattacatctggtgttacatttatattccaacatgcaggatggcttggcggagcaatatatggattgttatatgcaccacttgtaattacaggactacaccatatgtttttagcagtagatttccaattgatgggtagcagcttaggtggtacgtatttatggccaattgttgcgatttccaatatttgtcagggctctgcagcatttggagcatggtttgtctataaacgtcgtaaaatggttaaagaagaaggcttggcattaacatcttgtatttctggtatgttaggtgttactgaaccagctatgtttggtgtgaacttacctttgaaatatccatttatcgctgcgatatcaacgtcttgtgtattgggggcaatcgttggtatgaataacgtacttggaaaagttggtgttggtggcgtgccagcattcatttcaattcaaaaagaattttggccagtatatcttattgtgacagctattgctattgttgtaccatgtatactaacaattgtgatgtctcattttagtaaacaaaaagcgaaagaaattgttgaagattaa

SEQ ID NO: 420603 - DNA, 1641 bp, Staphylococcus aureus
gtgtcgaaagaaatagattggagaaaatccgttgtatatcaaatttatcctaagtcgtttaatgatacgacggggaatggtataggagatatcaacggaattatagaaaaattggattatatcaagttattgggtgttgattatatttggttaacaccagtgtatgaatcacctatgaatgataatggctatgatatcagcaattatttagaaatcaatgaagcctttggaacgatggatgattttgaaaagttaatcaaagttgctcatcaaaaagacttgaaagtgatgttagatattgttattaatcatacgtcgacggagcatgaatggtttaaagaagcccgtaaatctaaagataacccttatagagattattactttttcagatcatctgaagacgggccgccaacaaattggcattctaaattcggtggtaatgcatggaagtatgattctgagacagatgaatattatttacatttatttgatgtcagtcaagctgatttaaattgggataatccggaagtacgtcaatcgttatatcgcatagtcaatcattggatagacttcggcgttgatggttttcgatttgatgtcattaacttaatttctaaaggtgaatttaaggactctgacaaaataggtaaagaattttatacggatggtcctagagtgcatgagtttctgcatgaattaaatcgtcaaacgtttggtaacactgacatgatgactgtaggagaaatgtcttcgacgacgattgaaaattgtattaagtatacacaaccagaacgccaagaattgaatagtgtttttaattttcatcatctaaaggttgattatgttgatggtgaaaagtggacaaatgcgaagcttgattttcataagttaaaggaaattctgatgcaatggcaacgaggtatttatgacggtggcggatggaacgcgattttctggtgtaatcatgatcagccacgggtagtgtctagatttggtgatgatacgtcggaagagatgaggatacaaagtgctaaaatgttagctatcgcactgcatatgttgcaagggacgccatatatttaccaaggtgaagaaattggtatgacggacccacattttacatcaatagcacaatatcgtgatgttgaatcgattaatgcctaccatcagttgctaagtgaagggcatgctgaagcggatgtattagcgattttaggacagaagtcacgagacaattcgagaacgcctatgcaatggagtgatgatgttaatgctggatttacagctggtaagccttggattgatatttcggaaaattatcatcaggtcaacgttagacaagcacttcagaataaagagtctattttctatacgtatcaaaaattaatacaattaagacatacgcatgatattattacgtatggagacattgtgccacgttttatggatcatgatcatttatttgtttatgaacgtcattataagaatcaacaatggctagtaattgcgaatttctcagcatcggctgttgatttgccagaaggattggctagagaaggttgtgttgtgattcaaacaggcacagtggaaaataatacgataagcgggtttggtgcaattgtaatcgaaacaaacgcgtaa

SEQ ID NO: 420604 - DNA, 744 bp, Staphylococcus aureus; identical to SEQ ID NO: 404905

SEQ ID NO: 420605 - DNA, 1287 bp, Staphylococcus aureus
atgtggattactgcgtttttaggtgcaagtagtgcttttattgaatctacacttggtcaaatattcaagagagttgaaaataatgaataccgtggtggaccagcgtattatattgaatatggtattggtggtaaatttggtaaaatttacggaattatctttgctattgttacgattatctcagtaggtctattgcttcctggtgtgcaatctaacgctatagcaagttctatgcataatgcgattcatgttccacaatggttaatgggtgctattgttgtagttattttgggattaattatttttggtggtgtacgtagtattgccaatgttgcaacagccgttgtaccatttatggcaattatttacatactgatggctgtcattatcatttgtatcaatatacaagaagtgccagcgttatttgcattaattttcaaatcagcatttggattacaatctgcttttggtggtatcgttggcgcaatgatagagattggtgttaaacgtggattatactcaaatgaggctggtcaaggtacaggtccacacgcagcagcggcagcagaagtatcacatccaagtaaacaaggtctagtacaagcattttcagtttatattgatacattatttgtatgtactgcaactgctctgattatacttatttctggtacatataatgtgactgatggtacggttaatgcgaatggcacaccgcatttaattaaagatggcggtatttatgttgaaaatgcaacaggtaaagattattcaggtactgcgatgtatgcacaagccggcattgataaagcgttccatggcagtggttatcaatttgatcctactttctctggcgtaggttcgtactttattgcatttgctttattcttctttgcatttactacaattttgtcgtactactacattacagaaacaaatgttgcttatttaacgcgtaatcaaaataatcaagtttcatcgatatttattaatattgctcgtgtgattattttgttcgctacattttacggtgcagttaaaacagctgatgtagcatgggcattcggtgatttaggtgtaggtctaatggcttggttaaatatcattgcgatttggattttacataagcctgccgtaaatgctttaaaagattatgaaattcaaaagaaacgtttaggaaacggttataatgcagtttatcaacctgatccgaataaattacctaatgctgtcttttggttgaagacatatccagaacgtttaaaacaagcacgtgccaaaaagtaa

SEQ ID NO: 420606 - DNA, 327 bp, Staphylococcus aureus
atgctcaataattcagatagtatagctataggatgtgtgcaaaataaaacgatgagaaggtttatttcatatattaattcacctatagcaattacttcagcaaatatctctggaactgccgatgatattttaataactgaaaatgaagcaattaagcacatgggcgaaaatgtaagatatatgctaagaagtcaaaataaaactaactataaaacatctagtacgattattaaagtgacagataataaaattgaattattaagagaaggagatataaagtttgaagaaataaaagaaagactaggtacaggtattatttatgaataa

SEQ ID NO: 420607 - DNA, 1122 bp, Staphylococcus aureus
atgaataagttaatacttgggatttatttgtaccgaattttttcacgagcatacttttatttaccgtttttattaatttactttttgattcaaggttattccataatacaattagaaatattaatggcgtcttatggcattgcagcatttttattctctctatacaaagagaagtgttttaaaatttgtaacttaaaagattctaataaattagttgttagtgaaatattcaaaatcatcggtttattgttgttattatatcaaaatcaatatttaattttagtagtggcacaaatattattagggttaagttactcaatgatggcgggtgttgataccgcaataattaaaagaaatataacaaatgagaaatacgtacaaaataagtcaaatagctatatgttcctatcattattaatttcagggattataggtagttatctttatggaataaatattaaatggcctataataatgactggtatattttcaattctaacaattataattattcgatgcacattagttgaaaatagggaattaaatttaataggagaaacaaagggaaagataaagaaatttctaccggaagagaagttttggatattgcattattcttttttaagagcgttaatattaggattttttataggatttattccaattaatatatataatgatttaaaactgaataatttacaatttatttcagtattaacttgttacacagttatgggttatttatcttcacgttatttaactaaatacttgaactataagtttgtgtcagaaatttgtttaataatatttttaataatatatacatatcaaagtttcatagcagttactatttctatgatatttttaggtatttcttcagggttaactcgtccacaaactataaataaactttctagcagtagtaacttaagagtgatgcttaattatgcagaaacgttatattttatttttaatatcgcatttttacttattggtggttatctatattcaattggaactattcaatatttaatgttatttatgtcattattgacgtttatatatttactaacattattttatttaaggagagatcaacatgaaaatcaacacagaatttaa

SEQ ID NO: 420608 - DNA, 399 bp, Staphylococcus aureus; identical to SEQ ID NO: 406220

SEQ ID NO: 420609 - DNA, 363 bp, Staphylococcus aureus; identical to SEQ ID NO: 405962

SEQ ID NO: 420610 - DNA, 255 bp, Staphylococcus aureus
atgctcgttgatagtgataattatgcctttgcgtatacattagatgatggtaaagcgtatgcttatctcattttcgtacaagaaacatggacgatgttgcatgaaaacacgactaaaaaaattattatcaatgatgaactagaattgactgaattccaccaagaacttacttatattttagacaacataaaagggaataataattatggtaaggaatttgttgcaaccgttgaagaaacattcgacattgaataa

SEQ ID NO: 420611 - DNA, 180 bp, Staphylococcus aureus
atgttagtccatacaaatagacattatggtaagacactcgtacttaatatgcaaacaaataaattcggtattatcggtactgatgatttaaaagaagaaggctatatcgctcatattttaggtgtaaatgctgaagaaggcgatgaaattactgagtatttaaatgaagtcattcattaa

SEQ ID NO: 420612 - DNA, 276 bp, Staphylococcus aureus
atggcagtaggggaacccgcagatgacgaaaatggtgcagccaagccacgcttaccatttgaccatgtcttccatcataataagtatcatgctgataaggaaacacagtatgcacaaatggcagattacgaccagacaatcagcgagtactatgatcaacgtacaaacgggaatcgcaaagaaacatggtcgcagcaaattgagatgttcctaggaaacaaagcaagattagatatgttagaacaattgcaaaaatcaggcttaatacagcgatag

SEQ ID NO: 420613 - DNA, 1062 bp, Staphylococcus aureus
atggcaaaattagaaatgaataaaaatacgcctcttgagtttggtttgtattccttaggtgatcatttattgaatccattgaaaggtgaaaaagttagttatgagcaacgtattaatgaaattattgaagcaagtaaattagcagatgaagcaggtattgatgtttttgcagttggtgaaagtcatcaggagcattttacaacacaggcacatacggttgtgttaggtgcaattgcccaagcgacaaagcatattaaagtttcaagttcttcaacgattattagtgcaacagatcctgtaagagtatttgaagacttcgcgacattagatttgatttctcatggtagagccgaaattgtagctggcagagcatcaagaacaggtatttttgacttgtttggctatgatttaaaagactatgatgaattgtttgaagaaaaattaggtttacttttagagttaaataaaactgagcgtattacttggtctggaaaatatcgtccagaacttagaaatatgaaaatattcccaagaccaatcgataatacattgccaatatggcgtgctgttggtggtccacctgcaagtgctattaaagcgggaaaacaaggtgtgccaatgatgattacaactcttggtggcccagcaatgaactttaaaggttctatagatgcttatcgtcaagcagcaactgaagcaggtttcgatgcttcgcctaagtctttaccagtaagtacagcgagtctgttttatacagctgaaacaactcaggatgctatgagagaattttatccacatttgaatacagggatgtcatttattcgtggcgttggttatccgaaacagcaatttgctaattcgtcagattatcgagaagcgctaatggttggaagcccgcaacaaattattgaaaagatattgtatcaacacgagttgtatggtcatcaacgttttatggcacagcttgattttggcggtgtgccatttgaaaatgttatgaagaatatagagttaattggcaacgacattataccggcgattaaaaagcatttatcaaaatag

SEQ ID NO: 420614 - DNA, 228 bp, Staphylococcus aureus
atgacattcaatatacatacgattactatttatttacaatatattacaactaaaaagaaaggggccgatgatatgcaacaagtgacatcagatattatgacttttagaggttcacatttcgagttaggtgttaaaactggtaaatggcttcaacaaacacctcttctaaaaaatcgagaaaaagaatggaaaaaaacgtgtcccacgtttcgatatagatgtaaatga

SEQ ID NO: 420615 - DNA, 513 bp, Staphylococcus aureus
atggaggcattagccaaattacgtacagtatttaaagctgacggcactgtgactgcgggaacatctgccccactttctgatggtgcaggatttgtagttttaatgtctggagataaagtgaaagaactcggcgtgacacctattgcacgattcgttggttataaggcagtaggcgttgacccgaaaattatgggtattgggcctgcatatgcgattcctgaagtattgtcactcagcaatctatctgttgaagatattgatttgatcgaattgaacgaagcatttgcttctcaaacgattgcatctattaaagaagtaggtctagatatatcacgtacgaatgtgaatggtggcgctattgctttaggtcatccattaggtgctacaggcgcaatgttaaccgcgcgtttacttaatgaaatgggtagacgtcccgatagccgttacggcatggttacgatgtgtattggtgtcggtatgggtgcagctgctatatttgagtatgtgcgttag

SEQ ID NO: 420616 - DNA, 351 bp, Staphylococcus aureus; identical to SEQ ID NO: 409257

SEQ ID NO: 420617 - DNA, 1266 bp, Staphylococcus aureus; identical to SEQ ID NO: 407297

SEQ ID NO: 420618 - DNA, 351 bp, Staphylococcus aureus; identical to SEQ ID NO: 408879

SEQ ID NO: 420619 - DNA, 348 bp, Staphylococcus aureus
atgaagtatgtagaaggctttgctgaaggtgaagtggtttatacaaaagaggaagcggcacaacactttaaagatcaagatgcagcaactcatttaccatacatttacttaagtgctggtgtttctgcggaattattccaagaaactttaaaatttgctcacgaagctggtgctaaattcaacggtgtactttgtggccgtgctacatggtctggtgctgttcaagtatacattgaacaaggtgaagatgctgctcgtgaatggttacgtacaactggtttcaaaaatattgatgacttaaataaagtattaaaagatactgcgacatcttggaaacaaagaaaataa

SEQ ID NO: 420620 - DNA, 1083 bp, Staphylococcus aureus; identical to SEQ ID NO: 415183

SEQ ID NO: 420621 - DNA, 753 bp, Staphylococcus aureus
atgagtcaagcagccgaaacattagatggttggtatagtctacatttattttatgcagttgattgggcatcattacgtatagttccaaaggacgaacgcgatgcacttgtcactgaatttcaatcatttttagaaaatacagcaactgtaagatcatcaaaatctggtgatcaagctatttataatataactggtcaaaaagcagatttgttattatggttcttacgtcctgaaatgaagtctttaaatcatattgaaaatgaatttaacaaattgcgcattgctgacttcctaatccctacatattcatatgtatcagtcattgaattgagcaattatttagctggtaaatctgatgaagatccttatgagaaccctcatatcaaagcaagattatacccagaattaccacattctgattatatttgtttctatccaatgaacaaacgtcgtaatgaaacttataactggtacatgttaactatggaagaacgccaaaaattaatgtatgaccatggtatgattggtagaaaatatgctggcaaaatcaaacaatttattactggttctgtagggtttgatgatttcgaatggggcgtaacattgttctcagatgacgtattacaattcaaaaaaattgtatacgaaatgcgctttgatgaaacaacagcacgatacggtgaattcggtagtttctttgtaggacatcttattaacacaaacgaattcgatcaattctttgcgatttcttaa

SEQ ID NO: 420622 - DNA, 408 bp, Staphylococcus aureus
atggatccaaaagttgcaatgttaagcttttcaacaaaagggtctgctaaatcagacgacgtgacaaaagttcaagaagctgtcaaattagcacaacaaaaagctgaagaagaaaaattagaagcaatcattgatggcgaattccaatttgatgctgcgattgtaccaggtgttgctgagaaaaaagcgccaggtgctaaattacaaggtgatgcaaatgtctttgtattcccaagtttagaagctggtaatattggttacaaaattgcacaacgtttaggtggatatgatgcagttggtccagtattacaaggtttaaattctccagtaaatgacttatcacgtggctgctcaattgaagatgtatacaatctttcaattattacagcagcgcaagccttacaataa

SEQ ID NO: 420623 - DNA, 177 bp, Staphylococcus aureus; identical to SEQ ID NO: 405358

SEQ ID NO: 420624 - DNA, 402 bp, Staphylococcus aureus; identical to SEQ ID NO: 408187

SEQ ID NO: 420625 - DNA, 306 bp, Staphylococcus aureus
atggttactcaaaataaaaagatattgattattactggctcattcggtaacggtcatatgcaagttacacagagtatcgttaatcaacttaatgatatgaatctagaccatttaagcgtcattgagcacgatttatttatggaagctcatccaattttgacttctatttgtaaaaaatggtatatcaatagctttaaatattttagaaatatgtacaaagggttttattacagccgcccagataaactagacaaatgtttttacaaatactatggacttaataagctgtctcttatacacatctga

SEQ ID NO: 420626 - DNA, 354 bp, Staphylococcus aureus; identical to SEQ ID NO: 414837

SEQ ID NO: 420627 - DNA, 177 bp, Staphylococcus aureus
atggactcgaatggaattatcgaatggaatggattggaaaagtcaatgaactcgaatggaatcatcactgaatggaatcgaatagaatcattgaatggactcgaatgtagtgatcaaaaggactcgaaaggcattaacgaatggactcgaatggaatcattggatgtactcgaatga

SEQ ID NO: 420628 - DNA, 228 bp, Staphylococcus aureus; identical to SEQ ID NO: 420614

SEQ ID NO: 420629 - DNA, 423 bp, Staphylococcus aureus
atggataacttcggtctaaaagttaaagctaccaatgttgtaggtagtggcgacggtgtagaagtttatgtgcattgcgatgaccacgatatcgtatttaatgcgagtattccatttgataaatcaattattgacagtgatagctcattaagaagtgaggataagggcgatgatatgagtactttagttggtacagtactaagtggatttgaatatcgagcacaaaaagaaaagtatgataacctatataaatttttcaaagataacgaagagaaataccaatatacaggatttacaaaagaggcaattaacaagacacaaaatagtggatatgaaaatgaatatttttatatcgttgcaaatataccaacacttcaagaatatagaaaatattacgaacctctgattaaaaaaataatctag

SEQ ID NO: 420630 - DNA, 561 bp, Staphylococcus aureus
atgttagtagctttaaatgaagaaaaggaacgtgtgttagcaactactgcattgagaaagacacaatatttttgtccggtgtgtggcaagcaagttattttaaagcgtgggctcaaagtaattagtcattttgcacataaacatttagcggaacaaaaatgttttaataatgaaacgattaaacattataaaagtaaattgattttagcacagatgatacagcaacaaggatgtaaagtagagatagagccatttttaaaagaaataaaacaaattccggatattttgattaataataaatatgttattgagctacagtattcgccaattccttataaacagattcttcaacgaacggaaggtttaaagaaaatgggatataaagtaagttggttattaaatgatgttgattattgtcataataaagtgaagttcaatcattttcaaagtttgtttattaatccaatcactcgaaaacttcatacgttcaatttagagaaaaaaacaaataatgatgtttcaacaaatacaatatttaggcgggcacaaatatgttgctga

SEQ ID NO: 420631 - DNA, 150 bp, Staphylococcus aureus; identical to SEQ ID NO: 411733

SEQ ID NO: 420632 - DNA, 201 bp, Staphylococcus aureus; identical to SEQ ID NO: 406020

SEQ ID NO: 420633 - DNA, 5247 bp, Staphylococcus aureus
gtgacaatcgataatcagcaatctgcattgactgctaaaggatataactacacgtccgtcgatagttcatatgcgtcaacttataatgatacaaataaaactgtaaaaatgacgaatgctggacaatcagtgacatattattttactgatgtaaaagcaccaactgtaactgtaggcaatcaaaccatagaagtgggtaaaacaatgaatcctgttgtgttgactacaacggataatggtactgggactgtgacaaatacagttacaggattaccaagcggattaagttacgatagtgcaacgaattcaatcattgggacaccaacaaaaattggtcaatcaacagtgacagttgtgtctactgaccaagcaaataacaaatcgacgacaacttttacaataaatgttgtggatacgacagcaccaacagtgacaccaataggagatcaatcatcagaagtgtattcaccaatatccccgattaaaattgctacgcaagataacagtggaaatgcggtgacgaatacagtgactggattgccatccggactaacatttgatagtacaaataatactattagtggtacaccaacaaacattggtacaagtactatatcaatcgtttctacagatgcgagcggtaacaaaacgacgacaacttttaaatatgaagtaacaagaaatagcatgagtgattccgtatcaacatcaggaagtacacaacaatctcaaagtgtctcaacaagtaaagctgactcacaaagtgcatcaacgagtacatcaggatcgattgtggtatctacatcagctagtacctcgaaatcgacaagtgtaagcctatctgattctgtgagtgcatctaagtcattaagcacatctgaaagtaatagtgtatcaagctcaacaagcacaagtttagtgaattcacaaagtgtatcatcaagcatgtcaggttcagttagtaaatcaacatcattaagcgattcgatttcgaactctaacagtactgaaaaatccgaaagtctatcaacaagtacatctgattcattgcgtacatcaacatcactcagtgactcattaagtatgagtacatcaggaagcttgtctaagtcacaaagcttatcaacgagtatatcagggtcgtctagtacatcagcatcattaagtgacagtacatcgaatgcaattagtacatcaacatcattgagcgagtcagctagcacctcggactctatcagtatttcaaatagcatagccaactctcaaagtgcgtcaacaagcaaatcagattcacaaagtacatcaatatcattaagtacaagtgattcaaaatcgatgagtacatcagaatcattgagcgattcgacgagcacaagtggttctgtttctggatcactaagcatagcagcatcacaaagtgtctcaacaagtacatcagactcgatgagtacttcagagatagtaagtgactctatcagtacaagtgggtcattatctgcatcagacagtaaatcaatgtctgtaagtagttcaatgagcacgtctcagtcaggtagtacatcagaatcattaagtgattcacaaagtacatctgattctgatagtaagtcattatcactaagtactagtcaatcaggttcaacaagtacatcaacgtcgacaagtgcttcagtacgtacttcggaatcgcaaagtacgtctggttcaatgagtgcaagtcaatccgattcaatgagcatatcaacgtcgtttagtgattcaacgagtgatagcaaatcagcatcaactgcatcaagtgaatcaatatcacaaagtgcttctacgagcacatctggttcggtaagtacttcgacatcgttaagtacaagtaattcagaacgtacatcaacatctgtgagtgattccacaagcttaagtacatcagagtctgattcaataagtgaatcaacgtcaacgagcgattctataagtgaagcaatatctgcttcagagagcacgtctatatcattaagtgaatcaaatagtactagcgattcagaatcacaaagtgcatctgcctttttaagtgaatcattaagtgaaagtacgtctgaatcaacatcagagtcagtgagtagttcgacaagtgagagtacgtcattatcagacagtacatcagaatctggtagcacatcaacatcattaagtaattcaacaagtggtagtgcgtccatttcaacatcgacaagtatcagtgaatcaacgtcaacgtttaagagcgagagtgtttcaacatcactgagtatgtcaacgagtacaagtttgtctaactctacaagtttgtcaacatcattaagtgattccacaagtgatagtaagtctgattcattaagtacatcaatgtcgacaagtgattcaatcagtacaagtaaatctgattccattagtacatctacatcattaagtggttctacaagtgaaagtgaatccgactcaacatcatcaagtgaaagtaaatccgattcaacatcaatgagcataagtatgtctcaatcaacatcaggaagtacaagtacgtcaacgagtacaagtttgtctgactcaacgagtacgtcattgtcactaagtgcatcaatgaatcaaagcggagtagactcaaactcagcaagccaaagtgcctcaaactcaacaagtacaagcacgagcgaatccgattcacaaagcacatcaacatatacaagtcagtcaacaagccaaagtgaatcaacatcgacatcaacgtcactaagcgattcaacaagtatatctaaaagtacgagccaatcaggttcaacaagcacatcagcatcattaagtggttcagagagtgaatctgattcacaaagtatctcaacaagtgcaagtgaatcaacatcagaaagtgcgtcaacatcactcagtgactcaacaagtacaagtaactcaggatcagcaagtacgtcaacatcgctcagtaactcagcaagcgcaagtgaatccgattcgtcgtcaacatctttaagtgattcaacatctgcgtcaatgcaaagcagtgaatccgattcacaaagcacatcagcatcattaagtgattcgctaagtacatcaacttcaaaccgcatgtcgaccattgcaagtttatcaacatcggtaagtacatcagaatctggctcaacatcagaaagtacaagtgaatccgattcaacatcaacatcattaagcgattcacaaagcacatcaagaagtacaagtgcatcaggatcagcaagtacatcaacatcaacaagtgactctcgtagtacatcagcttcaactagtacttcgatgcgtacaagtactagtgattcacaaagtatgtcgctttcaacaagtacatcaacaagtatgagtgattcaacgtcattatctgatagtgtgagtgattcaacatcagactcaacaagtgcgagtacatctggttcgatgagtgtatctatatcgttaagtgattcgacaagtacatcaacatcggctagtgaagtaatgagcgcaagcatatctgattcacaaagtatgtcagaatctgtaaatgattcagaaagtgtaagtgaatctaattctgaaagtgactctaaatcgatgagtggctcaacaagtgtcagtgattctggctcattgagcgtctcaacgtcattaagaaaatcagaaagtgtaagcgagtcaagttcattgagtggctcacaatcgatgagcgattcagtaagcacaagcgattcgtcatcattaagtgtatcgacgtcactaagaagttcagaaagcgtgagtgaatctgattcattaagtgattcaaaatcaacaagtggttcgacttcaacaagtacatctggttcattgagtacctcaacatcattaagtggttcagaaagcgtaagcgagtctacctcgctaagtgattcaatatcaatgagtgattctactagtacaagtgactccgactcattaagtggatcaatatctttaagtggttccacaagtcttagcacttcggattcattaagtgattcaaaatcattgagtagctcgcaaagtatgagtggatcagaatcaacgtcaacaagtgtgagcgattcgcagtcaagctcaacaagtaatagtcaatttgactctatgagcatcagtgcatcagaaagcgactcaatgtctacaagtgattcgtctaacatcagtggatcaaattcaacgagtacatcactttcaacatctgactcaatgagcggaagcgtatcagtttcaacatcgacaagtttaagtgactcaatatcaggttcaacaagtgtaagtgactcgagctcaacaagcacatctacatcattaagtgattcaatgtcacaaagccagtcaacaagtacaagtgcatctggttccttaagtacatcgatatcaacatcaatgtcaatgagtgctagtacatcgtcatcacaaagcacatcggtgtcgacatcattatcaacatcagacagtatcagtgattctacttcaataagtatcagtggttcacaaagtacagtagaatcagaatctacaagtgattcaacttctatcagtgactcagaatcattgagtacatcagattcagactcgacatcgacaagtacatcggactcaacaagtggttcaacttcaacaagcatatctgaatcattaagtacgtctggttcaggttcaacgagcgtatctgactcaacatcaatgagtgaatccgattcaacaagtgtttcaatgtcacaagacaaatccgactcaacatcaattagcgactcagaatcagtgtcaacaagcacatcaacgtcattgagcacatccgattcgacaagcacatccgaatcgctgagtacatctatgtctggttcacaaagcatttctgactcaacatcaacaagtatgtccggctcaacaagtacatctgaatctaactcaatgcatccgtcagactcaatgagtatgcatcatactcacagcacgagcacatctcgcttatcaagtgaagcaacaacgagcacgagtgaatctcagtctacattaagtgcaacatctgaagtgactaaacataatggcacgcctgcacaaagtgaaaaaagattgccagatacaggtgactcaataaaacaaaatggattactaggtggcgttatgacattattagttggtttaggtttaatgaagagaaagaaaaagaaagatgaaaatgatcaagatgattctcaagcataa

SEQ ID NO: 420634 - DNA, 159 bp, Staphylococcus aureus
atgctgaaaaacaaaacatttaaagttacttggaattatatttcacaaactacatttatgtatggctctaaagtatcattttcaaatggtgaagtgacttttataaatcctttgatgccctctggattaccgattcatgagtggttgatgttaaagtaa

SEQ ID NO: 420635 - DNA, 768 bp, Staphylococcus aureus; identical to SEQ ID NO: 408060

SEQ ID NO: 420636 - DNA, 1854 bp, Staphylococcus aureus; identical to SEQ ID NO: 419437

SEQ ID NO: 420637 - DNA, 393 bp, Staphylococcus aureus; identical to SEQ ID NO: 408084

SEQ ID NO: 420638 - DNA, 903 bp, Staphylococcus aureus; identical to SEQ ID NO: 415507

SEQ ID NO: 420639 - DNA, 393 bp, Staphylococcus aureus; identical to SEQ ID NO: 405158

SEQ ID NO: 420640 - DNA, 741 bp, Staphylococcus aureus; identical to SEQ ID NO: 415516

SEQ ID NO: 420641 - DNA, 1026 bp, Staphylococcus aureus; identical to SEQ ID NO: 418817

SEQ ID NO: 420642 - DNA, 1044 bp, Staphylococcus aureus; identical to SEQ ID NO: 413353

SEQ ID NO: 420643 - DNA, 1260 bp, Staphylococcus aureus; identical to SEQ ID NO: 415519

SEQ ID NO: 420644 - DNA, 279 bp, Staphylococcus aureus; identical to SEQ ID NO: 415469

SEQ ID NO: 420645 - DNA, 936 bp, Staphylococcus aureus; identical to SEQ ID NO: 415471

SEQ ID NO: 420646 - DNA, 954 bp, Staphylococcus aureus; identical to SEQ ID NO: 418635

SEQ ID NO: 420647 - DNA, 1146 bp, Staphylococcus aureus; identical to SEQ ID NO: 415523

SEQ ID NO: 420648 - DNA, 1077 bp, Staphylococcus aureus; identical to SEQ ID NO: 415539

SEQ ID NO: 420649 - DNA, 1269 bp, Staphylococcus aureus; identical to SEQ ID NO: 415541

SEQ ID NO: 420650 - DNA, 900 bp, Staphylococcus aureus
gtgattgataaggaaggtaatattgcttcatttacgacatcaattggtatgatttatggttcaggtatcacgattccaggctacggtgtgttattgaatacgacaatggatggctttgatgtagtagatggtggtattaacgaaattgcaccatataaacgaccactaagtaacatggctccaacgattgtgatgcatcacgggaagccgatattaacagtaggtgcacctggtgccataagtatcattgctagtgttgcgcaaacattaatcaatgtattagtgtttggcatggatattcagcaggctatagatgaacctagaatttatagtagccatcctaatcgcattgaatgggagcctcaattttcacaatctacaatattagcattgattgcacgtggacatgcaatggaacataaaccagatgcctatattggagatgtacatgggttacaggttgacttgaatacacgtgacgcgtcgggaggtgctgatgatacgagggaaggcacagtgataggtggcgatgtattatcaattagaaaacaaccattacctagtccgaaaatatacgataatgacacccatcgagtatatttcaatgatatgcagttgccattatatgctgaacaagtgcggtggatgcatgacaaatattgggttgatgaaagtgttattagaatcattttccctgaagttagtgtgcatattgaagatttaagaagttatgaaatcgccggaaaaaattatatagatattgcctggttggcacggaagaaaggttatcaagttaccttaaaggatgacagtttatacttaactgatgaaacatatcattcagtgaaagcaaacacaaatgcatactatagatatgatcgagatagtatcacaagataa

SEQ ID NO: 420651 - DNA, 1776 bp, Staphylococcus aureus; identical to SEQ ID NO: 415546

SEQ ID NO: 420652 - DNA, 1164 bp, Staphylococcus aureus; identical to SEQ ID NO: 415617

SEQ ID NO: 420653 - DNA, 1434 bp, Staphylococcus aureus; identical to SEQ ID NO: 415649

SEQ ID NO: 420654 - DNA, 372 bp, Staphylococcus aureus; identical to SEQ ID NO: 409074

SEQ ID NO: 420655 - DNA, 600 bp, Staphylococcus aureus; identical to SEQ ID NO: 408072

SEQ ID NO: 420656 - DNA, 1350 bp, Staphylococcus aureus; identical to SEQ ID NO: 415450

SEQ ID NO: 420657 - DNA, 1242 bp, Staphylococcus aureus; identical to SEQ ID NO: 415565

SEQ ID NO: 420658 - DNA, 765 bp, Staphylococcus aureus; identical to SEQ ID NO: 405075

SEQ ID NO: 420659 - DNA, 204 bp, Staphylococcus aureus; identical to SEQ ID NO: 414932

SEQ ID NO: 420660 - DNA, 384 bp, Staphylococcus aureus; identical to SEQ ID NO: 415578

SEQ ID NO: 420661 - DNA, 1167 bp, Staphylococcus aureus; identical to SEQ ID NO: 415584

SEQ ID NO: 420662 - DNA, 1110 bp, Staphylococcus aureus; identical to SEQ ID NO: 415585

SEQ ID NO: 420663 - DNA, 627 bp, Staphylococcus aureus; identical to SEQ ID NO: 415586

SEQ ID NO: 420664 - DNA, 1029 bp, Staphylococcus aureus; identical to SEQ ID NO: 415484

SEQ ID NO: 420665 - DNA, 687 bp, Staphylococcus aureus; identical to SEQ ID NO: 405043

SEQ ID NO: 420666 - DNA, 2610 bp, Staphylococcus aureus; identical to SEQ ID NO: 411243

SEQ ID NO: 420667 - DNA, 777 bp, Staphylococcus aureus; identical to SEQ ID NO: 410930

SEQ ID NO: 420668 - DNA, 783 bp, Staphylococcus aureus
atgacgattttagcagaaattgttaaatataaacagtcacttttacaaaatggctattatcaagacaaacttaataccttgaaaagtgtgaagattcagaataaaaaatcttttataaacgcaattgagaaagaaccaaagctagcaattattgcagaaattaaatcgaagagtcctacagttaatgacttacctgaacgagatttatcgcaacaaatctcagattatgaaaagtacggtgcaaatgccgtgtccattttaactgatgaaaagtactttggtggtagttttgaaagattacaagcattgacaacaaaaacaacattacccgtattatgcaaagactttattatagacccgcttcaaattgatgttgctaaacaagctggtgcatctatgattttattgatcgttaacatcttatcggataaacaattgaaagatttatataactacgctatatcgcaaaatctagaagtgttaattgaagtacatgatcgccatgaattagaacgtgcctataaggttaatgctaaattgattggtgtaaataacagggacttaaaacgatttgtcacaaatgtggaacatacaaatactattttagaaaataaaaaacccaatcatcattatatttctgaaagtggtattcacgatgcatctgatgtaagaaaaatcttgcatagtggtatcgatggcttactaataggtgaggcgcttatgcgttgtgacaatctatctgaatttttaccacaactgaaaatgcaaaaggtgaagtcatga

SEQ ID NO: 420669 - DNA, 1416 bp, Staphylococcus aureus
ttgttagcagacatcactgtaaatgctatgaaaggcatctatttaaggtatgacgaaaatggggcgattacttcacatactattgataaagatggcgtgaaaattagtggcgataaagttgatataacagcgaatagagaatttaatgtagtcgcaaataatattaataacaaagttggtaaaaatgacattgttaatagcctaaacttatcaaatgaaggtcttgacatcaatgtgaatagaattggtattaaaggcggaaatgctaaccgttatgtacaagttcaaaatgattttattgaacttggcggaatcgtacaacgaacttggaaaggcaaacgatcaaccgatgatatattcacacgtcttaaagatggacatctaaggtttagaaataataccgcaggcggttcactttatatgtcacattttggtatttcaacatatattgatggagaaggcgaagacggaggttcatccggtactattcaatggtgggataaaacttacagtgatagtggtatgaatggcataacaatcaattcttatggcggtgtagtcgctttaacatctgactacaatcgaattattatcgattcatatgcttcagctaatattgaaagtagagaagcgccgatatatttatctccgaacaccaaaaataaacctggtttaaaccgattcgcattcacattatcaaacgctgatagtgcatacgaaactgacggttatatcatgtttggttcagatgaaaactataagtacggtgctggattaagattttctaaacgtagcaataaaggattggttcaagtcgttaatggtgactatgctacaggcggagacactacaattgaatcaggtatgggcaaattcaacttagttaaacgaagagatggaaatagttacgttagcattcaaagttatgatttattggcggtaggttctgataatgctggcgatagagtcgcttctaattctatttataagcgtacttattcagcacctgctaacttacacattacttctgctggaacaattgggcgtgctacttctgccaaaaagtataaaatttcaatcgaaaaccaatacatcaatgaagacgatcagttcagtcattcaaaagagattttaaagcttccaattcgtacatggtttgacaaatatgaatcggaaataatggctaaagaattggaaagtggtaaaaagttatctgatgatacttttaaacttagtcgacatactggcttaatagcggaagaggttgaagaattaggatttaatgaatttgttatttatgatgacaacggagaaatcgaaggtatcgcatacgatagactttgggttcatttaatacctattattaaaaaccagcaatcaaaaatcgaaaaactggaggaattaataaatgaatga

SEQ ID NO: 420670 - DNA, 486 bp, Staphylococcus aureus
atgactgctggaacacaacaagctatgaattttgaaagtcatcgcttatgcacgattaaggcaaagcaagagctgcgaataggcacatggtcaattctaccgtttgacatcgaacatgatgctaacgagcctgtggctttcttattacaaagtacattaggttataaggttctgtatgttactgatacaaagtatttgaaatacaaatttaacggcattacgcacatgatgttagaagttaattatatctatgaacaaatgcaagaaaacataaaaaacggcagtgtacacagcacattagcaaacagaattatggagtctcattttagcttagaacatgctatcggaatgttaaaagcaaatgatttaactagactcgaagaaatacatttaattcatttaagtagtcaaaattcaaatgcaaaatacattaaaagtgaaatacaaaaagtgacgggcgcgcccgtttatgttggaggtttataa

SEQ ID NO: 420671 - DNA, 681 bp, Staphylococcus aureus
atgcttggtatggattcgacttgtcctaaagatgttttaacacaactagaatttagtgatgaagatgttgatattataattaactcaaatggtggtaacctagtagctggtagtgaaatatatacacatttaagagctcataaaggcaaagtgaatgttcgtatcacagcaatagcagcaagtgcggcatcgcttatcgcaatggctggtgaccacatcgaaatgagtccggttgctagaatgatgattcacaatccttcaagtattgcgcaaggagaagcgaaagatctaaatcatgctgcagaaacattagaacatgttggtcaaataatggctgaggcatatgcggttagagctggtaaaaacaaacaagaacttatagaaatgatggctaaggaaacatggctaaatgctgatgaagccattgaacaaggttttgcggatagtaaaatgtttgaaaacgacaatatgcaaattgtagcaagcgatacacaagtgttatcgaaagatgtattaaatcgtgtaacagctttggtaagtaaaacgccagaggttaacattgatattgacgcaatagcaaataaagtaattgaaaaaataaatatgaaagaaaaggaatcagaaatcgatgttgcagatagtaaagtatcagcaaatggattttcaagattccttttttaa

SEQ ID NO: 420672 - DNA, 408 bp, Staphylococcus aureus; identical to SEQ ID NO: 409833

SEQ ID NO: 420673 - DNA, 192 bp, Staphylococcus aureus; identical to SEQ ID NO: 415713

SEQ ID NO: 420674 - DNA, 150 bp, Staphylococcus aureus
atgttaggtgaagaaccatcagacaatcctgaattagacgaatacctgattactaaaaactacgaaaaagctaacagtggtgaaaatgatgaaaaagaaaaagatgaaaacactttgaaaggtggtgatgaagatgaaagcggagattaa

SEQ ID NO: 420675 - DNA, 501 bp, Staphylococcus aureus
atgactttcgaagaaaaattaagtgaaatgtacaatgaaattgcgaatgagattagcagtatgataccggtagaatgggagcaagtatttacaatagcttatgtaactgatcaagctggagaagtaatctttaattatactaaaccaggtagtgatgaattgaattattattcagatatacctaaagattgtaatgtctctaaagatatttttaagaattcatggtttaaagtttatcgaatgtttgatgagttaagagaaacttttaaaaaagaagggcttgaaccatggacatcatgcgaatttgactttacaagagacggtaaattgaatgtatcttttgattatattgattgggtgaatttagaatttggaccattagcaaaagaaaattactatatgtataaaaaatttggggttataccagaaatggaatatgaaattaataaagttaaagaaatcgagcaatatgttgaagagcaagatgaagctgaactatag

SEQ ID NO: 420676 - DNA, 468 bp, Staphylococcus aureus; identical to SEQ ID NO: 408564

SEQ ID NO: 420677 - DNA, 516 bp, Staphylococcus aureus; identical to SEQ ID NO: 413287

SEQ ID NO: 420678 - DNA, 1758 bp, Staphylococcus aureus; identical to SEQ ID NO: 413291

SEQ ID NO: 420679 - DNA, 1977 bp, Staphylococcus aureus; identical to SEQ ID NO: 413293

SEQ ID NO: 420680 - DNA, 510 bp, Staphylococcus aureus; identical to SEQ ID NO: 413294

SEQ ID NO: 420681 - DNA, 240 bp, Staphylococcus aureus; identical to SEQ ID NO: 415266

SEQ ID NO: 420682 - DNA, 537 bp, Staphylococcus aureus; identical to SEQ ID NO: 406191

SEQ ID NO: 420683 - DNA, 1563 bp, Staphylococcus aureus; identical to SEQ ID NO: 415264

SEQ ID NO: 420684 - DNA, 1005 bp, Staphylococcus aureus; identical to SEQ ID NO: 413296

SEQ ID NO: 420685 - DNA, 981 bp, Staphylococcus aureus; identical to SEQ ID NO: 415259

SEQ ID NO: 420686 - DNA, 204 bp, Staphylococcus aureus; identical to SEQ ID NO: 408071

SEQ ID NO: 420687 - DNA, 705 bp, Staphylococcus aureus; identical to SEQ ID NO: 406213

SEQ ID NO: 420688 - DNA, 1665 bp, Staphylococcus aureus; identical to SEQ ID NO: 416537

SEQ ID NO: 420689 - DNA, 171 bp, Staphylococcus aureus; identical to SEQ ID NO: 408070

SEQ ID NO: 420690 - DNA, 1017 bp, Staphylococcus aureus; identical to SEQ ID NO: 408069

SEQ ID NO: 420691 - DNA, 807 bp, Staphylococcus aureus; identical to SEQ ID NO: 419044

SEQ ID NO: 420692 - DNA, 810 bp, Staphylococcus aureus; identical to SEQ ID NO: 416283

SEQ ID NO: 420693 - DNA, 366 bp, Staphylococcus aureus; identical to SEQ ID NO: 406229

SEQ ID NO: 420694 - DNA, 264 bp, Staphylococcus aureus; identical to SEQ ID NO: 406243

SEQ ID NO: 420695 - DNA, 909 bp, Staphylococcus aureus; identical to SEQ ID NO: 415218

SEQ ID NO: 420696 - DNA, 1266 bp, Staphylococcus aureus; identical to SEQ ID NO: 415214

SEQ ID NO: 420697 - DNA, 351 bp, Staphylococcus aureus; identical to SEQ ID NO: 414457

SEQ ID NO: 420698 - DNA, 447 bp, Staphylococcus aureus; identical to SEQ ID NO: 415209

SEQ ID NO: 420699 - DNA, 783 bp, Staphylococcus aureus; identical to SEQ ID NO: 415201

SEQ ID NO: 420700 - DNA, 798 bp, Staphylococcus aureus; identical to SEQ ID NO: 415200

SEQ ID NO: 420701 - DNA, 411 bp, Staphylococcus aureus; identical to SEQ ID NO: 415194

SEQ ID NO: 420702 - DNA, 690 bp, Staphylococcus aureus; identical to SEQ ID NO: 415191

SEQ ID NO: 420703 - DNA, 744 bp, Staphylococcus aureus; identical to SEQ ID NO: 415187

SEQ ID NO: 420704 - DNA, 1605 bp, Staphylococcus aureus; identical to SEQ ID NO: 415167

SEQ ID NO: 420705 - DNA, 507 bp, Staphylococcus aureus; identical to SEQ ID NO: 415165

SEQ ID NO: 420706 - DNA, 570 bp, Staphylococcus aureus; identical to SEQ ID NO: 415326

SEQ ID NO: 420707 - DNA, 1122 bp, Staphylococcus aureus; identical to SEQ ID NO: 416599

SEQ ID NO: 420708 - DNA, 1260 bp, Staphylococcus aureus; identical to SEQ ID NO: 406334

SEQ ID NO: 420709 - DNA, 687 bp, Staphylococcus aureus; identical to SEQ ID NO: 406335

SEQ ID NO: 420710 - DNA, 1233 bp, Staphylococcus aureus; identical to SEQ ID NO: 415155

SEQ ID NO: 420711 - DNA, 1050 bp, Staphylococcus aureus; identical to SEQ ID NO: 412712

SEQ ID NO: 420712 - DNA, 492 bp, Staphylococcus aureus; identical to SEQ ID NO: 415150

SEQ ID NO: 420713 - DNA, 921 bp, Staphylococcus aureus; identical to SEQ ID NO: 413340

SEQ ID NO: 420714 - DNA, 1383 bp, Staphylococcus aureus; identical to SEQ ID NO: 415143

SEQ ID NO: 420715 - DNA, 969 bp, Staphylococcus aureus; identical to SEQ ID NO: 415142

SEQ ID NO: 420716 - DNA, 1599 bp, Staphylococcus aureus; identical to SEQ ID NO: 415134

SEQ ID NO: 420717 - DNA, 1005 bp, Staphylococcus aureus; identical to SEQ ID NO: 417804

SEQ ID NO: 420718 - DNA, 336 bp, Staphylococcus aureus; identical to SEQ ID NO: 415131

SEQ ID NO: 420719 - DNA, 945 bp, Staphylococcus aureus; identical to SEQ ID NO: 415127

SEQ ID NO: 420720 - DNA, 384 bp, Staphylococcus aureus; identical to SEQ ID NO: 415125

SEQ ID NO: 420721 - DNA, 978 bp, Staphylococcus aureus; identical to SEQ ID NO: 415112

SEQ ID NO: 420722 - DNA, 2406 bp, Staphylococcus aureus; identical to SEQ ID NO: 413344

SEQ ID NO: 420723 - DNA, 1548 bp, Staphylococcus aureus; identical to SEQ ID NO: 414991

SEQ ID NO: 420724 - DNA, 267 bp, Staphylococcus aureus; identical to SEQ ID NO: 414968

SEQ ID NO: 420725 - DNA, 252 bp, Staphylococcus aureus; identical to SEQ ID NO: 404991

SEQ ID NO: 420726 - DNA, 363 bp, Staphylococcus aureus; identical to SEQ ID NO: 404989

SEQ ID NO: 420727 - DNA, 729 bp, Staphylococcus aureus; identical to SEQ ID NO: 404986

SEQ ID NO: 420728 - DNA, 660 bp, Staphylococcus aureus; identical to SEQ ID NO: 404967

SEQ ID NO: 420729 - DNA, 636 bp, Staphylococcus aureus
atgattgagttcctacatgaacatggtggacagttgatgtcgaaaacactggaacatttttatatttctatagtggcattattacttgccatcattgttgcagtacctataggcattttattatcaaaaacaaagcgaactgccaatattgtattaactgtggcaggtgtcttacaaactattccaacactagctgtacttggtattatgataccgatttttggtgttggtaaaacgcctgcaattgtagcgctatttatttatgtattattacctattttaaataacacggtactcggtgttcaaaatattgatagcaacattaaagaagctggaaaaagtatgggaatgacacaatttcaattgatgaaggatgttgaattgccgttagcattgccgcttatcattggtggcattcgtttgtcatctgtgtatgtaattagttgggctacacttgcaagttatgtaggtgcgggtggattaggtgatttcattttcaatggtttaaatttatatgatccactgatgattgtaactgcaacggtactcgttactgcactagcattaggtgttgatgccttattagctttagttgaaaaatgggtagttcccaaaggcttaaaagtatctggataa

SEQ ID NO: 420730 - DNA, 1188 bp, Staphylococcus aureus; identical to SEQ ID NO: 416042

SEQ ID NO: 420731 - DNA, 564 bp, Staphylococcus aureus
atgatttcggttaatgattttaaaacaggtttaacaatttctgttgataacgctatttggaaagttatagacttccaacatgtaaagcctggtaaaggttcagcattcgttcgttcaaaattacgtaatttaagaactggtgcaattcaagagaaaacgtttagagctggtgaaaaagttgaaccagcaatgattgaaaatcgtcgcatgcaatatttatatgctgacggagataatcatgtatttatggataatgaaagctttgaacaaacagaactttcaagtgattacttaaaagaagaattgaattacttaaaagaaggtatggaagtacaaattcaaacatacgaaggtgaaactatcggtgttgaattacctaaaactgttgaattaacagtaactgaaacagaacctggtattaaaggtgatactgcaactggtgccactaaatcggcaactgttgaaactggttatacattaaatgtacctttatttgtaaacgaaggtgacgttttaattatcaacactggtgatggggtatatatctacatatcatattgttga

SEQ ID NO: 420732 - DNA, 390 bp, Staphylococcus aureus
gtgcgtgtattgccccaatcttttttaagtaatgtgaatataaacaccgacgaaagtgcaataatgattagaggtttcaatatttgtgacggaaccatcgttgcaatatatgcgccacatgcagatgccaaaaatacaaaaccaaataatttggcaacaacaaataagtccactttaccggaccttataaactttatcatactagttaaagaaccaaatgaacttgccaatttatttgtacctaaagccacagatggtggtagaccgattgctaataatgctggcgtagaaattaaaccgccaccccctacaaccgaatctataaacgccgcgataaaaccaaataaaattatgattataatcatcgttaagttcaaatccatagtttaa

SEQ ID NO: 420733 - DNA, 237 bp, Staphylococcus aureus
ttggatacaccgaagaaacaacaatttgcctttaataatatacaaatgaacatgtcgaaatcagatgttgagaaaacattaaataaaccaaaaagagtgacatttaatgaatatggtacgaagtggtatacgtattatgatgacgattacaataattttataatgataagttacatgaaagataaagttaatgcgttatatacaaatcaaaatataatcacttacagagattgttaa

SEQ ID NO: 420734 - DNA, 315 bp, Staphylococcus aureus; identical to SEQ ID NO: 409251

SEQ ID NO: 420735 - DNA, 354 bp, Staphylococcus aureus; identical to SEQ ID NO: 414837

SEQ ID NO: 420736 - DNA, 378 bp, Staphylococcus aureus; identical to SEQ ID NO: 415006

SEQ ID NO: 420737 - DNA, 309 bp, Staphylococcus aureus; identical to SEQ ID NO: 411655

SEQ ID NO: 420738 - DNA, 651 bp, Staphylococcus aureus
atgaatacactgatagatgaatactctgctgttcattatcaatgtcaaaataatattaataaaacacaatctatagtttcgcatattaattacttaaatcaagaattaaaggatcaacaagaaatttttcaattggctgaaattgtcagtggtaagaataacaaaaatcttacattggaaaactttgtcttaatttactatttagatcaaattattgcccaagcaaatctgagattagcaacaatgtcagataatcgataccaactaattaggcgagaagcggtttctcatggtcttagtggcctagaaattgatgtatttgatttgcattcaaataagtctagacatattagctcgttatcaggtggagaaactttccaatcgtcgcttgcattagctttagggttaagcgaaattgtacagcagcaatcaggaggtatttcactagaatcaatatttattgatgaaggattcggtacattagatcaagaaacgcttgaaacagcgttagacactttattaaatcttaaatcaactggtagaatggttgggattatttcacatgtgagcgaattgaaaaatagaatacctttagttttagaagtgaaatcagatcaatatcagagttcaacaagattcaaaagaaattaa

SEQ ID NO: 420739 - DNA, 177 bp, Staphylococcus aureus
atgtacttgcaactgatagtattatatttagaagaggttcctaagtttatttctaatcttaaagagcgactgaactactcagttcatgtgagtacaggtaaaatgcctattattgccttagaaaaagaaaaagttcttacaatcactaccgaatgtgaatgtaagaaactcatataa

SEQ ID NO: 420740 - DNA, 870 bp, Staphylococcus aureus; identical to SEQ ID NO: 405540

SEQ ID NO: 420741 - DNA, 378 bp, Staphylococcus aureus; identical to SEQ ID NO: 410975

SEQ ID NO: 420742 - DNA, 180 bp, Staphylococcus aureus; identical to SEQ ID NO: 408994

SEQ ID NO: 420743 - DNA, 378 bp, Staphylococcus aureus; identical to SEQ ID NO: 414246

SEQ ID NO: 420744 - DNA, 1266 bp, Staphylococcus aureus; identical to SEQ ID NO: 407297

SEQ ID NO: 420745 - DNA, 141 bp, Staphylococcus aureus; identical to SEQ ID NO: 407391

SEQ ID NO: 420746 - DNA, 135 bp, Staphylococcus aureus; identical to SEQ ID NO: 407441

SEQ ID NO: 420747 - DNA, 357 bp, Staphylococcus aureus; identical to SEQ ID NO: 409083

SEQ ID NO: 420748 - DNA, 363 bp, Staphylococcus aureus; identical to SEQ ID NO: 409245

SEQ ID NO: 420749 - DNA, 618 bp, Staphylococcus aureus; identical to SEQ ID NO: 414889

SEQ ID NO: 420750 - DNA, 471 bp, Staphylococcus aureus; identical to SEQ ID NO: 406704

SEQ ID NO: 420751 - DNA, 870 bp, Staphylococcus aureus; identical to SEQ ID NO: 414891

SEQ ID NO: 420752 - DNA, 567 bp, Staphylococcus aureus; identical to SEQ ID NO: 406702

SEQ ID NO: 420753 - DNA, 243 bp, Staphylococcus aureus; identical to SEQ ID NO: 411711

SEQ ID NO: 420754 - DNA, 1359 bp, Staphylococcus aureus; identical to SEQ ID NO: 415687

SEQ ID NO: 420755 - DNA, 708 bp, Staphylococcus aureus; identical to SEQ ID NO: 405485

SEQ ID NO: 420756 - DNA, 741 bp, Staphylococcus aureus; identical to SEQ ID NO: 415689

SEQ ID NO: 420757 - DNA, 726 bp, Staphylococcus aureus; identical to SEQ ID NO: 408099

SEQ ID NO: 420758 - DNA, 600 bp, Staphylococcus aureus; identical to SEQ ID NO: 415691

SEQ ID NO: 420759 - DNA, 1431 bp, Staphylococcus aureus; identical to SEQ ID NO: 415692

SEQ ID NO: 420760 - DNA, 1239 bp, Staphylococcus aureus; identical to SEQ ID NO: 415693

SEQ ID NO: 420761 - DNA, 693 bp, Staphylococcus aureus
ttgaagaagttacagctaaagaagtggaaatgtcgtgaaaatgacattgaagctgtccataataataagggttatgcctatcaaagaaaattagatgcactcgaagaagtgagaaaaggctattacccaattaaacgtgcgattgacttagtattaagtatcgttttattatttttaacatttccgattatgttcatattcgccattgctatcgtcatagattcgccaggaaaccctatttatagtcaggttagagttgggaagatgggtaaattaattaaaatatacaaattacgttcgatgtgtaaaaacgcagagaaaaatggtgcgcaatgggctgataaagatgatgatcgtataacaaatgtcgggaagtttattcgtaaaacacgcattgatgaattaccacaactaattaatgttgttaaaggggaaatgagttttattggaccacgcccggaacgtccggaatttgtagaattatttagttcagaagtgataggtttcgagcaaagatgtcttgttacaccagggttaacaggacttgcgcaaattcaaggtggatatgacttaacaccgcaacaaaaactgaaatatgacatgaaatatatacataaaggtagtttaatgatggaactatatatatcaattagaacattgatggttgttattacaggggaaggctcaaggtag

SEQ ID NO: 420762 - DNA, 972 bp, Staphylococcus aureus; identical to SEQ ID NO: 415695

SEQ ID NO: 420763 - DNA, 777 bp, Staphylococcus aureus; identical to SEQ ID NO: 405494

SEQ ID NO: 420764 - DNA, 639 bp, Staphylococcus aureus
atggggaatagacatggaaaaaatgtagaaaaatcattcataaagataggtttatattttcaaatagcttatatagtactcatggctataactttatgtgggtttgtaatttgctatggactaattttcggccttttctatttattatcaggtagcagagctgattatttaatagtaacaatagttatatcggcaataatttctatatttgtaattatactttcaatcgtacctgtcatcgtattggcatctgacttatttaaagaaaggatttcaaaaggtgtcatattaattgtattggctattattgctttagtattatgcaactttgtatctgcaatactctggtttgtttcagccatatctattttaggtagaaaaaaattagtagctgcagcagatactaccactattcaaaaaagtaaagggaacgcaaatcaagcatcacataaagacacgtgtaaaaaggaacttgatagtcaagacatgatggaacatcctgaggttaaaaatcccacgactaaaaaccttgaaggatttaacgaagaaatacataaagatgaagctacaactaaagttgtcagtgataacacggaaccgccgattgaatcaaaaggccatgtctcgaaaaaagattga

SEQ ID NO: 420765 - DNA, 765 bp, Staphylococcus aureus; identical to SEQ ID NO: 415697

SEQ ID NO: 420766 - DNA, 1203 bp, Staphylococcus aureus; identical to SEQ ID NO: 415698

SEQ ID NO: 420767 - DNA, 780 bp, Staphylococcus aureus; identical to SEQ ID NO: 415699

SEQ ID NO: 420768 - DNA, 1779 bp, Staphylococcus aureus; identical to SEQ ID NO: 415700

SEQ ID NO: 420769 - DNA, 1737 bp, Staphylococcus aureus; identical to SEQ ID NO: 415701

SEQ ID NO: 420770 - DNA, 1173 bp, Staphylococcus aureus; identical to SEQ ID NO: 415702

SEQ ID NO: 420771 - DNA, 1755 bp, Staphylococcus aureus; identical to SEQ ID NO: 415703

SEQ ID NO: 420772 - DNA, 1011 bp, Staphylococcus aureus; identical to SEQ ID NO: 415704

SEQ ID NO: 420773 - DNA, 981 bp, Staphylococcus aureus
ttgattgaaaaaagtcaagcatgtcacgattcattgttagattctgtagggcaaacacctatggttcaacttcatcaactatttccgaaacatgaagtgtttgcaaagttagagtatatgaatcctggaggcagcatgaaagatcgacctgccaagtacatcattgaacatggtattaaacatggtttaatcactgagaatacacatttaattgaaagtacttctggtaatttaggcattgcgttggcaatgatagctaaaatcaagggattaaaactcacgtgtgttgttgatcctaaaatatcaccaacaaatttgaaaattattaaaagttatggtgccaatgtagaaatggttgaagaacctgatgcacatgggggttatttaatgactcgtattgcaaaggtgcaagaactgttagccactattgacgatgcatattggattaatcaatatgcgaatgagttaaattggcaatcccattatcatggtgcaggcacagagattgttgaaacaattaagcaacctatagattattttgtcgcgccagtcagcacgacaggtagcattatgggtatgagtagaaaaataaaagaagtgcatccaaacgcacaaattgttgctgttgatgcgaaagggtcagtcatttttggtgacaaacctattaatagagaattacctggtatcggtgctagtcgtgtacccgaaatattgaatagatcagaaattaatcaagtgatccatgtagatgattatcaatctgctttgggctgtcgaaaactgattgattatgaaggcatatttgccggaggttcaacaggctcgattattgcagcgattgagcagttgataacgtcaattgaagaaggtgcaacaattgtcacgattttaccagatcgaggcgatcgttacttagatttagtttattcagatacatggttagaaaaaatgaaatcaagacaaggagttaaatcagaatga

SEQ ID NO: 420774 - DNA, 993 bp, Staphylococcus aureus; identical to SEQ ID NO: 405506

SEQ ID NO: 420775 - DNA, 999 bp, Staphylococcus aureus; identical to SEQ ID NO: 412692

SEQ ID NO: 420776 - DNA, 753 bp, Staphylococcus aureus; identical to SEQ ID NO: 412691

SEQ ID NO: 420777 - DNA, 732 bp, Staphylococcus aureus; identical to SEQ ID NO: 415109

SEQ ID NO: 420778 - DNA, 255 bp, Staphylococcus aureus
atgaaacctgtaggcttaataggaaatagtggtggtattgttagttcagagccattgtcacatttaagagtaatcgtcagaagtttactaggcattgctgtaccaactcaaatagcaacacatgattctgattttgctaaaaatgaagatggttcatattacttaaatgatagtgaattccaattacgagcaagattatttgtcgatcaaattgtatcttttgtgaataatagtccatatgaacatttaaaataa

SEQ ID NO: 420779 - DNA, 297 bp, Staphylococcus aureus
gtgccatcattaagcatctttatagcgctgatagccattgcgccaaatgctacaaagccagcgccggctattgctaccgcaccacctaaagcaagtacaccgccagttaacactttgatagcgtttaatagcgcaaatactacaggtactacgctcgctattacaggtattaagatactaaaagatgaagttagtaatccaccaaccatattagaacctacagtaccgaacacacggaacatattagctaaattccccatctgtctttggaaattgtcgtttgcttttattatgtag

SEQ ID NO: 420780 - DNA, 303 bp, Staphylococcus aureus
ttgagatatgaagatagagttatttttcaattagaacaagtagcaacttacaatcctaaaactagcaaaaaagaaaacacactaatcacttatgatgcgataccatgcaatattaaccccatttctagagcaagaaagcaacttgaatttggtgatgtaaaaaacgatgtaagtgttctgaggataaaagaatcaatatcttaccctgttagccacgtgttggttaatggcattcgctacaagatagttgatacaaggatatacagacacgaaacgtcatattatatcgaagaggtcaattga

SEQ ID NO: 420781 - DNA, 297 bp, Staphylococcus aureus; identical to SEQ ID NO: 420779

SEQ ID NO: 420782 - DNA, 309 bp, Staphylococcus aureus
atggctaaatatacaggtaaagatagtgattatttatctaatgaaaaagtgtttaaagttttttatgagtctttaaaaggtaaaagggcatttgcatatggtggattatttaaagaagttagaaaaaagcttaaaaatggcgatttagattatttaaaagaggttgatccaacaaaatacatatatcaaattttttgtggttggaatcaaatgcattattatgcgagtgaattgagattgatgagtgaagaaatgcaaaaagaagtgaatcatcaaatgataaatgaattagatgataaatatttataa

SEQ ID NO: 420783 - DNA, 345 bp, Staphylococcus aureus; identical to SEQ ID NO: 407271

SEQ ID NO: 420784 - DNA, 231 bp, Staphylococcus aureus
atgtttgaaaaattcgacagaatagaagatagtcttagagcgcaagaaaagatttatgacaaattagatagaaattttgaagaattaaagcgcgacaaggtagaagatgaaaagaataaagaaaagaatgccaagaatattagagacataaaaatgtggattctaggtttgatagggactatcttcagtacgattgtcatagctttactaagaactgtttttggtatttaa

SEQ ID NO: 420785 - DNA, 231 bp, Staphylococcus aureus
atgtttgaaaaattcgacagaatagaagacagtctgagaacgcaagaaaaaatttatgacaagttagatagaaatttcgaagaactaaggcgtgacaaagaagaagatgaaaaaaataaagagaaaaatgctaaaaatattagagacatcaagatgtggattctaggattaatagggacgattctaagtacatttgttatagccttgttaaaaactatttttggcatttaa

SEQ ID NO: 420786 - DNA, 210 bp, Staphylococcus aureus
atgttaaatgaatatgataaaaatatgataaatgaaatcattaattcgtttttagttactaaattatcgcaagaacaagtagatttaaacgaagatattgaacagctacaaaaagattttaatgatttcagaaaagaatctatgttaaataaaaaacaattaaaaatgtttgctattcacaacaacatccaatcacttaaagataaataa

SEQ ID NO: 420787 - DNA, 261 bp, Staphylococcus aureus
ttgtttgaggagttaagagatttatttaaagaagaagatctagaaccatggacatcatgcgaatttgattttacaagagaaggtgaattaaaagtttcatttgattatattgattggataaattcagaatttggtcaagtaggtcgacaaaattactataagtatagaaaatttggaattttaccagaaacggaatatgaaattaataaagttaaagaaatcgagcaatatattaaagagcaagatgaagctgaactatag

SEQ ID NO: 420788 - DNA, 147 bp, Staphylococcus aureus; identical to SEQ ID NO: 407426

SEQ ID NO: 420789 - DNA, 147 bp, Staphylococcus aureus; identical to SEQ ID NO: 407426

SEQ ID NO: 420790 - DNA, 135 bp, Staphylococcus aureus; identical to SEQ ID NO: 409295

SEQ ID NO: 420791 - DNA, 252 bp, Staphylococcus aureus; identical to SEQ ID NO: 409273

SEQ ID NO: 420792 - DNA, 159 bp, Staphylococcus aureus; identical to SEQ ID NO: 420634

SEQ ID NO: 420793 - DNA, 2043 bp, Staphylococcus aureus
ttggaaatatttgaaacaattcttatatttatagctgttgtgatactaagttcgtttgtccatactttcatacctaaagtacccctagcatttatacaaattttcttgggcatgttactatttattaccccaatccctgttcaatttaattttgattctgaattgtttatggtaacaatgattgcgcctttgttatttgtagaaggtgttaatgtttctagagtccatttaaggaaatatattaagccagtgatgatgatggcattaggattagtcattactactgtgataggtgtaggtttatttattcattggatttggccagatttacctattggagcagcatttgcaattgctgccattctttgtcctactgatgcagtagcagtgcaagcaatcactaaaggaaaggtcttgccaaaaggagcaatgacaattcttgaaggtgagtcattattgaatgatgctgctggtattatttcatttaaaatagctgttggagtattagttacaggtgctttttcacttgttgatgctgttcagttgtttttaattgcatcaattggtggcgcagtggttggtttacttataggtatggcattagtaaggttccgattaacattgatgcgtcgaggatatgaaaacattaatatgtttacaattattcaattgttaacaccatttgttacgtatttaattgctgaattgtttcacgcatcaggaatcattgcagcagtagttgcaggacttgtacatggtttcgaacgtgacagaattatgcaagtacgtacacaactgcaaatgagttacaatcatacatggaatatactaggttatgttttaaatggctttgttttttcaatattaggatttttagtacctgaagttattattaaaattatcaaaacagaaccgcacaatttaatctttttaataggcatcactattgttgttgctttagctgtctatctatttagatttgtttgggtttatgtcttatatccttatttttatttagccatcagtccattccaaaaaatgatgactaaaaatgatgatgataatccaacgactgagaaaccaccaaagcgaagtttatacgctttaattatgacgttatgtggtgtgcatggaacaatttctttagcaatcgcattaacgttaccttattttttagcagggcatcatgcttttacgtatagaaacgacttattatttattgcatctggtatggttattattagtttggtagttgcgcaagtattattgccattattaacgaaacctgcacctaaaacagtaattggcaatatgtcgtttaaagttgctagaatttatatattagaacaagttattgattatctaaatcaaaaatctactttcgaaacaagttttaaatatggtaacgtgattaaagaatatcatgataaattagcatttttaaaaactgtagagaaagatgatgaaaactctaaagaattagaacgtctacaaaaaattgcttttaatgtagaaacaaaaacattagagtctttagtagatgaaggacaaataacgaatagtgtacttgaaaactatatgcgttatgctgaaagaacacaggtatatagacaagcatcattaataagaagaatgattgtattattacgaggtgctttattaaaacgaagagtacaaacgagagtgaactccgcatcttcacttagtgttacggataacttaatggaattaaataaaattaataaattagtccattataatgtggttagtcgtttgtctaaggaaacaacaaaagataatacacttgaaattggaatggtttgtgacggttatttaatgcgaattgaaaacttaacaccatcaaatttcttcaactcagcaagtgaagatacgattactaaaattaaattaaatgcattgagagaacaacgtcgcattttacgtgagttgattgatacagatgaagtatcagaaggtacagcgttaaaactaagagaagccatcaattatgatgaaatggttattgtagatagtatgacgtag

SEQ ID NO: 420794 - DNA, 696 bp, Staphylococcus aureus; identical to SEQ ID NO: 408053

SEQ ID NO: 420795 - DNA, 486 bp, Staphylococcus aureus
atgatgtttagtaataatgacaattccactagtaatcaatcatcaaaaacgcaattaactcaaaaagatgaaaataaaaatgaagataagcctgaggaaaaatcagaaacagctacagatgaggatttacaatcaaccgaagaagtacccgcaaatgaaaatactgaaaataatcaacatgaaattgatgaaataacaacaaaagatcaatcagatgatgaaattaacacaccaaacgttgcagaagataaatcacaagacgacttgaaagatgatttaaaagaaaagcaacaatcaagtaaccatcatcaatccacgcaacctaagacctcaccatcaactgaaacaaacaggcaacaatcatttgctaattgtaagcaacttagacaagtttatccgaatggtgtcactgccgatcatccagcatatcgtccacatttagatagagataaagataatcgtgcatgtgaacctgataaaaattaa

SEQ ID NO: 420796 - DNA, 243 bp, Staphylococcus aureus; identical to SEQ ID NO: 411711

SEQ ID NO: 420797 - DNA, 357 bp, Staphylococcus aureus; identical to SEQ ID NO: 409083

SEQ ID NO: 420798 - DNA, 189 bp, Staphylococcus aureus
atgcaaaaaaaacgaaaaaagtttataaaaagggttgattcgtacgctatgccgtactataataaggtataccagttgagaggaggcaagaaagtgttagattttattgagagaataacaaatatcgccttaacagtggtgtcgacaatggtcctcgtcaaatcactgaaaggcgataaagaaaagtaa

SEQ ID NO: 420799 - DNA, 243 bp, Staphylococcus aureus; identical to SEQ ID NO: 411711

SEQ ID NO: 420800 - DNA, 387 bp, Staphylococcus aureus
atgagagcagcagttgtaacgaaagatcacaaagtaagtattgaggacaaaaagttaagagctttaaaacctggtgaagcattggtacaaacggaatattgtggtgtttgtcataccgatttacatgttaagaatgctgattttggtgatgttacaggcgttactttaggtcatgaaggtattggtaaagtcatcgaagttgcagaagatgtagaatcattaaaaattggagaccgtgtgtctatcgcttggatgttcgaaagctgtggaagatgtgaatattgtacaacaggtcgtgaaacactttgccgtagtgtgaaaaatgctggttatacagtagatggtgcaatggctgaacaagttattgttactgcagactatgcttga

SEQ ID NO: 420801 - DNA, 141 bp, Staphylococcus aureus
atgactggacacaaacagctaaataaaatcaagatgcttgcagtgattttaacaattaatgttagattgtcactgcatttttttaatgcattcgttattattcagaatgatcaaatttatttacctaccttccgtgactag

SEQ ID NO: 420802 - DNA, 243 bp, Staphylococcus aureus; identical to SEQ ID NO: 411711

SEQ ID NO: 420803 - DNA, 225 bp, Staphylococcus aureus
gtggctggtactagcggttttgcgacttttgcaaaaaaagctggttatgctggtgtgttagcttcgagtttatatattgctaatttaggtgttcagaataatactacgatttacaaaaatgctgcaagaaaaggtacgggtgtgcaagttagttatgatttatatgttcctaaaacaggacataattatggattaacacgtaatacaaaagttgtatataaataa

SEQ ID NO: 420804 - DNA, 420 bp, Staphylococcus aureus
atgatttcacacttgataacggatacttcgaagaagatacatcagacagtgattcagactcagacagtgattcagactcagacagcgactcagattcagacagtgattcagactcagatagcgattcagattcagacagcgactcagattcagacagtgactcagactcagatagcgactcagactcagacagtgactcagactcagacagcgattcagattcagatagcgactcagattcggacagtgattcagactcagatagcgactcagattcagacagcgactcagactcagatagcgactcagattcggacagcgactcagactcagatagcgactcagactcagacagtgattcagactcagatagcgattcggactcggatgcaggaaaacatacacctgttaaaccaatga

SEQ ID NO: 420805 - DNA, 528 bp, Staphylococcus aureus
atggcagaattacaaagaggtttagaaggggttatcgcagcggagactaaaataagttcaattattgaaagtcaattgacttatgccggctatgatattgatgatctagctgaaaatgcgcaatttgaagaagttattttcctattatggaactatagattgccaaacgaagaagagcttgctcatctaaaagggaaattaaatcaatacatgacattaaatcctcgtgtgtatacacattttgaggagtatgttacagatcacgtgcatccaatgacagcattacgtacgtcattatcatatattgcacatttcgatcctgatgctgaaaatgaatcagatgaaaatcgttatgaaagagcaatgcgtatacaggctaaagtagcatcattagttacagcgtttgctcgagtaagacaagataaagaaccacttaagcctaatcctgacttaagttatgcggcaaacttcctatatatgttacgtggggaatttaccaacagatatagaagtagaagccttcaataa

SEQ ID NO: 420806 - DNA, 975 bp, Staphylococcus aureus
atgattaatgctataaaagcatttaatactcaaacaaaattttttaaaggtaataaaattattgcgattgggcaaattagtgacttaggtaagcactctaaatcattgcatttgcaattagttgatgttctagaaaatagtaatgcagattatattctatgtatggatgatgctttaaagagtgtcgttacaggagtaaaaagcaaaaatataacatggtattctaatagacatctattagaaaaagatttattgtacctaaataaaccagattcattaactctattaaaatcatcagcaggtggtacagaatttccaaaattagcaaaagaattacctgagaaattaaataaatataatattaataattcgaacacttctttatttgatggtcaatccttgaacggtcgcagttatatgattattgatgaaaattataatgtcattgaatctcataacagagaacattcaggtacaattgaaggcttaggccctatctttaattatttaaaagctatagatgataatgtatcagaagatactatttttattgctaactgggcaacaaataacaaactttattatgaaggaaaagaaacgacaacttacgaattgatgaaagccatgcttaattcacctatgtatacaccttcttatgaattatctaagtatttatttgaaaacggtccaaagcgcgatgaatatatcaattcaaaaatagaacatttaagtctttcaaattctgtagcaataaatttaactggacgtcatactatgagagaacgacaaaacttcactgttgacgacttatttaaaattttaaaagcatataaaaataccctatttaaatttactaacgaaataattattggcaggaaatataatagcggtattataaaagataaagataaatttattatatttacctcttacccaaacttaaatgaaattaaaaataaactaaataataaataa

SEQ ID NO: 420807 - DNA, 414 bp, Staphylococcus aureus
atgccaactattaaccaattagtacgtaaaccaagacaaagcaaaatcaaaaaatcagattctccagctttaaataaaggtttcaacagtaaaaagaaaaaatttactgacttaaactcaccacaaaaacgtggtgtatgtactcgtgtaggtacaatgacacctagaaaacctaactcagcgttacgtaaatatgcacgtgtgcgtttatcaaacaacatcgaaattaacgcatacatccctggtatcggacataacttacaagaacacagtgttgtacttgtacgtggtggacgtgtaagagacttaccaggtgtgcgttaccatattgtacgtggagcacttgatacttcaggtgttgacggacgtagacaaggtcgttcattatacggaactaagaaacctaaaaactaa

SEQ ID NO: 420808 - DNA, 264 bp, Staphylococcus aureus
atgcaagacacaatctttcttaaaggtatgcgcttttatggatatcatggtgctttatcagctgaaaatgaaatagggcaaattttcaaagtggatgtaactttgaaagtagacttagctgaagctgggcgtactgataatgttattgatacagttcattatggtgaagtgttcgaagaggtttcgctaaaactagaaatgaagaagccgaagttatggcaagactggatgaacttgttgcaacagaatatccagttttattag

SEQ ID NO: 420809 - DNA, 423 bp, Staphylococcus aureus; identical to SEQ ID NO: 404927

SEQ ID NO: 420810 - DNA, 753 bp, Staphylococcus aureus; identical to SEQ ID NO: 412691

SEQ ID NO: 420811 - DNA, 999 bp, Staphylococcus aureus; identical to SEQ ID NO: 405508

SEQ ID NO: 420812 - DNA, 996 bp, Staphylococcus aureus; identical to SEQ ID NO: 405507

SEQ ID NO: 420813 - DNA, 993 bp, Staphylococcus aureus; identical to SEQ ID NO: 405506

SEQ ID NO: 420814 - DNA, 981 bp, Staphylococcus aureus; identical to SEQ ID NO: 405505

SEQ ID NO: 420815 - DNA, 300 bp, Staphylococcus aureus
atggatgtgcataaagaagtctttattaaagctgacaaagtcgtagtagatgactggtcacaatgtaatcgagaaaagaaaactattaaccaattggtgttagaaggtaaattcagcaaagaagctcttcatgctgaactaggacaacttgtgacaggtgacataccaggacgtgaagacgatgatgagatcatattacttaatccgatgggtatggctatcgaagatatttcaagtgcttattttatttatcaacaggcacaacaacaaaatattgggacaacattgaacctatattaa

SEQ ID NO: 420816 - DNA, 156 bp, Staphylococcus aureus; identical to SEQ ID NO: 409125

SEQ ID NO: 420817 - DNA, 2964 bp, Staphylococcus aureus
atgatattttatacggttgactataaccacgttcaatctgaacttaactttaagtttatgaagcatataaatgatgttggaatacctgttgtgtttatcattaatcaaattgacaagcatcaagacgatgaattgtcattctctacgtttaaatctcgagttgaaaaatcaattgcagattggggtattaaattagaacgcaccttttatgtatctaaatttgatcaccctgaaaatgaacttgaagtattatcaagttatctaatttcattagatcaacatagagagacaatagaggattatacatcaagaacggttgaatacattaccgaagctcagctagattacattcagtctgaaattcaggaagtactagaagatttaggtatcgaagaagcggagtttgaacaagcatttttaaatagtcaacaacatcaagcaattagtgaagaggcacaacttttaaataatccagatgaattaatggcatttttaaagaataagcgtaaaaatattttagaaaatgcatacattatgccgcataatatgagagaaatgttacgaagttatttggaaagtatgtctcaagactttaatgttggcggattttttaataaaaagaagaaaaaactacaaattcaacaacagcgattattaacagcgacagatgcgttacaagaacatgttaatcaacaaattcgtcaaccaatgcgagaagatatgtcatttgttacgcgttttatcaataaaaaagaagcttcagataaagtattaaatcagcattatgacgttaagccagaaatgattgaaggtttatatcaaccacaaacatcaatcagcaatacttatgtacttacattttcagacgaagtggttaaagccattaagaaatatgttgaacaacaatcaacaccaatttttaaagaaataatagaaaatgtgcaggcagatgaattaccaacagaagaaagtgatgatttaaaagaatatcaacgttatacagaattaaatgagctgcgtcagtcattgacgactaagaattatcgtcactactatattcatttagatgaatctctagataaattaataggtcgacaagagacaacatatcaagtggctactgataatgctcaggataatcgtgataatcagcagctaaatcaaaatacagctacaacaaatatgtctatagatattcaaaaagcgcttgatataatttcggatgtgcctttgttcaagcgtacaaagcaagatatccacgaaacattaacacgtatagataataaattaataaaaataggtgtatttggaacatttagtgctggtaaaagtagtttgataaatgcattattaggcgagcatattttagtcagttctccaaatcctactacagcagctactacagaaatatcttatggagacgagagttatataacgctaaaatcacaatcgcaattattagatgaaattaatgcagtagttgaataccaagatatgtcttattcgactatagaagactttattaattcagatttagaaaagttaaaatcacatttaaataaaaatcaactcgcttttattcaggcagttgaaaaacattataaattgtatgtcaatatgttggaaaatggagaaaaacatgccattaatcaacaggaattgaaaaagtggagtgcagaagatgaatatgcaacatttgttaagacagtacacattgcattaatgcatgattggttaaaaggtaaaataattgttgattcattagggctacactcaaataaccaaaggcatacaaatgaaaccgaacaaattttaacttcttcagacttaatattgtatgtaagttattttaatcattcatttactgataatgacaaagcgtttatagaacacatgaaagatatgaaccagttgaatgaaaaccaagcatttaaaatggtaattaatgctgctgatttagcagaaagtcaagatgatcttgaagcagttgaaacatatgtatcagatgcattaagacaagtacacttacaatcagacatttttgctgtatcaagtcgaaatgcattgcaagctgaagataagggcattgatcaattaaaacaaagcatacaacaatttgttgatgttgaatctaaatcaattttagaacaacaaatgattcatcagcttcaacaaatggatcgttcttatgtagagatgattacagaatttgaaacaaataaagctgatatttcacgtcgccaacaaaggttaacagattataaagataaacagcgtttacaacatcaattaattgatgcgacgttacaacatacagacaacgaagttgaagaacaagtttatcatttaaatgcccgtttaaaactacaactacttgacgatgttaaatcagtgtttaattctcaaatgacgcaaaatagtgattttaatgaagaaaagaaagtgtctacgagagtatacttagatcaaattcatcaacgattgtttttagagcaatctttaattacagaacgtataaaaaaatactttaataagcaactcactgagcaaattgcaccaatcgttcaacaattagcagatttacatgtcattattaatcctcagtttaactttgaatcagctaatatagagcaaccattattgcacatcgatttcaacgatatgctaaatgcattgcctaaacaattaacaaaacgtaaaattttgaatccaaatgggcaaagagatatacatgaatcaatttgtcaaagtacgttaggattattacaaccacaaatgggattattgaggcaacagcttgaattatatgtaaagcaaatggctgtagaagctgaatcgcaatttgaaagttttgaagctaatattcaaacgcaaataaacgatttattagcatttgatttagatacaacacttatcaatcaattgaaagataaacatcaacaactgaaaactattttatattaa

SEQ ID NO: 420818 - DNA, 213 bp, Staphylococcus aureus
atgatgcgctacgtaatgaaaaagaaaaatgttgattcattaccaacacttatcaatcaagctattgagcaaaatatcaaattaatcgcttgtacgatgagtatggatgtcatgggtattcagaaagaagaacttagagatgaagttgagtacggtggtgtaggcacttatattggtgctactgaaaatgcgaatcataatttatttatctaa

SEQ ID NO: 420819 - DNA, 402 bp, Staphylococcus aureus
gtgattaacgaagcttattttcgtacaccttcaacaactgattacaacggcgtttatcaaggttattatattgattttgaagcaaaggaaactaaaaacaagacgtcctttcctttaaataatattcatgaccatcaagtcgaacatatgaaaaatgcatatcaacaaaaaggtattgtgtttttaatgattcgttttaaaacgctagatgaagtttatcttttaccctattcaaaattcgaagtattttggaagagatataaagataatattaaaaagtctataacagttgatgaaatacgaaaaaatggttaccatattccttatcagtatcaaccaagattagactatctaaaagcagttgataagttgatattagatgaaagtgaggaccgcgtatga

SEQ ID NO: 420820 - DNA, 369 bp, Staphylococcus aureus
gtgccaaatgttgtggcagcatcaagccctgttgtatatgcacatgatgaagcatggcatcgtcttaaatattacgttgtagtaaatcacttaggacatttagtatcaactattggtaaagcgactagaaatgaagttgtgttatggcaacttgtagcgcatcgtcttatgacttggaaaaaagaatacgcgaataacgcagtatttgttgactgtgtagaagatttatatcaaacgccgaccattgcggctaaagcgaatttgatgagtaaattgaatgattgtggtgcaaaccctatttatacacatataccaaatccaatttgtcataacaaggaggtatcgtattgtgaatcaaacaattcttaa

SEQ ID NO: 420821 - DNA, 165 bp, Staphylococcus aureus
atggcaatgaatgaaattgctttatttaaaggcgtacgtatacagccttatcagaagtatattgattttatgtttgcaagtgtattagcatttattttttggtatatcgtatatatattttgtttattgattataaatcagttaataaaaaattggatatattga

SEQ ID NO: 420822 - DNA, 423 bp, Staphylococcus aureus
atgtatggttttggttctgaaagtaaaaaattaaatgaattgatacaaaaatatggattggaaaatcatgtttacttacgcggctttttaagcaatctagaccaagaatatagcgatgcctatttgagtttaataacaagtaacatggaaggtttctctttagcgctacttgaatctttagcacatggtgttccagttattagttatgatattaaatatggacctaacgaactgattacttcagatttcaatggttatttaattactaaaaatgatgaagatgccctatttgataaagtaaaatatgtgattgatcatcctgaagtacagcaacgactgtcaaaaggtagtttggcaaaagcacaacaatatagtaaagcgtcgttaattaaacaatgggaccaatttgttcgtcttatataa

SEQ ID NO: 420823 - DNA, 360 bp, Staphylococcus aureus
atgacaatagtattctcaaaattaattgacgtatttgatgaattcatgtatcccactttcttttcatacgaagcaatagtgggtgagaaaactaaaatatttataactttattcgcatattatgatgaaaatagtaggaaagactatttttttaatgtgccagtaaataaaaagaaatatgaacaacttataaatggtgaaattgaaattaggtctttgtttgtaaacaataaagatggtttttttacagaaggttcacctgaaagtgtagcaattatagaacctatacatttaaacgttaacactgtcgattatttaccagaaaaaatttattcatggtatatgatgatgaatttttga

SEQ ID NO: 420824 - DNA, 129 bp, Staphylococcus aureus
atgggcagaaaaccaaaattaaactacgaagaacaaattaaaaagttaaaatcactaggtattttatttaacgaaataaatgaaaacaaagctaaagagatactgaaaaacaacacatactttttttaa

SEQ ID NO: 420825 - DNA, 405 bp, Staphylococcus aureus; identical to SEQ ID NO: 412910

SEQ ID NO: 420826 - DNA, 225 bp, Staphylococcus aureus; identical to SEQ ID NO: 410351

SEQ ID NO: 420827 - DNA, 366 bp, Staphylococcus aureus
atgaatggtgcaacagctgaaatgccacatgctatagcagcagtttatatttcaatttctcttgtctttggcaaaagcatgataaattgggcagatgatagatttagatattatgtgatgaagcaaggttccaaaccttataaacttgacggtttagcttactctaaaaactatgctaaaagttggttgaaacatttactgtcttacattataggtactgggattttacatttaattgtttatttaattaatgataaaagtcgtacagaagctatggatggtgttattcatatttggacaattgttattattatagacttaattatttgtatttcatattttgtgtggcctccaaaaagaaattaa

SEQ ID NO: 420828 - DNA, 1194 bp, Staphylococcus aureus
atggttaaagacccaataaaaaaagcaaagaatggaacctattattttcgtgcaaatctaggttatgattctaaagggaaaaaaattcaaaaatatcgtagtggattcactactaaaaaagaagcaagagaagaatattcgaaactgctattgatgaaaccagaagaattaagtgagaataaggataaaatgacgtttaaacattatatctttgaaattttccttccatggtataagacacaggtaaagctcagaacatatgaaaatcgcttaccaactattaagaagcatttctcttattttgataaaatggctgtttccgatattgagcctattgatgtgcaaaattggcaactaaaattatcaaagaagtgtaagtcttcttatgtaagagctgttcaaggactattttcagttgctatggatcgagcaattgtccttgggataaccaccacaaatccatctaagattattggcaatgtgaaaaagcaaaagtctaaaattgaattttggacaaaagaagaatttgaaaaagtaatctctctaatttacaaagaagattactatcaacactttttatttatctctctgtggtttttatttatgactggaatgcgaattggtgaagctactgccattcaatgggaagatattgattttgactcaggagtactaaccatcaacaaaacactctattacaagaatcaatcgaattatagatttgttgaaccaaaaacaaaggcgagcgttcgtcatattgtattagataaatgcacattaacttatttatccgaatggaaggaagtacaacaaaatctaattcagacagactttgtaatgagctataacggtattcctacccaaaaacatacactatcatatgctattgaacgctatgctaagctggctggtatccatcgaatcagaatccatgggttacggcattctcatgcttccttgttaatcagtatgggagaaaatccacttatcattaaagatcgtctaggacacgaagatattgagacgactttaggaacgtatggacatctttatcctaacagtaatttcgaggtagctaacaaattaaatggagccatttcctttaaagaagcaaaacaaaattatgatacttcaccaaagaatcaatttactgtagactacttgcgaaacaaagaaatgaaaaaagtgcaataa

SEQ ID NO: 420829 - DNA, 201 bp, Staphylococcus aureus
atgataacggtcacaaaaaaggatttagttgagctaggatatggaacttctttttcagcagacatcataaaaaaagcaaaagaattgatgattacaaaagggcatatctactatcaatctcgaaagctagatagagtccctcgtgaagctgttgaagaaattctaggaattcggttttcaaatgaaaacaggtctgagtag

SEQ ID NO: 420830 - DNA, 231 bp, Staphylococcus aureus
atgaaaacagcttatccaagggttcccttccccctcattgtaaaggcgacagatggcgacgtggaagcaattaatcagattgttaaacattatcgagggtatacctcaaaacgttcattacgtcgcatgacagacgaatatggaaattctcatatggttattgatgaaaccctacgtggcagaatggaaacgaaactcatctctaagattttatcgttcgaaattaaatag

SEQ ID NO: 420831 - DNA, 423 bp, Staphylococcus aureus
atgaaaccatcttcttttcaagaaaccatagaaaatcagtttgactatatctgcaaacaagttattgaagatgaacgaaaagattacttcaaacatctagacagactatcagcaaaagaagtctcgttttctgatatagataactaccttgtcaactctttttctactgttgatacgtacgtcactgatttccaactatttaaattatttggattaagaatcaatgttgaaagtgatttattaagtgaagccctgcgtcatctttcagagaaaaaacggaacattattttacttcattactttatggatatgagtgatgtggagattgcggagttactaaatttgaatcgttcgactgtttatcgtcatcgaataagtggactagccatgattaaagaattcatgaaggagtgtaaagaatga

SEQ ID NO: 420832 - DNA, 354 bp, Staphylococcus aureus
atgcgtaaaaaagaagataaatacgattttagagccgttggtttagcgattaaagaggctcgaatgaaacggggtctcactcgtgaacaagtgggaacaatgattgaaattgacccacgttatttaacaaatatagaaaacaaaggacaacacccaagtacacaagtgctgtatgatcttgtatcattactccatgtatctattgatgaatttttcttacctacagataatttgattaaaagcactcgaaggttacaggtagaaaaatacatggatagctttacagacaaagaactatccttaatggaagcactagcaaaaggtatcaatgaagcaagaaatattgaaggctag

SEQ ID NO: 420833 - DNA, 930 bp, Staphylococcus aureus
atgattataaaaatcgagcgaaaagaaaagaaggagaaaccaaagaaatctaaaaaaccgagcaagcaaagaaaagttccgatgattaaagttggcacgcataagaaattaacctttgttttatgggttttattgattggtagtgtcggatttggaatctataaaaattttactgccattgacactcatactgtccgtgaaacagaaatcattaaacagcagattgtcgataccaaccaagtagaaagttttgtgaaatcctttgcgaaagactacttttcgtggcaacaatcccaagaagccattgataaacgaaatgaaaaattgacccattatttgacggaagaattgcaggtattaaatgaagaaatgattcgtaaggatattcctactagttctagtgtgaacgatatacaggtgtggcaggtttctcaagtgaatgagaacacctttgaggtactgttttctgttgaacaagttattaccgaagacaaagacaaggaaactatatcgtctagctttcatgtggttgtccatatagatgaatcagataatatggttattatcaaaaatccgacaatgagtaagaaacctcaaaaatcggactaccaacccaaacagctagaaagtgaccatacagtagatacagaaacgatggacgaaatcactagctttttagaaacgttcttccagctctatcctaccgccacagaaaaagaattgacttactatgtaagtaatcatgtgttacctatgattaacaaggaatatgttttcgaggaattggtgaatcctatctttaccagaaaagataaccaagtaatcgtgaatgtcgctgtgaaatatttagatcaagaaacaaaggcaacccaaatctcgcaatttgagttgatattagaaaaacaagataattggaagattgtaaaataa

SEQ ID NO: 420834 - DNA, 1023 bp, Staphylococcus aureus
atgaagctaaaaataacagtgatttgtagtgtggtcttctctctcttcttttttctcttattattcctagtcattttctttgcagatgatacggacagtggcgaaaacaacaaggattcttctattccacaaggcggtgtgaccgtttcaccagaagtgttggcacaccgtccgttgattgaaaaatatggtaaggaatatgggattgaagactatgtttcttatatcttagccattatgcaagtggaatcgggcggtacagcagaagatgttatgcaaagttccgaatctttgggtttaccgcccaacagtttgagtaccgaagagtccatcaaacaaggggttaaatatttcagtgaattattaaccagtgcagaacaacaaggagtggatatagattctgttatccaatcttataattatggcggtggctttttaaattatgtgaggagtcatgggaaaaaatatacctatgaattagccgaacagttttctaaagagaagtcgggtggtcaaaaagcagactatcccaatcccatagccatacctgtgaatggtggttggcgatataactatggaaatcagttttatgttcagttggtttcacaatacctaaccgacacttccccaacagaatttgatgatgaaaccgtgcaagtcattatggacgaagccttgaaatacgaagggtttccctatgtctttggaggggcgtcgcctaccacctcttttgattgtagtggcttaatacaatgggtgtatgacaaagctggcatttctctccctcgtgtcgcccaagatcagtatgacgctacgcaagaaatctctatggaagaagcccaagcaggcgaccttatcttctttcattcaacctataatgcaggcacatatgtgactcatgtggcgatatatttagagggaaatcgcttttatcatgcaggcgacccaatcggttatggcgacttaagcagtcgttattggcaagaccatctgattggggctagacgtgttattcataactaa

SEQ ID NO: 420835 - DNA, 2028 bp, Staphylococcus aureus
atgacacaaaaacaaaagaaatttcttcactatagttggataacgctcctttgtgtgggcgttattttacttttattaggcacgctgggcaatgcagtacaagcgacaggcttagttgatgaaaccattgatacaagcaatgaatactccaagtatggtttgaatcaatatcagcttgattattatgtggacaatagctggggctggcttccatggaattggagtgatggcataggacaatcggtgatgtatggattgtatgccattactaattttatttggacaatttctctttatctatcgaacgccacaggttatttggtgaaagaagcctatgccttagatttcattagtcaaacatcccaagcaattggcgaaaacatgcagacgattgcaggcattacaccgaatggcttttccagttcagggttttatgtcggtttcctccttctttttattctcattgttggaatctatgttgcctatacaggattggttaagcgagaaacgacgaaagtgatacgagctgttttaaactttgtcgtggtgtttattctatcggcttcctttattgcgtatgcacccgattatattgcgaaaatcaatgatttttccaaagatgtcagtaccgccagtctgaatattgggacaaaaattgttcttcctaacacggatagtcaagggaaagacagtgtggacatgatacgtgacagcttattctctgttcaagtaaagcaaccatggctattgcttcaatatggctccactgatgtagaagcgttaggggaagaacgtgtggaaagtttattgtctaccagtccagatacaaacaatggtgaagatagagaaaatgtagtgattgaagaaattgaagatcatgacaatacctatttaaccctaccgaagacgatttccagattaggaacagtcttctttttgtttgtattcaatattggtatctcgatttttgttttccttctaacaggaatcatgattttttcgcaagtgctatttattattttcgctatgtttttgccaatcagtttcctattaagtatgttgccgagttttgatggcatgggcaggcatgccattaccaagttatttaatgtgattatgacaagggctggtattaccttgattattaccgttgcctttagtatttccactatgctttattcgctgtcagcaagttctccctttttcatgattatgtttttacaaattgtgacctttgcagggatttattttaaactgggcgatttaatgagcctattctctttacaaagcaacgactctcaaaacatgggcagacaagtgtttcgcagacctcgtcaaatgatgaatcgacaaaccagaagatttcaacgcagtatgagtaagatttttcgtggaaaagcagggtcaacgaagcaaaagacaatgacaacaaagcagaatcaaaccaataaagctaaccatactcgtcaaaatgaacggactacaccaaagaaagaaacagcactttccaatgtgaaaaagcaacaaggcggtatcgggcaacgattaggtgaaaagacagcccatgtattggacacgaaaaatcgtctagtcaataaaagaaagcaggcaaaacaacagatacaggcgacaccaacccatgtcaaatatgcccttcatcaaggaaaagagaatgtcactcataatgtaacagactttaaacaatctatggcagataccaaagctcaacgcaaacaacagcgtatgaaccagcaggagcaaaaacgaaagaacattgctcaaaagcgtttggagctggataaagcaaaagaaaaaagacgaaaagaaaacccatcatctcctgttcagaataaccagcagcatgttcgcaagcgtcagcaaaccgtcacgcctgttttgtcacaaaacactaaacgtgaaaatcatcagcgaccattgaaaaaagagcaaaaacaaaagacaccaccgaagcaattcaatcagaggaagctaaataaaagaacggataagcgaggacaacaaacatga

SEQ ID NO: 420836 - DNA, 2454 bp, Staphylococcus aureus
atggcatatccgattaaatatatggaagataatctcgtatttaatcatgatggcgaagtattcgcttattatgaattaattccctataattacagttttttaagttccgatgaaaaaattcaagttcatgataatttctgtcaattgattgcccaaaatcgtgatggcaagattcatgctctgcaactagcaaccgaatcaagtattcgagccacacaggaacaatcgaaaaaagaaatcactggacgattaaaagagatagcttacgaaaaaatagatgaacagaccgaagcgttaatttctatgattggtgacaatcaagtagactatcgcttttttattggttttaaactctacctcaatgaacaggaagtatccgtaaaaaatgttgggaaagaaattcaaaaagcatttgcggaattctttcatggtgtgaatcacaaattaaggggcgattttgtttctatgcctatggcggaaatcgaacgcttttctaagatggaacagttgttagaaagtaaattatccagacgctttcagattcgtaaattggagaaagatgattttggttatattattgaacatctttacgggcaaacaggtgtcccttttgatgactacgactaccatttaccgaaacgatacgaagataaaaaagtgttggtaaagaaatacgatattctcaaacccactcgctgtttaatcgaagaaaatcaacgctatttacggattgaacaggaagataccactacttatgtggcgtattttacaattaatagtattgttggtgaattggatttccctaatagtgaaattttttattaccagcaacagcagtttactttccccgttgataccagtatgaatgttgaaattgtcgccaataaaaaagccttatctaccgttcgcaataaaaagaaagaactgaaagatttagatagccacgcatgggaaagcgacaacgaaaccagtactaatgtggtggacgctttagaatctgtcgatgaattagaaagtaatttagaccaaaccaaagaatctatgtacaaactaagctatgtggtacgggtatcggcaaagaatttggacgagctgaaacaacgttgtgatgaagtaaaagatttttatgatgatctgtctatcaaattagtacgaccttttggcgatatgctaggcttgcataatgaatttattccctcaagcaagcgatatatcaatgactatattcaatatgtcacgtcggattttttggctggtcttggtttcggtgctacacaaatgattggtgaaaattctggtatttacgtcggttacaatctcgatacaggcagaaatatttatctccaacctagccttgcaagtcaaggaattaaaggctctgtaacaaatgcattagcgtccgcttttattggttcattaggtggcggaaaatcattctctaacaatatgctggtctattattcagtactctttggcggacaggcaaccattgttgacccaaaagctgaacgtggtgaatggaaagaaaccttacctgatattgcccatgaaatcaatattgttaatctcacgagtgagaacgacaataaagggttacttgacccttatgtgattttaaaactcccgaaagattcagaaagccttgccattgatattctcacgttcttaacaggtatttccagccgagatagcgagaagtttcctgtcctgcgtaaagctattcggagtgtaactcaaagcaaacaacgagggttgttattggtgattgatgaattgcgaaaagaagatacgcccatcagcaatagtattgctgaccatatcgaaagctttgtcgattatgattttgcccatctgttattcagtgatggcagtgtcacccaatccattagcttggaaaaacaactcaatattattcaagtggcagatttggtcttacccgattccaatagctcttttgaagaatacactaccatggaattattaagtgtggcaatgctgattgtcattagtacctttgctttagactttatccactctgaccgttccatttttaaaattgttgaccttgatgaggcttggagttttttacaagtggcacaaggaaaagctctatctatgcgattggttcgagcaggacgtgccatgaatgcaggggtctatttcgttactcaaaacgcggacgatttactagatgaaaagatgaagaataatattggcttgaaatttgcctttcgttccactgacctagtggaaatcaaaaagaccttagaattttttggtgtggacaaggaagatgaaaacaatcagaaacgcttacgtgaattagaaaatggacaatgtttagtttcagacatctatggtcgtgtaggggttatgcagtttcacccgatttttgaagagttgcttcatgcctttgataccagaccgcctgtgcgaaatgaggtggaagaatga

SEQ ID NO: 420837 - DNA, 396 bp, Staphylococcus aureus
atgaaaaaaataagaagttacaccagtatttggtcagtagaaaaagtgatttatgcgattaatgatttacaactccctttcccaattacctttacgcaaatgacatggtttatcgtttctttgtttgtcgtcatactctttggtagtttaccaccactttctctgattgacggagcactactcaaatacttagggattcccattgttctcactgggttcatgtgccaaaagacctttgacggaaagaaaccctatggatttctaaagtctatcattacctatgctctacgccctaaagtaacctacgctggcaaacaaatacgattaaaaaaagaaacaatgaatgaatcgattacgattgtaaggagtgaacaactagatggcatatccgattaa

SEQ ID NO: 420838 - DNA, 630 bp, Staphylococcus aureus
gtgtactttttctttgcaatattgtgtacaaaggtcttgcaaaacacatgggtgatagattccttttactttcgttacaaacagcaaaattatattgtacttgttaagctatttgaaaaagaggaaaaagttccagaatatgctctgttaaaactagaatttttaaaggaaaacgatttttcagatatgctagctgtctatgctaattcggtaaaattatatacagacacgaaaacaataagagaatattttggtatcgaatacagtagtaacttgggagatgttttatttcaatttagccaaactcttgctcgatttattccgacagaagttagtgagaagaaaaatgaagaccaaaaagaagccatgtgtttctcattaagtcaaagtgattcagaagatcccagaaaaaaatattgtttttcagttagaagaaatcctttaaagggaaatggtgagctgggaaaacgaagtccttttaatgacaataaaacgagattgtatagacccagcttatatgaacgattagggtcagataccaatttaagtttcagatattcaatgaatccagatgatgaagaaactgatgaaggtattattgcaaaatggacaaaaaataaaattgaatag

SEQ ID NO: 420839 - DNA, 729 bp, Staphylococcus aureus
atgaatcaattccgtttagaagagctttgtaagcaattgcggttgcctcatttgccgctggcagtggataatgattcatttgaaaccaaggaagaatggttgatgaatcttttagagaatgagttgacctgtcgagaagaattgaaaatggcccgtctgtatagacaagcaaaatttccggtccgacggactttggataattatgagtggcatgatcatatcgctattccaaacgagacaacaaaagatgaattaattagtctgtcctttattcgccaaaaagagaacgctgtgtttgtgggtacacctggaaccggcaaaacccaccttgcctgtgcgttggggcagatggcaacgaaagttggtatcgaaactcgtttctggcgtgtatcagacctagtcagtgagctggaacgtcaatggaaaagtaacacactgggtgcttttaagcatcggtttgataaggtaaaactaatcattcttgatgaaatgggctatgtgccctttacaaaagaaggtgccgaattgctttttcaattgattagcgattggtatgaaactaaaagcatcattgtcaccagcaatttagagttcagccaatggaacaaagtttttattgatacccgattgacagctgcgctagtggatcgattaatccatcacgcacatataataagctttaccggagagagttttcggctaaaaaatgctctatcaaaaataaaataa

SEQ ID NO: 420840 - DNA, 1428 bp, Staphylococcus aureus
atgctcacaatgaccgatattaatactatcagaaatttacggaataatcatgataaatctattaatcatattgcacaggagttagaggtcaattggcgaactgctaaaaagtatgccgatgacgatttgattcctctgccaaaggctcataagaaatctgggatgatgtatgttgaaaaatggggtgatatcgttgctctctggctttcagaggatacgaagctcccaaagaaaaagagaaggactgctgaagctatgaccaatgctcttaaagcggatggcttcaaaggatcttatcgaaccgtctgtgtgttcattcaagattggaaagcaactcactacgcggaaatctctgaagataatggattcgagcgtttggaacatccaccagcagaagcgcagctggattttgggactatggaagtttgccacgagggggcatttaaagatgtgaagacattagttttgacctttccattcagtaatgctggttttgcagttgtacttccagcagagaatcaagagtgcctactagaaggaatgaaagagctgtttcgacaagctggtggtattcctcggaaaattcgtattgataatatgtccactgctgtcaccaaagtaaaatcaaaaacagaccctgccgtattaactgatggttttttacaattcgcaactcatcacggatttgagacgcaggtatgtaatccacgcagtggtaacgagaaaggcagcgtagaaaataaagtcggctatgttcgctacaactttttctcagcgaccccaattatgaaagatttttccagtttcaataaggtattagcccagcaattagcacaagatcgggaacgaattcattacgagaagtatgcgattatcaacgatctttggctagaagaaaaggctgatttaattaccttgccagataaagagtatcctgtgttcaaagaaattgaaatcaaagcaaataagtataatgaaattaagctagataaggaacgtattcatattcctcggattcgtaatcactcagtcatttatggattacttcgttttgattcttatcagttaatcagtactgacggcgaaattatcgcggaaggacctcgtccttacatgatgaaaaagcgcgcaattgattggcaggcaataatattagattggcgtaggaaaccacgcgctatgcactactctcgctattggaagtatttgccagagcgaatcaaattgtttcttagccattctgattggaaggaacaaaatcagcggctcaatcaccttctcgaattactagtaacacatgacatgttaggtatcgatacaaatttctatgagctcatcgatactgcagaccaatcggatgcatacgatattgattggcaacactatgatgccttcttgtccccttccaaggaggtggtggttgattaa

SEQ ID NO: 420841 - DNA, 129 bp, Staphylococcus aureus
atggtaaatgtatttgaaaatcttaaactattaaaactagacatgaaagataaaggctgggttgtttgtggcagaataaaagtacatacaattgcagcccaaaagtacacaactccgcaaggagcttag

SEQ ID NO: 420842 - DNA, 501 bp, Staphylococcus aureus
ttggaaatgaaagtctatgtggcaaatttaggacggtataatgaaggtgaattagtcggagcatggtttactccaccaattgatgaggaagaaatggcagaaagaatcggtttaaatgaggactacgaagaatatgcaatacatgattttgagcttccttttgatgtggacgaatacacgccgattagtgaaatcaaccgtctatgtgaagccattcaagaaatcgaaggtacacctatttataatgaactcaaagaaattcaaggcatgtggtttagtagcttggaagaattactggaaaacaaagaggatattcattgttatagtgattgtgattcgatggaagatgtcgcccgttattacgtggaagaaacaggacagcttggtgaagtcccttccaatttacaaaattatattgactaccaatctttgggacgtgatatggaaatagagggtaattacctagttacctctcatggggtatttgaatattgtcagtaa

SEQ ID NO: 420843 - DNA, 762 bp, Staphylococcus aureus
atgtttacaaatgatcaatttaaatctcttttaattaaaacattagaaagaaagagctcttcaaattattatgaaggaggtaatgagattgtttctaaaatgaaaatatcagaggtaactttagatgagactgacgattttacttattataaaggatataaaaagggctggaatacgctttgcacatatcttaaaataagagttccttttgatgatttagacttttttgaaagtcataaagatttgattacccagacagcaagctccatatatgataaacaaggtgataatgtattagtggatactattttagtaccacttccagagaattacgaagtaattaactttagtcagttgaaaattagtgatgtggtttcacaagctattgaagacgctgagtcttttatgagtaatggtgaatatcaacgtgcctttgacagagttcacactgcttttcatggatatttaattgaaatactaaaaaaatatgaaattacagttcctagagacgaaaatctatctaaattatatagtaggatacaacaattaattgaaaaagaaattcaacctactgaacttgctgatatagtgaagacaacgataaggtcatcaaatggaatgattagctctcttaatgaagcaagaaataggcattcacttgcacaccctaatacaaatattattggaaagagagaagcaaaactaataataggtatttcaagtacagttacagattatattagcggataccttgataagtag

SEQ ID NO: 420844 - DNA, 291 bp, Staphylococcus aureus
atgagccttttaacaaaagaattaaagaagttagggtttcagtgtggcattgagtttcaagcgtatatacaaaatacagggaaatatacgtctctcattattgagggaaaacggcaagctggtgataccatctatacctatgatttttacaaggtgagattttataataattataccaatcgagtaaccgtctatggagagcatttaaccccttttcaattattaaggcgtgtaaaaagctatatctattatcgagaaaaatatcttaaggaaaggaggacaatcacatga

SEQ ID NO: 420845 - DNA, 1185 bp, Staphylococcus aureus
atggaaaacgaaaaaatttggattaaggaattgaaagaaaagcgactggcttatggcgtttctcaaaataaactggcggttgcttctcatattaccagaccttacctatcggatattgaaacaggcaaggcagtccctactcaacaggtgaaagaagatttactgaacgctttggaacgcttcaatcccgataacccattggagatgttattcgactatgtacggattcgattccctaccaatgatgtggctcaaattatcggtgaggttttacgtttgaatatggattatatgctacacgaagactttggctattattcttatcccgaacactatcgtttcggtgatattgttgtcctagtctctcatgatgtaagtaaaggtgttttattagaactgaaaggaaaaggctgtcggcagtttgaaaactttctattggctcaacatcggagctggtatgatttctttcaagattgcatggaacataaaggtattttcaaacgcttggatttagctatcaacgataaaacagggattttgaatattccagatttggcaaagaaatttaaacaggaagaatgcatttccgtctttcgaagctttaaaaattatcgcagtggtgaattggttcaccgtgatgaaaaaccatacatgggaaacacactttatattggctcattaaaaagtgaagtctatttctgtatatatgagaaagattatgagcaatacgtgaaaaatgatgttcccttagaagacgcagaagtaaagaatcggtttgaaattcggttaaaaaatgaccgagccacccaagccatgaaagatttattggcacatcaacaggcggaaaaaacagcctttgaaattatcaatcgctatatccgctttgcagataaagacgacactaaacgtcggagtgattggaaaactaatgaacgttgggaatggtttatcggtaaaaatcgtggagcattacgcctaaccacacagccagagccttattcttttgaacgaacattgaactggttacatcatcaagtcgcccctacattaaaaatcgcaagcattttagatgttctcaacggtacaaccattatctccaccatgattcaggaagccaaactgacagaaaaacatgagaaattaattgaacaacaacatctagccatggaggatttgattacatga

SEQ ID NO: 420846 - DNA, 1404 bp, Staphylococcus aureus
atgccattgcttcatgacagaggagagcgaatcaaagccaacgataagcacttggtctatcattttgtactaatttcattgctggtagtttttctagtcgtcctactcccttttcattggagaacgttacaatcggtgaactggcaagcagttcagttagatacatttttctatcaacttcatacgccatacttttggagcagtattctcactgctctttttgtatgcggacttatcagctggctttattatcactatcgtatagattctataaaacagttagagcaccgtcaaaagttagctcgtatgattttagaaaatcattggtatgaagccgaagaaactcaatcagagggattctttaaagatttacccagcaagaaaaccaaacaacgaatccgccattttcctaaaatatattatcgaatgaaagatggactaatccatattcatgtagaaatcaccttagggaaatatcaagatcagcttttgcacctagaaaacaaactagaaacaggattgtattgtgaattagtggaaaaaacgttgaaagattcttatgtagagtatgtcctactttatgatactattggcaatcgaattggcattgaagacgtggtagctcaagatggacgtgtcaaattgatggaatcggtctattgggagttcgattctctccctcacatgttaattgctgggggcactggtagtggaaaatcctattttattctcacattgattgaatctctcctgcatacaaatgcaaagctttatattcttgaccctaaaaatgctgatttggcagacttaggggcggtcatgaataatgtctattaccgtaaagaagatatgttggcatgtatcaatcaattttacgaagatatgattgatcgcagtgaaaccatgaaacaacaccctaactataaaacaggagaaaattatgcttatcttggtttgtctgccaattttcttatttttgatgaatatgtggcaatgatggatatgctaggtcgtgaaagtaccaccgttattcataaactcaaacaaattgtaatgttaggacgacaagcaggcttctttttaattcttgcctgtcaacgtccagacgcaaaatattttagtgatgggattcgggacaactttaacttccgtgtggctttgggtcgtatgtctgaaatgggctttggtatgatgttcggaagcgatacacaaaaacaatttttcttaaaacccatcaagggaagaggttacgtggatacaggaaaaagtgtgattagtgagttttatacaccccttgtaccaaaaaggtacgatttcttaggagaaataggaaaagtcattcaaaaaaagcaatctgagcctgtaccgcacgaagtgaaaggtacaggttcagacttgctttga

SEQ ID NO: 420847 - DNA, 774 bp, Staphylococcus aureus
atgacaaacacaccattgattttgaaagaaattccgaaagatgaagccatttcttttattcggcaataccattattcaaagatactccctagattgtgtaaatactttctagggattttttcagaagaaaaattattaggcgttgtggaattaggctggggtacgcaacccctacaaaccatacgcaaactctttcccgacagttcccttcaaaccacagattatttagaaattggaaagatgtgttttcttccagaaatgaatcaaaccaattattttggcagtcaagctctttcagctctaattaagtggttgaaagaacatacggactgtcattttttatatacactggcagatggaattgagggaaaatgtggctatgtctatcaagcgtccaacttcttttactgcgggtatttcaagacaagtgtctatcgtgataagcagtcatgggaaaagatacaccctcgaagtgctcgccttttattagaggaaaatgctcgctttgaacaggtagagaaaaagcattggctttcccaggcattttgcgaatacaaagggattgagaaaatcaatggacgcatgtttcgctatctctatccgttgacaaaagaagcgaaaaaactgttaggacacactctctatcgacgtcattattatccgaaagaaaaaaatttacgctttgaaaagcgaatcgcttatcagaaatatgaagccatttctcaaccaacttttgataaacaggctcgtatctacaatacacaattattttga

SEQ ID NO: 420848 - DNA, 378 bp, Staphylococcus aureus
atgagattagcagaaggtattgtgattgaaaaagaccagacatttggcacattgaaattttccgccttgcgtcgtgaggttcgtatccagaatgaagatggtacggtttccgaagaaattaaagaacgtacctatgacttaaaatcaaaaggacaaggacgcatgatacaagtcagtatccccgcttctgttcctttgaaagaatttgactacaacgcagaagtggaattaatcaatcctgtggcagataccgtagcgacggctacttttcgaggggcagacgttgattggtacgtgaaagcagacgatcttgtattaaaaggacagacaaaacctcatcagaaatataaaaaagaagcgtccgaaagtgaaaaatag

SEQ ID NO: 420849 - DNA, 315 bp, Staphylococcus aureus
atggaacttaaatatgtcattcccaatatggaaaaaacatttggacaattagaatatgctggtgaagggaacattgaacaacgtcgaataaatggcagaccaaccattctctctcgtagttacaatttatactcaacgattcaacgagcagatgatattgttgtcattcttccctccgaagctggcgagaaacattttgaatccgacgaaaaagtcaaactcatcaacccacatattaccgcagaaggttataaaattggcaatcgaggatttaccaattacattatgcacgcagacgatatggtgaaagcataa

SEQ ID NO: 420850 - DNA, 1794 bp, Staphylococcus aureus
atgacaaatatcttcgaaaaaatcgtaaatgatttaaatttagaacaaaaagatgttgtggaaagtgaagataacctttatgtaaatgcatgtcctgggagtgggaaaacaagggtacttacaaggaaaattgcttaccaagcaattaaacacgatggatcactaaaaagaataattgctatcacatacactaatagagctgctgaagaaattaaggaacgcctaagtttacttagtatagatgatgatattaatatttgggtggggacaatacatcagttttgtcttgaatttattatttatccttttaaaatgaatctctcaagagtatcaaaaggatttacaattattgatgattatactcaaagagcttacgtcagccaaattaataatatgctgaatttaaatctcaaaacgtatgaactgaacaaaattgatttgtcactttctcatgattttaaaattaatgaagttcagtatactcaagtttctgaaatgtatcacactatgttggaaaaaaataaagaaattgattttgatatgattttactagtagcgtataaaattttaactgtaaacagtaacgttgcacgtaatattgctagtaatataagggcgatttatgtggatgaatttcaagatactagagaattacaatacaatgtaatagctaaattacttcaaaacaaccctcaaattcagtcaatgtttgttggagatattgaccaagcaatttatggatcattagatggtatagctaaatcagttgaagaactagaaatgctaactagtcacacttttcaatcaaagacgctacatggctgttacaggtctaatcagagattagtagacttctactctaattttcagagttgtccttacgagattgaaagcagagggaataataaaaacgaccgtggttttataagttatgattgcaaagttactaaggaggatttacccaacataataaaaaatataataaaggaaaagattgaaagcggcattcatgaaaaagatatttgtgtacttgctcctcaacactatcctctgttttcactgggtgagtatttaaagaaagaattaccgtattgcaattttgatgctataaatatatcaccaattaaggtaaataatcatagtttatttttcaagttagcaattttgtactttactgaatcaggtgaaaaggttcgaagaagaaagctaattgcaaacgatattttaattatattaaaaaatgaatttggaatagaagttaaagattattttattgacttagatttattacagctaataaacagtgtgaaaagaatgtatagtggagacgacaacggtgttgatttatacaaatttgttaccaaacatatatttgttaatcttaatattgacgagaaaaattacccgtctatttttaagcactatctattttttattaacgaagtagaagatcggataaaaaataattcattatctagtagtgtatctagttttaagaagatgtttaaatctcgagatggtatcacacttactacagcacataaagttaaaggaaatgagtatgatactgttatcgctattaatcttctaaacgggaaaattcctcattggaatgaaatttttaatgtttctgataaaggaattagttcagcgagaaaactactatacgtaatttgttcaagagcaaaaaataatttatttcttttctcagaggtgggttattttacgagtaaaggagacttgctttatcccactcaattattagataaaatagaatttgattataatatttaa

SEQ ID NO: 420851 - DNA, 2190 bp, Staphylococcus aureus
atgtttatatctactcttcaaattcgaaattttagaaattatgaatccgaaatctttcgattcgataatgagacaaatactattataggtgagaatgattcagggaaaaccaatgctcttactgcattgagaatcttattagatgatagttattactatagtagtaaaacactgaaagaatcagatttttttcatggaattcaaaatgggtggcaagggcattggattattatctctgcgacatttgaaggaatcagcgaagaagaatttgacaatgagatttgtgcttccatttctttaaattctgaaagtcaaacaatcttagaagaattgatttcaaatgcagataaaggtgtaggtagtatttctctatttattagacctaacaaagctattagaaagcaattatttgatatttccactgaattagactctcatcaatttaacgaatttagaaattctattcgtctatccgactatgaattttactacacatctaaatcaaatctaaatttctgtatcaatgaaaattatgataaattggtaggaagactcaatgacaatatagctagtaatcctgaagaagacgatgaagctctgttgggctcaagaattgacatgtcagatattttcaagcatatttcggttgtttatgttgacgctcttcgagatgttcttagagaaatgaaaaacaatcgaaacccagtcaaaagaatcatggaaacaattgaatcaaaaatatcatcagataatgttgagtcattaaaaacaattatacagcaattaaatgagactattaccagtgttcctgaaattaggaaaattggcgaaaatattaatcggcaactaaatagcataattggttcagtgtattctcctaatcttcttctttcctcaactatgtcagatgatatgggttctttagcaaaatttctttcaatgaagccagaacaaaatatcgacttagacttactagggttaggacatctaaatatgatttatttagctttgaaaatagtcgaatttgaagcgtgtcgttcaagagaactacttaatattatgttgattgaagaaccagaagctcatattcatcatcatattcaaaaaactctgttcgaaggattaaatcttcaaaaaaactatactcagattctcatgaccacacattctgtacatttagctgaagtgtctgaaatatctcggatgaatgtattaaaatcgtttaatggcaaatctatcgttatgaatccagcaaataatctgaactcatttgctaaagaaaagttaaaaaagaacaatctaaatctaataaacgcagtagagagatatttagatgttaaaagaaatggattgcttttttctaaaggtgttatcttagttgaaggagatgctgaagaaatacttattcctcaaatagtaaaaaaattatttggtataaacttagacgaacttggaataggtttgattaatgttggtagtacttcgtttgaatatatcgctagcttgtttgacgatgatagaatacagagaaagtgtgctattgtaactgatttagatgaacaggcaatcccatcagaacatcgattgtataaaagcactgcacaagagaaaggtcaagcaagaaaagaaaaattatcctccctttttaatgaaaacaattgggttaattgtttttatgctaatacaacatttgaaattgagtttttagatgtgaataaagaaaatattctaacttatgtcagtccaattatagatgacgcattcaaagataaaaaaacaataactgcttataaagaagaaatacaaagtgaacaatatttagaaagaaatttagcgatgttaaaactagccaatcatgttggtaaggggtggtttgcaattgagttaggtgaaaaaattgactttttaatcaaaattcctaagtatattcttaatgctattgcttttgcatgtcaggaaatagtagatctctcaatttataaaaaaattctactccatacaatcgacttgtacgaggaaactacagaattgtcagctttatcagctagtttaaaaacaagtgatacagctgatttgaatatagcaataatttctttattagagtactttggtaaagatgaggatgttgtgtatctaatcaatcagatagaaaattacacaaaaatactttatgctgaggtttcaaaatga

SEQ ID NO: 420852 - DNA, 852 bp, Staphylococcus aureus
atgtcggaaatcgcagacttgattgagaaaatgtatgggcattactacacgccccaaaccatgtccaatataacaaaatcatttacagaagaggtaacggcgtttaatgggcgggagcttcatgaccgttatgctgctatttatatggacgcaacgtatattccgttaaagcggaaaaccgtcgccaaggaagctattcatatcgcagttggcattcgcccggacggatcaaaggaagtattgagctatgcgattgcaccgactgaatccatcacgatttgggaggaaattttattggaccttcaagagcgcggtttgaaaaatgtcctcctgttcatcacggatggcttaaaggggatggtaggagcgattagtcggttctatcccaaagctcgttttcaacattgttgtgtacacgtttcccgtaatatcagtcacaaagtgcgtgtcgatgatcgtaaggaagtctgtgatgattttaaaatggtatatcaagcctcatctaaagaggtggcgttggaagcacgtggtgcttttgcggaaaaatggaaaaccagctatccaaaagtggttgaatcgattctttcgaacgatcacttgctcactttctatgatttccccttggccatacgcaagagtatttattctacgaacttgattgaatcctttaataagcaaatcaagaaatacagccaccgcaaggaacagttccaaaacgaagagtcgatggaacgtttcttagtctcgtcttttgatacttacaaccaaaaattcctaggtcgcagtcataaaggctttcaacaggccgaaggcgaacttgaacaaatgctaagccaactgattgagaattag

SEQ ID NO: 420853 - DNA, 372 bp, Staphylococcus aureus
atgaacgattttactacagaaattctaaagactctagcgaacaaaggcgatttgaatgaattattccgtgtccatttggagaaagcagtcaatacgcttctcaaaacggagttaacggctttcctagattacgaaaagtatgatcgcattggttttaacacgggtaattctcgtaacggctcctatgaccgtacggtcaagaccgagtatggggaacttcatctccagattccgcgcgaccgcaatggtgagttcaagcaacagactgttcctgcttatagacggacgaatgacacgttagaggagaccggagaccgtcattcacctcttccgaaaaggtattaccatgtcggaaatcgcagacttgattga

SEQ ID NO: 420854 - DNA, 573 bp, Staphylococcus aureus
gtgtttagattaaaaaaatggtatttaaaacaaaaaggctatttttgccgtgtcggtgaaaagtgggacaatagtaatttatcccatgaaaatatacatagttatgtagatagagtacttgaatatgagactgaaacacgtagaaacggccaaccaactgaagaatatatattagctagtagtggggaaaaaataaatgaagatttaagaagtggtactaatgatcacaaagaaattctagaggtatttgataaatataaagtaaaagaggatataactacttatagaacggttagtcctcggatatacaaattaatggagaaaaatgctaaaaacttaaatggagtagatttgtttgaacttggaattttacacacttcattaataaaagggtacgaatcaagagaagaaggttacaaattacgggtaaaagtaaaaaaaggaacaccagctttctatgtaggtaatttaacaggcgaagaaagccattattatgaggtgattgtagttaataatttaaaattaaaaatcatatctattgaagattactatataaattgtgaagtagtataa

SEQ ID NO: 420855 - DNA, 1050 bp, Staphylococcus aureus
atgatacctacgatagaagaaattattgacaagtatggcagtttagtagattgtctaaagtttgatatatcaggtgaggtttatgaagacttattgttattaagaagtttaagcgatttaaatgaacaccaaaagatgcatagagtttcatttatacaaaaacactttaaccctaattttgattatttgttagatgactcagaatttagaagtatgaataaaatttatagaaatttaaatactatgacgtatatcaatagtcaaaacaatgaatttaaacttaaaccatttataaatgaagaacaattaaaatcactacttgcgataaagaaagtagatgaacatttgagttatgacccatctattacctcaaaagcattagcagatataaacaagacgcaaaaaagattggttacaaagccaaatattctctataatcgatccaaaaaagaaaatgagtatgtacggttaggaggaaaaatatcatatacaaagatggagaagcattgggaatatttacataatgagattcagtattataatcttactaatcaattaattagttatgttgctttagaaaaggaatatgcatgggcttttttaaatgaattattttatttaatagaattatatttgaaggcatttaaaggacaaaagaaaactggccatgaatttgaagaaggattgaacgcatttattcaatcatatgtcattattttacttatagatataagattaccgactgttaggttatatattattaggcgtattgtggatgaatgcgaaaaagaatcagataatcaaaaaagaattaaactgatagaggaatccattaaaaagtacagatatgtaaaagaacagattgaaagatttggaaatgcgttgaaagaagaattatcaatcgcgactttgtctattgaacagaatatgttagaagctaaaattgattattataagaattactactatcctagaaaaaaaacaaagcataacaatattgagtacaacgtatcaatgttttttaaagctgtagattctttaaagaaatag

SEQ ID NO: 420856 - DNA, 288 bp, Staphylococcus aureus
atgatgaaagaaaaagaattttatacactaaaacgtgctgttacaagcatcgcatttaatttacctgtaggcaccatgtttatgtatcacgatttgaatgtgagggctaatgttttgtgctcgactgaaattcaacaagatgttggtcgttggtttgcacattttgtaaaatatacacctaaccttccattcattgtagttggaaaaaaaggttcatctttgctctaccttaaaactgcaccaaatccgatgaatcatcaaaataactggaaaggtggtaacaactaa

SEQ ID NO: 420857 - DNA, 1788 bp, Staphylococcus aureus
atgactaacatcatctttagtgaatatccatactggcttactgaagattcatggtatgaagttataccaccgaaaggtaaaaatgatcagcaaaagtccatacgcttatctagtccaattttaattaaaaacaagtttcttgaccccaaatctggggttgagaaactagttatttccaacggacaaaatattgaacgtattgaaacatcagatattttaacatcgcaaaagttaccttcactaatcatgtatggcttcagcatcaatgagaagtacattaaatcattaagcaatgcactacaattaatgcgccaatcactgcctctgtcatcgttgtatacgggtgtcggtgtgttaaatactgataaaggtgtcgtcatttcattagatgaaccatatctttcaaaagaaattacacagtcgcaggcggatgaaatcatttgtgaaacacagtacgatctacaacctaaaggcacttttgaagactggtggcaaatgtatcttgatgaagtaaaaggaaacttgttactcgaacttgctgtagtgtttggtatttcttcattagtaactgcgtttttaaaaacaaaacatgaggttgaattcgcaggtacgattttctcatttacgggaaattcaagcacgggtaaatcaactgcagcggctttaggagtctcaataaccggcaaccctactaaaggtagtaatacgctgtttagatcatggaatggcactagaaacgcgcttgaaggatatctaagtaacaactatggtgtacctattgtattggacgaactgtcatctgcaacctttaaagatacaactggtttgctctattcaattgccgaaggtcaaggaagacaacgttctaatatacacggagaagtcaagtcactaaaaaactggggaacctcagtaattagtactgccgaacacagtattttcaataatagtgcacgtaatgatggtttgaatgtacgtaccattgaaatatctgaagcttttacaactaacgctgacaacgcagatactattaaaaaagcaacatcagctaattatggtcatatcatgccattagtagctgaatatctactcaatcgtgaacaagaagtcattaaatggttccaaaatgagcacctaaggttcaaaactcaactagaaaaggaaaccagcaatacaggaattcggatgttcaaacgctatgcaaccattacaacatcagcacgtatattggaacgtgtcattgccacacctgttgatttgaatgctgtaagggactatcttattaactatcatttagattctgttagtgagcgaagcctagctgataaagcaattgaagtcattgtccaatttgtagcacaaaatcgtggtaagttttctgacgacactaggttatcaacgcttattgaaaattatggaatgatttcacttgaagatgatcatatccaggtgaaaatgattgcctcggtttttaaaaatatgttaaaagaacataatttccaagatacaaataatgtcattgatgcactgagggataaagattacatccagtcagacgccaatcgtaaaacaacaaaacgtagtgtcaaagacaaagaaggcaaaccaaaaaccatcgtattttatcatcttaagcttgataaatcatacgctcctatttttggtctatctgaaaaaagtaaattcaatatacccttatcatttatctctgaacaccaacatccaatactacgagacatgatttcaaaagcaagagaatgggataaaaacggtgatattgacttttaa

SEQ ID NO: 420858 - DNA, 276 bp, Staphylococcus aureus
atgaatacagtagcactagctcacgaaattgaagatgaaagatttgaatacttagaaagcacacccctagatactgtgaaggaatgctgtaaacaagaaggtcgtcaaataagtaacacttacactgaggagtacaagttaataaatgacattttggagaaagtaatcaaacctacgtccattgttgcatatggagaatatgaagattacattcatttaaaaaaatttgctcaaagaagaatatcgaattcgttactacttttgagatgcaactaa

SEQ ID NO: 420859 - DNA, 1347 bp, Staphylococcus aureus
atgaaacgagccattggttatttgcgccaaagtacaacgaaacaacaatcactcccagctcaaaagcaagcaatagaattattagctccaaagcacaatattcaaaatatccaatacattagtgataagcaatcaggcagaacagataatcgaacaggctatcaacaagtcaccgaacgcatccaacaaagacaatgtgacgtattatgttgttatcgcttgaatcgacttcatcgcaacttgaaaaatgcattaaaactcatgaaactctgtcaaaaatatcatgttcatattctaagtgttcatgatggctattttgatatggataaagcgtttgatcgcctaaaactcaatatattcatgagtctggctgaacttgaatccgataatattggagaacaagtcaaaaatggacttagagaaaaggcaaaacaaggtaaactcataacgacccatgcgcctttcggttatcactatcaaaatggtactttcatcattaataatgatgaatcacctaccgtcaaagctgtattcaattattatcttcaaggatatggctacaagaagattgcacaatatttagaagacgataataaacttattacccgcaagccttatcaggtacgaaatataattatgaacccaaattattgtggtcgtgtcatcaatcaatatggtcaatataacaatatggtaccacctattgtttcggcaacgaaatatgaacatgctcaagcaatccgtaataagaagcaacttcactgtataccttcagagaatcagctgaaacaaaagatcaaatgtccttgttgtgactcaacactgacaaatatgacaataagaaaaaaacatacattgcgatattatatttgtcctaaaaatatgaatgaatctcgctttgtctgttcattcaaaggaataaatgcacaaaaattagaagttcaagtcttagctacatgtcagaacttctttcaaaaccaacagctctattcaaaaattaataatgcaattcatcaacgcctcaaaaaacaaagagtgatagaagctaaaagtacgctaactcaagaacaactgatagataaacttgccaaaggtatgattgatgctgaatcattcagaaaacagactcatttgatgaatcaaaagcacaaaaccatatcctccataagtgataatcagttacaaacatcactacaaaaggttatacagaaaagtttcacgttaaacatgctgcatccctatattgatgaaattcgcattacaaaaaataaagcccttgttgggatctatttcaaaaatgaaccattgaacattgtgaaccaaacctcgcaatcatcgattgcttaa

SEQ ID NO: 420860 - DNA, 1629 bp, Staphylococcus aureus
atgcaacaactcaaacaaaaacgtgtcggtatctatgttcgtgtatcaacggaaatccaaagtactgaaggctatagtatcgatggacaaatcaatcaaattcgagaatattgtgatttcaataactttgttgttgtagatgtatacgcggatagaggtatctctggaaaatctatgaaccgaccagaactacaacgtttgttaaaagatgcgaacgaaggtcagattgattctgttatggtctacaaaacaaaccgactagcacgtaacacttctgacttactcaaaattgttgaagaccttcatcgtcaaaatgtcgaattcttcagcttatctgagcgtatggaagtcaatacaagcagtggtaaattgatgctacaaattctagcgagtttttcagaatttgaaagaaataatattgtcgaaaatgtattcatgggtcaaacccgacgcgctcaagaaggctattatcaaggcaatttgccgctgggctatgacaaaataccggatagcaagcatgaactcatgataaaccaacatgaagcgaatattgtcaaatatatatttgagtcatatgctaaaggccacggatatcgtaaaattgcgaatgcactcaatcacaaaggatacgtgactaaaaaaggaaagcctttcagtattggttcagtgacctatatcttatctaatccattctatgttggtaaaattcaattcgcaaagtacaaagattggaatgaaaagcgtcgtaaagggctgaatgataaaccaataatagctgaaggtaagcattcccctattattattcaagacttatgggataaagtccaattacgtaaaaaacaagtcagtcaaaaacctcaagtccacggtaaaggaactaatctattaacaggtatcgttcattgtccacaatgtggtgcaccaatggcagctagtaacacaacgaacacattgaaagatggtaccaagaagcgaatacgttattattcttgcagtaacttccgaaacaaaggctcaaaagtatgttctgcgaatagcgttagagctgatgtgattgagaaatacgtcatggatcaaatactcgaaattgtcaaaagtgataaagtcattaaccaagtcttagaacgtgtcaatcaagaaaataaagtcgatattggtgcattgaaccacgatatcgcttataaacaacaacaatacgatgaagtcagcgggaaactccataatttagttaaaaccattgaagataatccggacctaacatctgcattgaaagcaactattcatcaatatgaaacacaactcaatgacattacaaatcaaatgaatcaactcaaacagcaacaaaatcaagagaaactatcttatgatacgaaacaaatcgctgccctattacaacgaatatttcaaaatatagaatcaatggataaagcacaactcaaagcattatatcttacagtcattgaccgtattgatattcgtaaagacggtaatcataaaaaacagttctacgttacactaaaactcaataatgaaattattaaacaacttttcaataatacccctctcgacgaagtgctcctcagcacttcgtctttatttttgcctcaaacgctctttcttcaaatctaa

SEQ ID NO: 420861 - DNA, 351 bp, Staphylococcus aureus
atgacactagaaaaacaactcaaagagtatataactaacttattcaatctgccaaaggacgaaaaatgggaatgtgaatctatcgaggaagtggcagataatatccttcctgatcaatatatcagacttggtccgcttaccaacaaaatccttcatacgtatacttactactctgacacacttcatgaaaggcatatatacccctttatcctctactatcaaaaacaacttattgcgattggttatattgatgaaacaaacgatatggacttcttatatcttcataacacagttatgccactactagatcaaagacacttacttgaaaaggagaattataataatgaataa

SEQ ID NO: 420862 - DNA, 312 bp, Staphylococcus aureus
atgaaacgttatattacacgtagtattgccaattacttgccagcaatgttgcagcaacagttatggaaacttgtagcgcaacgcgaaaacgaacaattcaaggaactagaagagattgattactttcatatattccagttcaatatgcataatagtcaattatatatcaaacataagcaagaacgtccagagtacgtaaaaattcataaggcaaattattcaaaagctatcaatattaataaggtctacattatccgagaagatgatgtagacctttcttattacgtcatgttgttacctgaagaatattaa

SEQ ID NO: 420863 - DNA, 522 bp, Staphylococcus aureus
atgaaatcaatcaaaagtgtattagaaactgaagcgatatttagtcaggataaaatgcatcgttatcttctcaagaaaacttgggatattgataaagaagtacttacaattataacgatgtatcctcattatgatggtgttatcaacgttgaccttacaacacaacttattgtcaataaagtagctgaaaaagatgaatatggtggcgttaattttataaatcttttttcaaatattgatacccccattaatttaaaacatatcgaaaacagccatgacaagcacacggatattcacattatgaaagctgtcaaagaagccgatagtgttttattggcttggggttcctacggaaaaaaacctcttgtggaaaatcgagtgaatgaagtattagacatgttaaaacctcacagtaagaaaatcagtatattaacaaatcctcaaacaaatgaaatcatgcatccattaaatccatacgctagaaaggcatggacaattaaaccattaaaggagactaaatag

SEQ ID NO: 420864 - DNA, 207 bp, Staphylococcus aureus
atgaatcaaacatggaaagaagtataccaatatttaatgcatcaaccacacatcgatgttattaaaggcattatcgccttttcatcaaacaaaaaaaataattcagaattagatgagctatattccatttatatgaatgatgattctatcacatccattgttcaccctgacttaatagaaagtatagagcttatccataatgagtag

SEQ ID NO: 420865 - DNA, 324 bp, Staphylococcus aureus
atgagtagaaaaagaatagatgttgtcaaagtccaaatggttaaagaagatacactttggtatttaaaaagacgtattgaagaaccaaaagacgctgctgatattatgcgtgacttcataggaaatgctgaccgagaacacttcattttaatttgcttgaatagcaaaaatgaacctacacatattgaaaccgtctctataggaaccattaattttgcggttatacatcctcgagaaatatttaaaacagccatattaagtaacgcaacgggtatgattattggccataaccacccaagtggagacatattaaccatagtataa

SEQ ID NO: 420866 - DNA, 906 bp, Staphylococcus aureus
atgacgaaacgtaaccctaaattagcggcattattatctgttatacctggtttgggacagttttataataaaagacccattaaagggacgatattttttatctttttcatcagttttatttctgtattttatagctttttaaatattggtttttggggattgttcacattagggacagtacctaagttagacgattctcgtgtcttacttgcacaaggtattatttctatcttactcgttgcttttgcaatcatgctatatgtcattaatattttagatgcatatcgtaatgctgaacgatttaatcgcaatgaggaaataaaggatccgaaggcacgtatggttgcaacatgggacaagacgttcccatacttactaatctcaccaggtacattcttattgatatttgtagttgtatttccattaatatttatgtttggagtagcatttacaaactacaatttatacaacgcgcctccgagacacacattagaatgggttggtttagataactttaaaacgttattcacaattggcgtttggcgtaaaacatttttcagtgttattacttggacattagtatggacgcttgttgcaacgacacttcaaattgcattagggctgtttttggcaattattgtaaatcaccctgtcgtcaaaggtaagaaatttatccgcactgtgttaatcctaccttgggctgtaccatcatttgtgacaattttaatatttgtagcgttatttaatgatgaatttggtgcgataaataatgatatattgcaacctttattaggtgttgcaccagcatggttaagtgatccattttggtcaaaagtggcattaattggtattcaagtatggcttggtttcccattcgtctttgcactgttcactggtgtactgtaa

SEQ ID NO: 420867 - DNA, 675 bp, Staphylococcus aureus
atgaactatttcagatataaacaatttaacaaggatgttatcactgtagccgttggctactatctaagatatgcattgagttatcgtgatatatctgaaatattaagggaacgtggtgtaaacgttcatcattcaacggtctaccgttgggttcaagaatatgcaccaattttatatcgaatttggaagaaaaagcataaaaaagcttattacaaatggcgtattgatgagacgtacatcaaaataaaaggaaaatggagctatttatatcgtgccattgatgcagagggacatacattagatatttggttgcgtaagcaacgagataatcattcagcatatgcgtttatcaaacgtctcattaaacaatttggtaaacctcaaaaggtaattacagatcaggcaccttcaacgaaggtagcaatggctaaagtaattaaagcttttaaacttaaacctgactgtcattgtacatcgaaatatctgaataacctcattgagcaagatcaccgtcatattaaagtaagaaagacaaggtatcaaagtatcaatacagcaaagaatactttaaaaggtattgaatgtatttacgctctatataaaaagaaccgcaggtctcttcagatctacggattttcgccatgccacgaaattagcatcatgctagcaagttaa

SEQ ID NO: 420868 - DNA, 579 bp, Staphylococcus aureus
gtgacatttaatttaaaaaaatatataattagtttagtacttttaacttcttttttactatccgcttgtacaattaatattgagcgggatgaggaaaatagtgagaaaaataaacagaaagaaaacactcatactgattcaaacaatacaagttcgaatgaatcagatacttctaaacaatcatctcaagaaaatactataaatcaaacagaacaaaatcaaccagctaataataattcaagttcacaacaaaatccgcaaataataacagaaaatgaagctattcaaaaggtaaaagatgagtttccatctacacgaacaggaaatgactatcgtatagatactactagaactgataataatgtgtacgctatcaaatttacttctcaagatgcagaaggttatcctatgcaagctgctgttattattgataagcgaacaggagaatttattgattatattgatgatagaagcgatgaagataaagagcgtcatgtccaacatgctaaagaaagtactctttataaaggtccatacgatgctttcagaaaagattttagtcataaaataaatgaatga

SEQ ID NO: 420869 - DNA, 222 bp, Staphylococcus aureus
atgaaccaagattcaattcaatcagattggcaaacagttgctaagtgcttagcgtcacaaaactatatttcaattgtgaaaggtttagttcatcatttcacaaacatcgatgatgaggaaatacttgataaaacctatgacgattttatgaatgatgactctataacaacggtacttaataatgattttcaagatattatcaatcgctacttatcaaaataa

SEQ ID NO: 420870 - DNA, 300 bp, Staphylococcus aureus
atgagcaatttgattaacggaaaaataccaaatcaagcgattcaaacattaaaaatcgtaaaagatttatttggaagttcaatagttggagtatatctatttggttcagcagtaaatggtggtttacgcattaacagcgatgtagatgttctagtcgtcgtgaatcatagtttacctcaattaactcgaaaaaaactaacagaaagactaatgactatatcaggaaagattggaaatacggattctgttagaccacttgaagttacggttataaataggagtgaagttgtcccttggtaa

SEQ ID NO: 420871 - DNA, 912 bp, Staphylococcus aureus
ttgactttttacattttgttgattattcattattttattatttgttattttgttttcagtgtacatccaatgctaagtttgtttttcttttatagtgcttttgccgttccatttacttttaaaaataatgttaaaaaaacggcaactaatcttttcatactaacaatgattatatgtacaataataacgtacttattgtataacaactattttgttgcaatgatggtttattatgtcgttatatcgttaataatgctagataattttaaaaaaatgaaaaaccgtgaatatcaaaaagaaatagcagaaaaaaatagacatattaatacattaattgctgaacaagagcgacatagaattggtcaagacttacatgatacgttagggcatgtgtttgcaagtttatcattaaaatcagaattagcttataaactaatagatgctgatgtagaaaaagtaaaagctgaattattagcaattaataaattatctcgtgaatcattgaacaaagttcgagaaattattgatgatgtaaaattaccatcatttattgaagagattgatagtatacgtaaagttttaaaagatgctgatattgattttacatttgaaaataaagaattagcgcaagtattaagtcctactaaacaatctatgttagttatgattacgcgtgaagcgataaataatgttattaaacatgcaaatgcttcaaaagttcatggtaaattaaaaactgtaaacaatcataaattactgcttatgattgaagatgatggcaaaggtatcgatagtgattgtgaggtgaaaagtatttcacagcgtgtacaacatttaaatggaactttagcagtcgactcaacaaatggaactaaaataatcattgaaatctcaacaggaggaatagcatga

SEQ ID NO: 420872 - DNA, 354 bp, Staphylococcus aureus
atgaaaccattattacccaaaagtataactatggatagaggtaaggagtttgctctatttgaacaaatagaagatgaattgaattgtagtatttattttagtgatttgggttgtccatatcaacgtggttctattgaaaatgcaaatggacttttaagacagtattatcctaaaggtacggattttgcaaatataacacaaaagtcattagatgaagctgttaaacaaattaatgcacggcctcgaatgatatttgactataaatcgagtgaggaaatgctaaagtaccatgtaagcacacaaaattgtgaacctatattaaatgactgtgtgaggcacgaacccgtcaattaa

SEQ ID NO: 420873 - DNA, 660 bp, Staphylococcus aureus
atgaaaccaaagataattatgcacacacaaattagccttgatggccgcattaaaggctttgataatccggaagtttactaccaggttgccgggggaattcattcggatgcggtgctgtttgggtccaatactgtttttactgcatttgaaaaatatcctgctgaaacagaggctgattttgagaaaatcataacaagcccggaggaccccagaccaataggagtcatacctgacagcagaggtatcttgagaagtcttcattgcttaagaaatcttggatatctgaaggaaattgtcattctggtatcaactgccactccgaaggaatatttgaattatttggaggaaaggcattacccatatattgtgtcaggaaatgatcatgtggactatgaaaaagcctttcagatcctgcatgagcaatatgggtgtaaatacatgcggacagacagtggcggtggattaaccaacaaattattagaaaacggacttattgatgaaatcagtcttgtgatatcaccatgttttgtaggtaataaagaaaaacaactatttgataaccttctgttatctgaaaaagttaatttggaattgcagggaacagagaatgcagaacatggctgtctgtcattgcgctatgctgtgaaaaataaggattag

SEQ ID NO: 420874 - DNA, 357 bp, Staphylococcus aureus
gtggatcggattaaaagcatttgcatagaagaagagctctgtcaaagccatgatggctctttggaacaaatattaaaacaaatgctttcatataaaaaactatataatgtaattcttagagctgaaaaaggggagacatacaattctatcaagaacaggtattctctcggcttccttgaagaaaccgatttgggaagtaaaatggaaatcgaattccagacagattcctttgagatattgagcaagcagctgattgaatatggatcaggcattgaaatagtccaacctgatgaattaaaatgcataacccgtaaacacctggcacaaattacgaatcactgcctaaacttgatttag

SEQ ID NO: 420875 - DNA, 246 bp, Staphylococcus aureus
atgattgatgtaaatgagctattggaagaagctattagagaaactgaaaatctaaatgatggcgaagtttttcttgttaaagatttattcaagggatatgtggggaataggatacccagaaaggatcgacttctgcttggaacgttatttttaaaccatgttagcaaaatgaatggtaatttaaaggctattgaaaagacttcatctaatcagcagaggtataaaaagacaattgataagttttaa

SEQ ID NO: 420876 - DNA, 1830 bp, Staphylococcus aureus
atgaatgaagaaatgcaagggttttgggctaataatagttgggatataagaaaatgtccacatccttctgccatagaattaagtaagaatcctgctttaagaaatcgttgggttcgttttgaacgtgttaaaaatctgtggttaagaacagaattgaaatatttttatttttaccatttaaacaatggaatatggaatgcaaaaactgtctggattagaaaaggaacagtaattaataaaatgttggattttttagatttaaagtatcccagcattacttcaattactgaagttcctattgataaagcaatgacggagtatagaacatatttgacaaaacagggtgttagaattaccaccactaattataagattactgctaatcaagaaaaaacacctgtaaaagctaattcttactatgttactaatcttaaacaatttattgagttttatgaggatttttattttgatggagaggagtgggataaagacgtttgggatagacgaaacttacctttgccagatgataaggttaacccaacacaatatgaatatacaattaactttaaagggtttcggaatacatattttaaacagcttgtaaaaagatattgtaagttaagattgaacatggatagcttttcctatgtaagtgatattgcccaaaaacttaaagagttctttaattttctggacataaagtttaaacacgttcagagagtacaccaattaacgagagtggaaattgaagcatatttaagtgaactaaacatgatggggataaaacctagtacaataactgggaggatctctatattggaaggactatttagtacccttcataggctagaatgggatgatgttccttccaaattattaatttatcccgaggactatccgaaaataccaagagcaaaacctcgctttatagacgaattcgttctagagcaattgaacagtcatcttgataaattacccgaatatatagctacgatgactatgattgttcaagaatgtggaatgaggataagtgaattgtgcaccttgaaaaaaggctgtttattagaggacaaagatggagattactttttaaagtattatcaatggaaaatgaaaaaggagcatatagttccaatatctaaagaggtagttttacttattaaagttcgggaagataaagtttcagaggaatttccagatagtgaatacctctttccaagaaaagatggatcgccattaaaacaagaaacatttagaggtgagttaaataaattagcttatgagcaaaatatagtggataaatcaggtgagatttatagattccatgcccatgcctttcgccatacagtaggaacaagaatgattaacaacgggatgccccagcatattgtgcagaaatttttggggcatgaaagcccagaaatgacaagcagatacgctcatatctttgatgaaactctaaaaaatgaatttactaaatttcaggaaaaactggttaccaataatggagatgtgcttgatctagatgaagataatgaagtcgatgatgtagagcttcaatggttcaagaaaaatataaatgcacaagtgcttccaaatggttattgtagattgccagtagtagcaggtggttgtccacatgcgaatgcatgcttagattgcactcacttctgtaccagtaagcaattcttaccacagcacgaagaacagttagagcgtacagaagagttattagccatagctaaggataaacaatggcaaagacaagtagagactaatagccgtgttaaagagcgtttagaacaaatcattggaagtttgacggggtaa

SEQ ID NO: 420877 - DNA, 1605 bp, Staphylococcus aureus
atgtatcaaaattataccataaaccaactttgtttgcctatagatcttgaaattaaattagaagaaaatgattttgctcatgccattgtgcagtttgttgactctattcccgatgaagtctttcttccttattatcaatctatgggtagaccccaatatcatcctcgtatgctactttccattattctttgtgcctatattcaaggggtttattcgggccgccaaatacaaaatatgctgatagatagtattcggatgcgctacttatctcaagagcaattccctaactttcgtactattaatcgttttcgcgttcatccgattatgaacgatattctagatcattcatttgttcaatttcgtgagctactggttcaaagtggcttaatcagtggcagtgctctatacattgatggtacaaaaattgaagcggatgcgaataaatactctttcgtttggaaaaaaagtattttaaagtataaggatagccttgatcaaaaagcccttgaaaactaccaacaaatggtggaaacaaaaatcttacctgagttaatagatgatttaaaggatgaactttctatagaagagattgaaaggattcgtcaatctttggaagaaaaggaaaatcaattaattgaagcgattgaccaaaccgaaacagtagaagaacgaaaattacttcgtaaagaaaaatctgaagttcataagcagaagaagcgattcgatgattttgcccaaagaaaaatgagctacgaagaacaattagtgattatgggtgtacgcaatagtttctcaaagacggatcatgacgctacttttatgcgaatgaaagaagatcacatgcttaatggccaactaaaaccaggttataatattcaacttgcgacagaaaatcaatttgctcttgcttatgattgttatccaaatccaacagatacacgaacatttatcccatttcttgaaaagattgaatcaaaaataggtttaccagaaaatattgtcgcagatgccggttatgcaagtgaagaaaattattgttatgtgttagacgaaacagaatccacccccatcattccgcatcaaggttacttaaaagagaagaaacgcgcccataaacaaaatcagtttcatcgagataattggacttacaacgagttggatgattactatatttgtcccaatcagaaaagagtagtgttctcacattattcacaacgtaaagatagaaatggatttattcgaaacttcaaaatctatgaatgtgaagattgtacaggatgtccattgagagagaaatgtaccaaagcaaaagaaggaaaaaatcgacgtttgaatattaatccaacctgggaatatataaaaataaaagcgaatgaaaagatagaaagcaaagaaacagcctcatactatgcgcagcgaaagatagatgtcgaaacagtttttggaaacattaaacaaaatatgaaatttaaaagattccatgtccgaggagctgaaaaaatttttaaggaaatgggacttgtatttcttgcgcacaattttaggaaattagtaactagagtaaggaaatatgagggaaaaacaatcatacaaaaccaaatatag

SEQ ID NO: 420878 - DNA, 174 bp, Staphylococcus aureus; identical to SEQ ID NO: 412396

SEQ ID NO: 420879 - DNA, 582 bp, Staphylococcus aureus
atgccaaaaataattaatcataaagaaaagaaaaaacaaatcattcaatacgctttcgactccattgtagaaaaaggagttaagggatctactgtaagacaaattgcgaaattagctgatatgacacctggacagattagatattattttccgaatcattcagagttattaaatgctgtaatgtctacagtagaattaaaagtaaggaggagaattgaagcaatatttaaatctgaaaaccttactacaatagataaagcaaaagcgagtttattaacagtactaccattggataaagagagactagctgatatggaagtttggatggcgtttcgcaatgacatacatgagtatggtcaaagtacacttgatgatgggttagatcaattatgtaatagtattttgacattattaaaaaacgatcatttgctgaagaacaatgtgaatattcatcttaattcgatgaaattacatgcattaattgacggtttagctttacataaattgcttaatccaaacggtgtttcaaacgatgatattcaaatcattgttgatgaagaaatagttagattaacgaaataa

SEQ ID NO: 420880 - DNA, 387 bp, Staphylococcus aureus
atgaaaaaaaatattacaaaagtaattattgcatctacagtcatcgctacaggtcttctaactcattcaaatgatgctaaagctttctttagttatgaatggaaaggattagaaatcgctaaaaagttagcagatcaagctaaaaaagatgatgaacgtgctactaaattaattgacgaaggttttaaaggtgaaactgttaatgacctatacatcattgtcaaaaaattaagcaaaggcgatgtgaaaaaagctgtcgttaaaatgagaaatggaggacctaaagatttctatacttttgacttaactcgtcctttagaagaaaacaggaaaaatattcccttagttaaaaatggtgaaatcgactcgatctattgggatcaataa

SEQ ID NO: 420881 - DNA, 501 bp, Staphylococcus aureus
atgactttcgaagaaaaactaagtgaaatgtacaacaagattgcaaatgagattagtgggatgataccagtagagtgggaaaaagtatatacgatagcctatgtaaatgatagaggtggagaggtcgtttttaattatactaaaccaggtagtgatgaattgaattattacacgaatatatctagagattataatgtttcggaagaaatatttgatgatttatggatgaatctgtattacttgtttaagaatttaaggaatttatttaaaacagaaggacatgaaccatggacatcatgcgaatttgactttacaagcgaaggtaaattaaacgtatcttttggttatgtcgattggattaaattaagtttaggtccgttagctagagaaaactactatatgtacaaaaaatttggggttataccagaaatggaatatgaaatggaggaggttaaacaaatcgagcaatatattaaagagcaagaagaagctgaaatatag

SEQ ID NO: 420882 - DNA, 633 bp, Staphylococcus aureus
atgatttcacacttgataacggatacttcgaagaagaaacatcagacagtgactcagacagtgattcagattcagatagcgattcagactcagatagcgattcagactcagacagtgaatcagactcagacagcgactcagattcagacagcgactcagactcagacagcgattcagactcagatagcgactcagattcagaaagcgactcagactcagacagcgattcagactcagatagcgactcagattcagacagcgactcagattcagaaagcgactcagactcagacagcgactcagattcagacagcgactcagactcagatagtgattcagattcagacagcgactcagattcagacagcgactcagactcagatagtgactcagactcagatagtgaatcagactcagatagcgattcagactcagaaagcgactcagattcagacagcgattcagaatcggatagcgactcagacagcgactcagactcagacagtgattcagaatcggatagcgactcagacagcgactcagactcagatagcgactcagattcagacagtgactcagattcagacagtgactcagatagcgactcagattcaggaaaacatacacctgtga

SEQ ID NO: 420883 - DNA, 204 bp, Staphylococcus aureus; identical to SEQ ID NO: 416908

SEQ ID NO: 420884 - DNA, 1146 bp, Staphylococcus aureus
atgattcgaattcaagataatacaataagggatggtatgcaacaaagtaatgttcgaaaaagtctaattataaaaaaagaagtattgaaacaaattaacaagttaaatataaattctgttgaagtaggcatgtgtacaactatcgaggatgaatttaatattcatcaattcagagacattttaagtcctgaaaaagaattagtagtattgactaggcttaatgaaaaagaaataaaaaaaatagtcaaattgaaaattcataatttagtggtaaaaatactattgccaatatctgacttgcatataaaagaaaagcttaatttttcaaataaatattatattcagaaaatcaaagactgcttggatatattaaagaaagataaaaaaggagtagatatttgttttgaagatgcaacaaggacttctagagaaaaattgaaagaatacatggaaattatttcaaaatatcaagttagaacagttacatttgcggacactgtaggatgttcgacaccattagaatacggagatatttttaattactttgtaaaaaaatattctaacataattttttctgctcattgtcataacgatctagggttggctactgcaaatacattagctgcaattttaaatggtgcaaagcaaatagaaactacatttttgggaattggtgagagagcgggtaatgctcctattgaggaaataattactattttgacaaaaaaacaaatagaaagtacggaattcactttacccgacgtatataaaactagtattaatatttctaaaattctcgattttcaaatatcagaaaacaaacctataattggtgaaaatatatttaaacatgaatcaggaattcatcaagatggtactaaaaaaaatataaatatgtatcaatatttagttcctagtgatttaggattgaaaaattcacaagttgttcagtttccaataagtaatatttctagtaagaaaatcttgcacaataaatttaaatcaatagttaacactgaagaaattgatgaaaatatttctttctataaacttgtgaacaagttttcacctgaagtagcacctgaagatacagtggatttacttcagataataaaaaggaggagtaaagatggaaattttaaatga

SEQ ID NO: 420885 - DNA, 870 bp, Staphylococcus aureus
atgaatttggattggtactatacatttgtcattttagcgaagacgttaaactatcgattagctagtgaagaaattaatctcactataccttctatacataagcaaattaaaaatttagaacagcatctcaatgtgaaactatttgaaacttataaaaatcaaattatcttgactgaagatggtcatacatttcttccaattgcgcaaagttttattgaacaatatgaaagtggcatcaaacatatccaacttaaaaaaacgatgtttcaatcgaaattaaatgttgtcgtgtcttcatatatcgcgacattcattatgcccaaatttttaaaatctttctttaacgagcatccgtttatcgatgtttctctccatgtcaaaaatgaaaatattgaaaaagatattaataatcatacgtatgacatcgggattagcagaaatcaacctaaactaagagaagttcattctgaaaaagtatgcgaaggtaaaattgtattgattgctcccaataaagagaataatcatcttctaactgaggcatctttatttgaaaaatacaaaataataagtgataaccatccagaatattggtcatcacttaaaaataatattttaaatatttatggaaaagcacaatttctatctatcaatgatgtgcatacttcaattaaattaatcgaaatgaatcaaggtatatcattcctgcctatttatataacaacagatagtgattacaatatttcggttattaacacgaaaattttacaagcgcctatttcatttacatatatatacagcaaaaaagaaagcccagaaatattggtttttattaaatcatttaaaaagtatattgccaatgaacaattataa

SEQ ID NO: 420886 - DNA, 2610 bp, Staphylococcus aureus; identical to SEQ ID NO: 410939

SEQ ID NO: 420887 - DNA, 1815 bp, Staphylococcus aureus
atgaacaaaacaaagggttttacaaagtataagaaaatgagatatatgccagggctcgatggtttgagggcaatcgctgttctaggaattattatttaccacttaaacaagcaatggttgacaggtggctttttaggtgtggatacattttttgtgatctctggttatttaattacaagcttattactcaaagagtatgatgacacaggtatcattaaattgaaaagcttttggatacgtcgtttaaaacgtttattaccagcagtcatagttttattaatggttgtagggacagcaaccttattattaaaatcagataatatcattagggttaaacatgatattattgctgcgatattttatgtatcaaactggtggtatatagcaaaagatgttaattattttgagcaattttcatttatgccattaaagcatttatggtctttagcaattgaagaacagttttacatatttttcccagttattttggttacattattgttaacaattaaaaagcgatacaaaataggatttattttttggggagtatcaataatttctttagggttaatgatgtttatctacagtattaatggggatcattcacgagtgtattttggtacagatactagattacagacattgttactgggtgttattttagcttttttatggccaccgtttaaattgaaaaatgatccacctaaagttgtaaaatatgttattgatagcataggtagtttatcatttatagtacttatattattatttttcattattaatgatgagacgaattggatatatgatggtggtttctatttaatatccatattaacgttatttattattgccagtgtcgttcatccatctacatggatagcgaagatattttcaaatccagtgttagtatttatcgggaaaaggtcttatagtttatatttatggcattttgcagtaattagtttcgtacatagttactatgtagatggacagatacctgtatatgtgtactttatagatataagtttaacaattatatttgcagagctatcatatcgctttatagaaactccatttagaaaagaaggtattaaagctttaaattggcgaccttcttatataccacaatttataagaatggcaattgtagtaaccttgttaattccatttatgttgattttagtaggtgcattcaataaatatggtaaagacattattggagaaaaagcgaatagctttgataccactattgaagataattatttaatgcggatagcaccaattgataacattcacattgatggcttagtaagtgagaagaaaaaggaatcttccgacgtatataataatattaaacctcttttaatcggtgattcagtaatggttgatatcggtgagtcatttaagtcatcagttcctaagtctagaattgatggaaaagtagggcgtcaattgtatcaaaccttacctttagttaaagcgaattattcacaatataaaaaatcatctgatcaagtcgtattagaattaggtacaaatggcgactttactgtcaaacagctcgacgatttacttaatcaatttggaaaagccaagatttatttagttaatacacgtgttccaagaatttatgaggcaaatgtaaatcgattattagctgacgcggcgaaacgaaagtccaatgtcacattaattgattggaataagcgatcacaaggacatagtgaatattttgcaccagacggtgtacatttagagtacaaaggagtcctagctttaaaagatgaaatattaaaagcacttaaaaagaaataa

SEQ ID NO: 420888 - DNA, 309 bp, Staphylococcus aureus
atggaagaggcattgaaagatagtatgttaggtgcattagaaatggtaattgaccctgaattaggaattgatatcgttaatttaggtttagtatacaaagtgaatgttgatgatgaaggcgtatgtacagttgatatgactttaacatcaatgggatgtccaatgggacctcaaattattgatcaagttaaaacagtattagcagagattcctgaaattcaggatactgaagtgaatatcgtatggagtccaccttggacaaaagatatgatgtcacgttacgctaagattgcacttggtgtgagctaa

SEQ ID NO: 420889 - DNA, 825 bp, Staphylococcus aureus
atgcaaccacatttaatatgtctagacttagacggaacattattaaacgataacaaagaaatttcatcatatactaaacaagtattaaatgaattacaacaacgtggacaccaaattatgattgcgactggcagaccttatcgtgcaagtcaaatgtattatcatgaattaaatttaacgacaccaattgttaattttaatggcgcttacgtacatcaccctaaagataaaaacttcaaaacttgccatgaaattttagatttaggcatcgcacaaaacattattcaaggattacaacaatatcaagtatcgaatattatagcagaagtgaaagattatgttttcattaacaatcatgatccaagattatttgaaggtttttcaatgggtaatccaagaattcaaactggtaatttacttgtccacttgaaagaatcccctacctcaattttaattgaagccgaagaaagtaaaatacctgaaatcaaaaatatgcttactcatttttatgccgatcatattgagcatcgacgctggggcgcaccattccctgtcattgaaattgtaaaacttggtattaataaagcaagaggcattgagcaagttagacaatttttaaatattgaccgaaataatattattgcattcggtgatgaagataatgatattgaaatgattgagtacgcccgccatggtgttgctatggaaaatggtttgcaagaacttaaagatgtagcgaacaatattacattcaacaataatgaagatggcattggtcgatatttgaatgatttctttaatttaaatattagatattactgttaa

SEQ ID NO: 420890 - DNA, 1317 bp, Staphylococcus aureus
atgcccaaaatagtcgtagtcggagcagtcgctggcggtgcaacatgtgccagccaaattcgacgtttagataaagaaagtgacattattatttttgaaaaagatcgtgatatgagctttgctaattgtgcattgccttatgtcattggcgaagttgttgaagatagaaaatatgctttagcgtatacacctgaaaaattttatgatagaaagcaaattacagtaaaaacttatcatgaagttattgcaatcaatgatgaaagacaaactgtaactgtattaaatagaaagaccaacgaacaatttgaagaatcttacgataaactcattttaagccctggtgcaagtgcaaatagccttggctttgaaagtgatattacatttacacttagaaatttagaagacactgatgctatcgatcaattcatcaaagcaaatcaagttgataaagtattggttataggtgcagggtatgtttcattagaagttcttgaaaatctttacgaacgtggtttacaccctactttaattcatcgatctgataagataaataaattaatggatgctgacatgaatcaacctatacttgatgaattagataagcgggagattccataccgtttaaatgaggaaattgatgctatcaatggaaatgaaattacatttaaatcaggaaaagttgaacattacgatatgattattgaaggtgtcggtactcaccccaattcaaaattaatcgaaagttcaaatatcaaacttgatcgaaaaggtttcataccggtaaacgataaatttgaaacaaatgttccaaacatttatgcaataggcgatattgcaacatcacattatcgacatgtcgatctaccggctagtgttcctttagcttggggcgctcaccgtgcagcaagtattgttgccgaacaaattgctggaaatgacactattgaattcaaaggcttcttaggcaacaatattgtgaagttctttgattatacatttgcgagtgtcggcgttaaaccaaatgaactaaagcaatttgactataaaatggtggaagtcactcaaggtgcacacgcgaattattacccaggaaattcccctttacacttaagggtatattatgacacttcaaaccgtcagattttaagagcagctgcagtaggaaaagaaggtgcagataaacgtattgatgtactatcgatggcaatgatgaaccagctaactgtagatgagttaactgagtttgaagtggcttatgcaccaccatatagccaccctaaagatttaatcaatatgattggttacaaagctaaataa

SEQ ID NO: 420891 - DNA, 390 bp, Staphylococcus aureus
atgttacatttacatatattaagttgggtattagcgattattttatttatcgctacatacttaaacatttcaaaaaatcaaggcggatcaccatttttcaaaccgttgcacatgattttacgcttatttatgctgttgacgttaatttcaggattttggatattaattcagtcatttatgaatggcggggcaaatcatatgttgcttacattgaaaatgctgtgtggtgttgcagtagttggattgatggaagtgtcgattgctaaaagaaagagacatgaacaaagtcacaaaatgttttggataacaatggcattaattatcatcacaatggtattaggtgtcattctaccgttagggcctatatcaaaattattcggtattggctaa

SEQ ID NO: 420892 - DNA, 903 bp, Staphylococcus aureus
atgaaattcttatcattcaagtataatgacaaaacttcatatggcgttaaagtaaaacgcgaagatgctgtatgggatttaacacaagtatttgctgactttgcagaaggagatttccatcctaaaacattgttagctggtttacaacaaaatcatactttagattttcaagaacaagtacgtaaagcagttgtagcagcagaagatagcggcaaagctgaagactataaaatttcatttaatgacattgaattcttaccaccagtaacacctccgaataatgtgattgcttttggtagaaattacaaagatcatgcgaacgaattaaatcatgaagtagaaaaattatatgtatttacaaaagcagcgtcatctttaacaggagataatgcaacaattccaaatcataaagatattactgatcaattagattatgaaggtgaattaggtattgttattggtaagtctggtgaaaagattccaaaagcattagctttagattatgtttacggctatacaattattaacgatatcactgatcgcaaagcacaaagtgaacaagatcaagcatttttatcaaaaagtttaactggcggttgcccaatgggtccttatatcgttactaaagacgaactaccattacctgaaaatgtaaatattgttacaaaagttaacaatgaaattagacaagatggtaacactggcgaaatgattcttaaaattgatgaattaatagaagaaatttcaaaatatgttgcactacatccgggagatattattgcaactggtacaccagcaggcgttggtgcaggtatgcaaccacctaaatttttacaaccaggtgatgaagttaaagtgactattgataatattggaacgctgacaacttatatcgctaaataa

SEQ ID NO: 420893 - DNA, 3654 bp, Staphylococcus aureus
atgacaattccagagaaaccacaaggcgtgatttggactgacgcgcaatggcaaagtatttacgcaactggacaagatgtacttgttgcagccgcggcaggttcaggtaaaacagctgtactagttgagcgtattatccaaaagattttacgtgatggcattgatgtcgatcgacttttagtcgtaacgtttacaaacttaagcgcacgtgaaatgaagcatcgtgtagaccaacgtattcaagaggcatcgattgctgatcctgcaaatgcacacttgaaaaaccaacgcatcaaaattcatcaagcacaaatatctacacttcatagtttttgcttgaaattaattcaacagcattatgatgtattaaatattgacccgaactttagaacaagcagtgaagctgaaaatattttattattagaacaaacgatagatgaggtcatagaacaacattacgatatccttgatcctgcttttattgaattaacagaacaattgtcttcagatagaagtgatgatcagtttcgaatgattattaaacaattgtatttctttagcgttgcaaatccaaatcctacaaattggttggatcaattggtgacaccatacgaagaagaagcacaacaagcgcaacttattcaactactaacagacttatctaaagtatttatcacagctgcctatgatgctttaaataaggcgtatgatttgtttagtatgatggatggcgtcgataaacatttagctgttatagaagatgaacgacgtttaatggggcgtgttttagaaggtggttttattgatataccttatttaactgatcacgaatttggcgcgcgtttgcctaatgtaacagcgaaaattaaagaagcaaatgaaatgatggtcgatgccttagaagatgctaaacttcagtataaaaaatataaatcattaattgataaagtgaaaaatgattacttttcaagagaagctgatgatttgaaagctgatatgcaacaattggcgccacgagtaaagtaccttgcgcgtattgtgaaagatgttatgtcagaattcaatcgaaaaaagcgtagcaaaaatattctggatttttctgattatgaacattttgcattacaaattttaactaatgaggatggttcgccttcagaaattgccgaatcataccgtcaacactttcaagaaatattggtcgatgagtatcaagatacgaaccgggttcaagagaaaatactatcttgcatcaaaacgggtgatgaacataatggtaatttatttatggttggagatgttaagcaatccatttataaatttagacaagctgatccaagtttatttattgaaaagtatcaacgctttactatagatggagatggcactggacgtcgaattgatttgtcgcaaaacttccgttctcgaaaagaagtactgtcaacgactaactatatattcaaacatatgatggatgaacaagtcggtgaagtaaaatatgatgaagcggcacagttgtattatggtgcaccatatgatgaatcggaccatccagtaaacttaaaagtgcttgttgaagcggatcaagaacatagtgatttaactggtagtgaacaagaagcgcattttatagtagaacaagttaaagatatcttagaacatcaaaaagtttatgatatgaaaacaggaagctatagaagtgcgacatacaaagatatcgttattctagaacgcagctttggacaagctcgcaatttacaacaagcctttaaaaatgaagatattccattccatgtgaatagtcgtgaaggttactttgaacaaacagaagtccgcttagtattatcatttttaagagcgatagataatccattacaagatatttatttagttgggttaatgcgctccgttatatatcagttcaaagaagacgaattagctcaaattagaatattgagtccaaatgatgactacttctatcaatcgattgtaaattacattaatgacgaagcagcagatgctattttagttgataaattaaaaatgtttttatcagatattcaaagttaccaacaatatagtaaagatcatccggtgtatcagttaattgatatattttataatgatcattatgttattcaatactttagtggacttattggtggacgtggacgacgtgcaaacctttatggtttatttaataaagctatcgagtttgagaattcaagttttagaggtttatatcaatttattcgttttatcgatgaattgattgaaagaggcaaagattttggtgaggaaaatgtagttggtccaaacgataatgttgttagaatgatgacaattcatagtagtaaaggtctagagtttccatttgtcatttattctggattgtcaaaagattttaataaacgtgatttgaaacaaccagttattttaaatcagcaatttggtctcggaatggattattttgatgtggataaagaaatggcatttccatctttagcttcggttgcatataaagctgttgccgaaaaagaacttgtgtcagaagaaatgcgattagtctatgtagcattaacaagagcgaaagaacaactttatttaattggtagagtgaaaaatgataaatcgttactagaactagagcaattgtctatttctggtgagcacattgctgtcaatgaacgattaacttcaccaaatccgttccatcttatttatagtattttatctaaacatcaatctgcgtcaattccagatgatttaaaatttgaaaaagatatagcacaagttgaagatagtagtcgtccgaatgtaaatatttcaattatatactttgaagatgtgtctacagaaaccattttagataataatgaatatcgttcggttaatcaattagaaactatgcaaaatggtaatgaggatgttaaagcacaaattaaacaccaacttgattatcaatatccatatgtaaatgatactaaaaagccatcaaaacaatctgtttctgaattgaaaaggcaatatgaaacagaagaaagtggcacaagttacgaacgagtaagacaatatcgtatcggtttttcaacgtatgaacgacctaaatttctaagtgaacaaggtaaacgaaaagcgaatgaaattggtacgttaatgcatacagtgatgcaacatttaccattcaaaaaagaacgcatatctgaagttgagttacatcagtatatcgatggattaatcgataaacatattatcgaagcagatgcgaaaaaagatatccgtatggatgaaataatgacatttatcaatagtgagttatattcgattattgctgaagcagagcaagtttatcgtgaattaccgtttgtagttaaccaagcattagttgaccaattgccacaaggagacgaagacgtctcaattattcaaggtatgattgacttaatctttgttaaagatggtgtgcattattttgtagactataaaaccgatgcatttaatcgtcgccgtgggatgacagatgaagaaattggtacacaattaaaaaataaatataagatacagatgaaatattatcaaaatacgcttcaaacgatacttaataaagaagttaaaggttatttatacttcttcaaatttggtacattgcaactgtag

SEQ ID NO: 420894 - DNA, 3474 bp, Staphylococcus aureus
atgacattacatgcttatttaggtagagcgggaacaggtaagtctacgaaaatgttgaccgaaataaaacaaaaaatgaaagcagatccgcttggagatccaatcattttaattgcgccaactcaaagtacatttcaattagaacaagcctttgtcaatgatccggaattaaatggtagtttaagaacagaagtgttgcattttgaacgattaagtcatcgtattttccaagaagttggtagttatagcgaacaaaagttatctaaagctgcaacggaaatgatgatttataacattgttcaagaacaacaaaagtatttaaaactttatcaatcacaagcaaaatattatgggtttagtgaaaaattaacagaacaaattcaagattttaaaaaatatgcagtaacgcctgaacatttagaacactttattgctgataaaaatatgcaaactcgaactaaaaataagttagaggatattgctttaatataccgtgagttcgaacaacgcattcaaaacgagtttattactggtgaggattcattacaatattttattgattgtatgccgaaatcagagtggctaaaacgtgctgatatatatattgatggttttcacaacttttcaacgattgagtatttaataatcaaaggattaattaaatatgcgaagagtgtcacaattatattgacgacagatggtaaccacgatcaatttagtttatttagaaaaccatcggaagtgttacgacatattgaagaaatagcaaatgaactcaatatttctattgaacgtcaatatttcaaccaattatatcgcttcaataatcaagatttaaagcatcttgaacaagaatttgatgtacttcaaatcaatcgagtggcatgtcaaggtcatatcaatattttagaatctgcgactatgagagaggaaataaatgaaattgcgcgacgtatcatcgttgatattcgtgataagcaattacgatatcaagatattgcaattttatatcgtgacgagtcttatgcttatttatttgattccatattaccgctttataatattccttataacattgatacaaagcgttcgatgacacatcatccggtcatggaaatgattcgttcattgattgaagttattcaatctaattggcaagtgaatccaatgctacgcttattgaagactgatgtgttaacggcatcatatctaaaaagtgcatacttagttgatttacttgaaaattttgtacttgaacgtggtatatacggtaaacgttggttagatgatgagctatttaatgtcgaacattttagcaaaatggggcgtaaagcgcataaactgaccgaagatgaacgtaacacatttgaacaagtcgttaagttaaagaaagatgtcattgataaaattttacattttgaaaagcaaatgtcacaagcggaaactgtaaaagactttgcaactgctttttatgaaagtatggaatatttcgaactgccaaatcaattgatgacagagcgagatgaacttgatttaaatggtaatcatgaaaaggcggaggaaattgatcaaatatggaatggcttaattcaaatccttgacgacttagttctagtatttggagatgaaccaatgtcgatggaacgtttcttagaagtatttgatattggtttagaacaattagaatttgtcatgattccacaaacattagatcaagttagtattggtacgatggatttggctaaagtcgacaataagcaacatgtttacttagttggaatgaacgacggcaccatgccacaaccagtaactgcatcaagtttaattactgatgaagaaaagaaatattttgaacaacaagcaaatgtagagttgagtcctacatcagatattttacagatggatgaagcatttgtttgctatgttgctatgactagagctaagggagatgttacattttcttacagtctaatgggatcaagtggtgatgataaggagatcagcccatttttaaatcaaattcaatcattgttcaaccaattggaaattactaacattcctcaataccatgaagttaacccattgtcactaatgcaacatgctaagcaaaccaaaattacattatttgaagcattgcgtgcttggttagatgatgaaattgtggctgatagttggttagatgcttatcaagtaattagagatagcgatcatttaaatcaaggtttagattatttaatgtcagcattaacgtttgacaatgaaactgtaaaattaggtgaaacgttgtctaaagatttatatggtaaggaaatcaatgccagtgtatctcgttttgaaggttatcaacaatgcccatttaaacactatgcttcacatggtctgaaactaaatgaacgaacgaaatatgaacttcaaaactttgatttaggtgatattttccattccgttttaaaatatatatctgaacgtattaatggcgattttaaacaattagacctgaaaaaaataagacaattaacgaatgaagcattggaagaaattttacctaaagttcagtttaatttattaaattcttcagcttactatcgttatttatcaagacgcattggcgctattgtagaaacaacactaagcgcattaaaatatcaaggcacgtattcaaagtttatgccaaaacattttgagacaagttttagaaggaaaccaagaacaaatgacgaattaattgcacaaacattaacgacaactcaaggtattccaattaatattagagggcaaattgaccgtatcgatacgtatacaaagaatgatacaagttttgttaatatcattgactataaatcctctgaaggtagtgcgacacttgatttaacgaaagtatattatggtatgcaaatgcaaatgatgacatacatggatatcgttttacaaaataaacaacgccttggattaacagatattgtgaaaccaggtggattattatacttccatgtacatgaacctagaattaaatttaaatcatggtctgatattgatgaagataaactagaacaagatttaattaaaaagtttaagctgagtggtttagtgaatgcagaccaaactgttattgatgcattggatattcgtttagaacctaaattcacttcagatattgtaccagttggtttgaataaagatggctctttgagtaaacgaggcagccaagtggcagatgaagcaacaatttataaattcattcagcataacaaagagaattttatagaaacagcttcaaatattatggatggacatactgaagttgcaccattaaagtacaaacaaaaattgccatgtgctttttgtagttatcaatcggtatgtcatgtagatggcatgattgatagtaagcgatatcgaactgtagatgaaacaataaatccaattgaagcaattcaaaatattaacattaatgatgaatttgggggtgagtaa

SEQ ID NO: 420895 - DNA, 576 bp, Staphylococcus aureus
ttgaaaaaagaattattggaatggattatttcaattgcagtcgcttttgtcattttatttatagtaggtaaatttattgttacaccatatacaattaaaggtgaatcaatggatccaactttgaaagatggcgagcgagtagctgtaaacattattggatataaaacaggtggtttggaaaaaggtaatgtagttgtcttccatgcaaacaaaaatgatgactatgttaaacgtgtcatcggtgttcctggtgataaagtagaatataaaaatgatacattatatgtcaatggtaaaaaacaagatgaaccatatttaaactataatttaaaacataaacaaggtgattacattactgggactttccaagttaaagatttaccgaatgcgaatcctaaatcaaatgtcattccaaaaggtaaatatttagttcttggagataatcgtgaagtaagtaaagatagccgtgcgtttggcctcattgatgaagaccaaattgttggtaaagtttcatttagattctggccatttagtgaatttaaacataatttcaatcctgaaaatactaaaaattaa

SEQ ID NO: 420896 - DNA, 525 bp, Staphylococcus aureus; identical to SEQ ID NO: 411000

SEQ ID NO: 420897 - DNA, 576 bp, Staphylococcus aureus
ttgtcgtttcatcaagtagaagaatggtttgagatatttcgacagtttggttatttacctggatttatattgttatatattagagcgataattccagtatttcctttagcactctatattttaattaacattcaagcttatggacctattttaggtatattgattagttggcttggattaatttctggaacatttacagtctatttgatctgtaaacgattggtgaacactgagaggatgcagcgaattaaacaacgtactgctgttcaacgcttgattagttttattgatcgccaaggattaatcccattgtttattttactttgttttccttttacgccaaatacattaataaattttgtagcgagtctatctcatattagacctaaatattatttcattgttttggcatcatcaaagttagtttcaacaattattttaggttatttaggtaaggaaattactacaattttaacgcatcctttaagagggatattaatgttagttgtgttggttgtattttggattgttggaaaaaagttagaacagcattttatgggatcgaaaaaggagtga

SEQ ID NO: 420898 - DNA, 1332 bp, Staphylococcus aureus; identical to SEQ ID NO: 417657

SEQ ID NO: 420899 - DNA, 333 bp, Staphylococcus aureus
atgacaattaataaagaacgactcaatcaaactgttaaagaagatttttcaaatgcaacggaactagcagattatttagtaactaaaaatattccatttagaactgcacatgaaattgtaggaaaaatcgtcttagaatgtatacaacaaggtcattatttattagatgttcctttagcaacatatcaacaacatcattctagtatcgatgccgatatttacgattatttgcagcctgaaaattgcttgaaacgacgtcaaagttacgggtcaacggggcaatcatcggtcaaacaacaacttgatgttgctaaacaattactatcacaataa

SEQ ID NO: 420900 - DNA, 1245 bp, Staphylococcus aureus
atgactgagaacaataatttagtaacttctactcaaggaattattaaagaagcattgcataaattgggatttgacgaaggaatgtacgatttaattaaagaacctttaagaatgttacaagtgcgtatccctgtacgaatggatgatggcacagttaaaacattcacaggttaccgtgcgcaacataatgatgctgttggaccaacaaaagggggcgtgcgtttccacccagatgttgatgaagaagaagtaaaagcattatcaatgtggatgactttgaaatgtggcattgtaaacttaccatacggtggtggtaagggtggtatcgtttgtgatccacgtcaaatgagcattcatgaagttgaacgtttatcacgcggatatgtaagagcaatttcacaattcgtaggtccgaacaaagatattccagcaccagatgtatttacaaactcacaaattatggcttggatgatggatgaatatagtgcattagataaatttaattcaccaggtttcatcacaggtaaaccaattgtattgggtggttctcatggacgcgacagatcaactgcactaggtgtagttattgcaattgaacaagctgcaaaacgtcgtaatatgcaaattgaaggtgccaaggttgttattcaaggtttcggtaatgccggaagtttcttagctaaattcttatatgatttaggtgcaaaaattgtaggtatctctgatgcttacggtgcattacacgatccaaatggcttagatatagattatttattagaccgtcgtgatagttttggtacggtaacaaatttatttgaagaaacaatctcaaataaagaattgtttgaattagattgtgacattttagtaccagcggctatttcaaaccaaattacagaagacaatgcacatgatattaaagctagtatcgttgttgaagctgctaatggacctacaacaccagaagcaacacgtattttaactgaacgtggtatattattagttccagacgtattagcaagtgctggtggtgtaacggtttcttacttcgaatgggtacaaaataatcaaggttattattggtctgaagaagaagtaaatgaaaagctacgtgaaaaattagaagcggcatttgacacgatttacgaattgtctcaaaatcgaaaaatagatatgagacttgcagcatatatcataggtattaaacgtacagcagaagcagctagatatcgtggttgggcataa

SEQ ID NO: 420901 - DNA, 1149 bp, Staphylococcus aureus
atgaaaagtaaatacgaaccattgtttgataaatacgaaccattgtttgataaagtagaattaccaaatggagtagagttgagaaatcgatttgtgttagcccctttaacacatatttcttcaaatgatgatggtactatttcagatgtagaacttccttatattgaaaagcgttcacaagatgttggtattacaattaatgctgcgagtaatgtgagtgatgtcggaaaagcatttccaggacagccgtcaatcgcgcatgacagtgatattgaaggactaaaacgattagctacagcaatgaagaaaaacggtgccaaagcactcgtacaaatacatcatggtggtgcacaagcattgcctgaattaatacctgatggagacgtcgtagcaccaagtccaatttctttaaaaagtttcggtcagaaacaagaacatagtgctagagaaatgacgaatgaagagattgaacaagcaatcaaggattttggtgaagcaacacgacgtgcaattgaagcagggtttgatggtgttgaaatacatggcgcgaatcattacttaattcatcaatttgtatcaccatactataatagaagaaatgatgtatgggcaaatcaatataaattcccggtcgctgtgattgaagaagtgcttaaagcgaaagaagcgtatggcaataaagactttatagttggatacagattatctccagaggaagcggagtctccaggaatcacaatggaaattacagaggaactcgttaataaaattagccatatgccaatcgactatattcatgtttcaatgatggatacgcatgcaacgacacgtgaaggtaaatacgctggacaagaaagactacctttaattcacaaatggataaatggtcgtatgccacttatcggtattggttcaattttcacagctgacgaagctttagatgcagttgaaaatgttggtgttgacttagtagccattggtagagagctactactggattatcaatttgttgaaaaaattaaagatggacgggaagatgaaattattaattactttgatccagagagagaagataatcatcacttaactcctaatttatggcatcaatttaatgaaggattctatccattaccacgtaaagataaataa

SEQ ID NO: 420902 - DNA, 1068 bp, Staphylococcus aureus
atgtggaataagaatcgacttactcaaatgttaagtattgaatatccaattatacaagcaggtatggcaggaagtacgacaccgaaattagttgcatcagtaagtaacagtggtgggttaggcacaataggcgcaggttactttaatacgcagcaattggaagatgaaatagattatgtacgccaattaacgtcaaattcttttggcgtaaatgtctttgtaccaagtcaacaatcatataccagtagtcaaattgaaaatatgaatgcatggttaaaaccttatcgacgcgcattacatttagaagagccggttgtaaaaattatcgaagaacaacaatttaagtgtcatattgatacgataattaaaaagcaagtgcctgtatgttgttttacttttggaattccaaatgaatctattatagaaagattgaaagaagcaaacattaagctaataggtacagcaacaagtgttgatgaagctattgcgaatgaaaaagcgggtatggatgctatcgttgctcaaggtagtgaagcaggtggacatcgtggttcatttttaaaacctaaaaatcaattacctatggttggaacaatatctttagtgccacaaattgtagatgtcgtttcaattccggtcattgccgctggtggaattatggacggtagaggagttttggcaagtattgtcttaggtgcagaaggggtacaaatgggcactgcatttttaacatcacaagatagtaatgcatcagaactactacgagacgcaattataaatagtaaagaaacagatacagtcgttacaaaagcgtttagtggaaagcttgcacgcggtatcaacaataggtttatcgaagaaatgtcccaatacgaaggcgatatcccagattatccaatacaaaatgagctaacaagtagcataagaaaagccgcagcaaacatcggcgacaaagagttaacacatatgtggagtggacaaagcccgcgactagcaacaacgcatcccgccaacaccatcatgtccaatataatcaatcaaattaatcaaatcatgcaatataaataa

SEQ ID NO: 420903 - DNA, 147 bp, Staphylococcus aureus; identical to SEQ ID NO: 407426

SEQ ID NO: 420904 - DNA, 231 bp, Staphylococcus aureus
ttgaaacgatcaacgaatcaagaaaaatttcttgatacactaattagacttaatactaagattgaagaactaggaaagataaatattttaaataatcatatatattccgaatatttttttagagacctgttaaatattgtatatgggtattcacttgagaatcataataaaaaacaaaaaaatgcaccagcatttgatcttatagataatacgaataaaattattatttaa

SEQ ID NO: 420905 - DNA, 222 bp, Staphylococcus aureus
atgaagcagactgtaacttatatcattcgtcatagggatatgccaatttatataactaacaaaccaactgataacaattcagatattagttactccacaaatagaaatagagctagggagtttaacggtatggaagaagcgagtatcaatatggattatcacaaagcaatcaagaaaacagtgacagaaactattgagtacgaggaggtagaacatgactga

SEQ ID NO: 420906 - DNA, 177 bp, Staphylococcus aureus
atgatgaagatgatttatccaacttttaaagacattaaaactttttatgtgtggggttgctataaaaatgagcaaattaagtggtacgtagacatgggtgtaatcgacaaagaagaatatgcattgatcactggtgaaaaatatccagaaacaaaagatgaaaagtcacaggtgtaa

SEQ ID NO: 420907 - DNA, 180 bp, Staphylococcus aureus; identical to SEQ ID NO: 405261

SEQ ID NO: 420908 - DNA, 219 bp, Staphylococcus aureus
ttgctcactcaatatttagataaagaaatcgttacttctttagatttacatttaattaatggtgaagttattaaagtacaagaacatataaaagatgctgaaagcaaaactctacacatcattcatccaaaagatagagttgtcagtttagatcatgttttgtatttcgacattaacgttaaaggtgaaaagaataacgatagtccttatccatcttaa

SEQ ID NO: 420909 - DNA, 447 bp, Staphylococcus aureus
atgcaacgtgattatttaattcgagtagaaactgaaagcatgccagatttcaaaaggctcaatggtttaatgattggttttgttattaaaggtgaggcacatatttatgatgaaaataacatgacgcaatgcaacagtggcgacattttcatcattaaccaccgtgacttgtatcgatttcaacttcaacaagatggcatcatatgttatatccaattccaaatgaaatatttggcagacaagtttgatgatgcgcattgtctatattttcacttaacagatgcgaccacaaccaagaatatacatcaactgagaaatataatggcaagactggtttcaacacacattcgacataatgagttgtctaaattgactgagcaacaacttgtgattcagttgcttatgcatatgattcattatgtcccgcgtacatatcattcgaactaa

SEQ ID NO: 420910 - DNA, 129 bp, Staphylococcus aureus; identical to SEQ ID NO: 415048

SEQ ID NO: 420911 - DNA, 369 bp, Staphylococcus aureus; identical to SEQ ID NO: 408582

SEQ ID NO: 420912 - DNA, 225 bp, Staphylococcus aureus
atgagtttgctaaatttcacaagttttttatcagagggaacaggtatagcaattgtaggaggtttattgtcactacaattgattaatcgtaaactagttctggaatttataaattattcttctggagtgtatagtaatattcttgtagccatggctatccttattattttatgttgtcttttgacgattattgtatttaaacgttctgaaaagcagtttgaatag

SEQ ID NO: 420913 - DNA, 951 bp, Staphylococcus aureus
atgtcttatttatataacagcgatgtcaaacactatcgcgataacttctgggcaacagccgatatgacttgtcttccaggcactactactttaaatgatatgccatctactaatactaagaatgataaatcttttgttggcgggacaaaattaaataataaatacgcaagcatcggtatggattttgaaaatcaggacaaaactttaactgccaaaaaatcatatttcatattaaacgataaaattgtcttcttaggaactggcattaaaagtactgattcatcaaagaatccagttacaagtgttgaaaatcgcaaagcaaatgggtataaattatttaaagatgatattgaaattaccacttcagatgttaatgctcaggaaacccattcagtctttttagagtccaacgatactaaaaagaacattggttatcatttcttagacaagccaaaaataactgtaaaaaaagaaagtcatactggtaagtggagtgaaattaataaaagtcaaaaaaaagatgacaaaaaagatgagtattatgaagtaactcaaacacataatacatctgacagtaaatatgcatatgttttgtatcctggtttatcaaaaagtgattttaaatcgaagaataataatgtaagtattgttaaacaagatgaagattttcatgtgataaaagataatgatggcgtatttgctggggttaattatagtgataatactaaatcttttgatataaacggaattactgttgaattaaaagaaaaaggcatgtttgtaattaaaaagaaagatgataaagcatataaatgtagcttctataatcctgaaactacaaataccgcttcaaatatagaatcaaaaatttttattaaaggttacaccataactaataaaagtgtcataaactctaatgatgctggtgtaaactttgaattaactaaataa

SEQ ID NO: 420914 - DNA, 777 bp, Staphylococcus aureus
atgcaagcattaaaagtaatagaacaaaacaacatacattacgtagacagtagagaagtagcagaaatggtaggaaagcgacacgacaatttagtaagagacattaaaggttatatcaaggttttagaggactcctcaaaattgagtagtcataatttctttgaagaaagcacctatgttaattcacaaaacaaagtacaaccttgttacctactaactaaaaaaggatgcgacatagtagcaaacaagatgacaggtagtaaaggcatattgttcacagctacttatgtagatgcgtttcacaaaatggatgaacacattaaacaacaagcacaacttaatgtaccacaaacaccaatgcaagcattagagatgatgttcaaagcgcaaaaagaccaagaacagtttaaccaacaaatgcaacaagaaatcacaggtattcgtcacattgtcggtattgaaacgaaaaactggcgtaacgacacaaacaaaatgttgtctgcgattgcgcaacatttaggtggcggagcaatgcatcaaaaagttaagtctgaagcttacaaagcattagaagaaaaaggacgctgtaatttaaaaattcgtatgcagaaccgcaaaggcaaaatgctagcgaacggcgcaacgaaaacccagattaacaagttgtcaaaattagatgtgattactgatgaacctagattggttgagatatacatttcagtgattaagagcatggcgattaaatacggtgtagatattagtcaatttgaaatttaa

SEQ ID NO: 420915 - DNA, 675 bp, Staphylococcus aureus
atgatttcacacttgataacggatacttcgaagaagaaacatcagacagtgactcagacagtgattcagattcagatagcgattcagactcagatagcgattcagactcagatagcgattcagactcagacagtgaatcagactcagacagcgactcagattcagacagcgactcagactcagacagcgattcagactcagacagcgattcagactcagatagcgactcagattcagaaagcgactcagactcagacagcgattcagactcagatagcgactcagattcagacagcgactcagattcagacagcgactcagactcagacagcgactcagattcagacagcgactcagactcagatagtgattcagattcagacagcgactcagattcagacagcgactcagactcagatagtgactcagactcagatagtgaatcagactcagatagcgattcagactcagaaagcgactcagattcagacagcgattcagaatcggatagcgactcagacagcgactcagactcagacagtgattcagaatcggatagcgactcagactcagacagcgactcagactcagatagcgactcagattcagacagtgactcagattcagacagtgactcagatagcgactcagattcaggaaaacatacacctgtga

SEQ ID NO: 420916 - DNA, 225 bp, Staphylococcus aureus; identical to SEQ ID NO: 410345

SEQ ID NO: 420917 - DNA, 693 bp, Staphylococcus aureus
atgatgcaggatataaagattagttatgataaagcatttatctttttgacgcttacaacaccgaacgtagtagctgaaagattgggagatgagattaaaagatataataaatcttttgataaattatttaaacgaaaagttgtaaaaagagtagtaaaaggttatgttcgaaaattagaaataacttataatgagaaacgagatgattatcacccacattttcatgtgcttattgttgttaataaatcatattttacggatgtaaaagcttatttgaatcaaaaagagtggttgcgtttatggcgtgaggcaacaggaatttcagaaattacgcaagtagatgtgcgtcgggtcaaagagcaaaatagtaatgagttgtatgaaatggctaaatatacaggtaaagatagtgattatttatctaatgaaaaagtgtttaaagttttttatgagtctttaaaaggtaaaagggcatttgcatatggtggattatttaaagaagttagaaaaaagcttaaaaatggcgatttagattatttaaaagaggttgatccaacaaaatacatatatcaaattttttgtggttggaatcaaatgcattattatgcgagtgaattgagattgatgagtgaagaaatgcaaaaagaagtgaatcatcaaatgataaatgaattagatgataaatatttataa

SEQ ID NO: 420918 - DNA, 225 bp, Staphylococcus aureus; identical to SEQ ID NO: 420803

SEQ ID NO: 420919 - DNA, 513 bp, Staphylococcus aureus
atggttagttgttgttcaatcgatccatacactgaattcgaagtcattattattggtgccggggtgccggaggtttctcttgcctttcatttgacttcatacggcataaggacggcacttgcggatgaacagaacgtggataacagattaaaggactttttaagaacttttcaagaattgattgagcgcgattcgggtatgccgtggacgttacaggcaataaaagaagatatgcacctcatcctttttgacggtaccattacccttgaaggtgaacatgctgtccgtattgatgaacacaaaattcggggggatcgtatggtcgtaccatttgatacgtttaaacaaataggaaaacctagaaaccaaaacgacatccattttaaaaacgatccttttcaaagagttacgaatgatttatggatcacgaatccctcattgtcagaagtggatcaagaacaaatatggcagactggagactatttttcaaaacaccttcagaacattgaataa

SEQ ID NO: 420920 - DNA, 681 bp, Staphylococcus aureus
atgagtttttcgtttctcttcattctgaccgctggaatggttgcggcctttaatccttgtggtatcgccttgcttccttcttatatctcctatttaattggaggcgaaacaaaggatcattcgttccgctatgcaatttttaaaggattagggcttggtggagcgatgaccacggggtttttaacgatttttgtattggctggtttgttgataggaggattgggaagcgcactaacaggaatttttccgattctttcattggttatgggtatactcattgctttattggggttgggcatgctatttgggaagcatttgccgattaaaataggatcttttcaagtcaagccagggaaatggtctatctatttttacggaatagcctatgccgtgacatcacttggttgtaccttgccagcctttatgttggtggtctctgcatcgctgaatgacaatagcgtaacggccgtgatcatcaagttcatcatctactcccttggtatgggaattgtggtgacagcgatcacgatggtctcattgatttcacgacaattggtacagaagtttctgcacaactatatgagttctatccaaaaaatagcagctgttgtgattttcctctccggtttgtacatggcttattactggtatttcggttctggtggcatttgtacattttaa

SEQ ID NO: 420921 - DNA, 222 bp, Staphylococcus aureus
atgaaccatgaaactaaacaatcagattggcatacagttgctagttgtttagcatcgcaaagttatgtatcaattgtaaaaggattagtacatcatttcgcagcgattgaaaatgaagaaatacttgataaaatctatgaagattttatgaatgacgattgtattacaacaatacttaacaatgatttccaagatattattaattattacttatcaaaataa

SEQ ID NO: 420922 - DNA, 342 bp, Staphylococcus aureus
atgaatcatacgggggtgtttttttctatgaaaagagtttcttattcagtagaaacaaagtataaagcagttgaaatgaaagcagcaggattttcaacaaaagaaattatgaaagaattaaatattagaaatagaacacaagtgaaaacttggtggcgatggtatcgaaatggggaaagttatagattttcacaacacgttggtaaacaatatacctacggtaaaggattagaagagccgtcagaagtagaacaattaaaattagaaaataagagaaaagatatagaattggatattttaaaaaagtacaaggcattggagaggaagtggtaccaacagtag

SEQ ID NO: 420923 - DNA, 843 bp, Staphylococcus aureus
gtggtaccaacagtagtcatagatttagtggatcaattaaaagtaaaatattcaatcaaattgatactagaagtattaaacatacctaaatcaacatattaccgatggaaaaacaaaacccataaaaatgataccgtaacacaaaaagtcattgaattatgtaaagctaaccactatacctacggttatcgtaagattacagcattgattaatcaatgttatacctcaccaattaatcataagagagtacagagaatgatgcagaagcatcatttgaactgccgagttagacctaaaaagacgacaagaataggtaaaccgtattataaaacggacaatttattacaaagacaatttaaagcgagttatccaatggaagtattaacaaccgatattacttatttaccatttggtcattctatgttgtatttatcttcgataatggatatttataacggagaaattgtggcgtataaaatagatgataaacaagaccaaagtttagttaatgatacattaaatcaaatcgatatacctgagggttgtatattacatagtgatcaaggcagcgtttatacatcttatgcttattatcaattgtgcgaagaaaaaggcattatcagaagtatgtcccgaaagggaacacctgccgataacgccccgatagaaagtttccattcctcgctaaagtctgaaactttttacatcaataatgagcttaatcgctctaatcatattgtaatagatattgtcgaaaagtacattaaaaactataataataatcgaattcaacaaaaactaggctacttatcccctgtaaaatacagagaattaatagcctag

SEQ ID NO: 420924 - DNA, 1050 bp, Staphylococcus aureus
ttgaagaaaaaacaaataattaatttaatcaagtactattcagaaaataacgatatagggtttaaaaaagaagcttttaatatcgcgaattcatttgaaaagaatggagatactcaattagctcaatatataatgtctttaatgtccgatactaatgtttttacaccacaaatgcaaaatcataaatatgaatatataaaaaaaatgaacattagcaataagtctttgcctttacctgaggtaattaaagaagatgtaataggcatcgtaaatgctattggtcataatgctggaattagtaaatttttatttgaaggagagccaggaactggtaaaactgaaacagctaaacaaatatctagaatattaaatagagagttattttacgttgattttgattctttaatagatagtaagcttggacaaacttcaaaaaatgtatcaaatttatttaacgaattaaatactataacttacccacaaaatgttattattctctttgatgaaatagatggattagctatgaatagaataaatgaaagagatataagagagatgggaagagctacaactagcttattaaaaggattagatagtgttaatgaaaatcttgttattattggaacgacaaatctttttaaagattttgacaaagccttagttagaagatttgatgcaactattaattttaatagatatgaaaaacaagatctcattgaaattgcaatttttattgctgaagaattattaaatgtttttaagtttgctggtagaaacaagcgactattaaaaaaaatacttgaaacaagtgacaaattaccttatcccggtgatttgaataatttattaaaaacatcttttgcttttagcaaccctaataatgaatttgattacttaaaaaagatatttattaatatcttaggtaaagaaaatttgacattggatttcttgaaagataatagatacacaatgagagaaatcgaattattgacaggtatttcaaaaagtcaagttgctagagaactgaagggagataacacctatgaataa

SEQ ID NO: 420925 - DNA, 2214 bp, Staphylococcus aureus
atgaataatattttacgtttaaaaggtactttaaattataagaaaaatagtagtaaaatggggaaccgaaatttacctaaaaatactacagtgaccagtgaacatttaaaaaagttagaaaaagaattaatacaattaattaatttttgggaaaaaaatcttttgtttgaaggcgctttagtaagcgtatattataaaacagttattgctaaaagtaacaggattaaagcatacatgaaaggtaagtctagtagctctaacgattcaattgttggagctagattcgatgatgaaaataataataagcatataattacacatttagttgatttaaacacattacgcaatgatgtcaaaaatttaaagatagttattaaaattgttaatgaacgttttaatggagaaatcgatgataatattattaatcaagttaatagtaaagagattttaattgaaaatatttcgaagacaaaatttacccaatatattatagatagctattatatagaaaaatttgatgtatattataatattgaatttcaagataaaaactccattattagcttatttgatgtaaaccaaaatttaaagactatgctagaaaatttaggaataactatccctaaaagtcgtatttatgacaatacaactgttttaatgatgccaaatgaaattgaattattaaaaaataaagctgcatttttagtctcaatggcagtaactgatatttcaaaattagacaggtttaatttcgaaacaattgaaaatcatgaaatcatgagtattcctgaacctaacaaggaggttactattggtgttattgatacgttatttgataaaagagtgtatttttctgaatgggttgaataccatgacttagttagtaatgatatagaaaagaatgccaaagattatgaacatggtacagctataacttctatattagtagatggtcctactattaaccccgatcttcaagataactgtggaaggtttaaagttcgtcattttggagtagctgtagctaataacttcagttcctttaatattatgaaatcaatatcagatatagttattaataatccagatattaaggtatggaatttatcacttggatcaaataaagaaaaacctaagaattttatttcacctgaagcttctattttagataaaattcaatatgaaaatgatgtaatatttatagtttctggtacaaacaaacccaaaaatgtagaaagaaatatggctattggggcgcctgctgattcaataaactcaatagtagtaaatgcagttgacatagaaaaaaatcctgcaacatacacaagggaaggtattgtattgtcattttataataaaccagatgtgagttgttttggtggagataaaactaaacttatgaaagtttgtatgccattaggggaagcaaatgtccaaggcacatcatttgctgcaccatggataactagaaaagttgcatatttgatagaagtattaggattttcaagagaggaagcaaaagcattaattatagattctgctacgacgtggcatgaaaataaatataagtctaatatagtggggtatggagttgtacctatagatattaatgaaattattaaatcgaaaaatgacgaaataaaatttattatttctggtgagtgtaaaaagtatgaaacttattcccattctatacctgttcctgtgatcgataatgagcacccatatttagcaaaagctacgttatgttattttccattttcagaacgcaatcaaggagtagactatacaagtacggaattagattttaagtttggaagaatagataacaaaaataatataaaacccattgataagaataagcaagatatagaaggtaactacttcaatgaagatgaagcaagaaagaattttagaaaatgggataatgtgaaacattatactgaagaattaaaagctcgaaatagaggtagaaagagttataaaaatgggatgtggtcatttaatattaaagtcaaagagcgagttgacaaaaagtatggtgaaaatatcaaatttggggtagttattcgtttgaaagaaatagaaggccgaaatagaatagaagattttatttataactgtcaattaaaaggttggttagtagaacaagttaatgtagaaaataggatagaaattcataatcaagctgaagaagaaattatatttgactaa

SEQ ID NO: 420926 - DNA, 180 bp, Staphylococcus aureus
atgattttagaaaaaatattacctatattatctgatcgcgaacgagaaatcatacaatgtacgtttattgaaggtttgagtcaaaaagagacaggtgagcgtatcggtttaagtcaaatgcatgtatcacgacttcaaagaacggcaattaagaaattacaagaagcagcacataaatag

SEQ ID NO: 420927 - DNA, 1011 bp, Staphylococcus aureus
atggcgacaactaaattaagtgcgactaaatcaacgtcacgggccattaattatgctgaaaaacgcgcggttgaaaaaagtggtttaaattgtgatgtcgactatgccaaatcgagttttaaagcttctcgtgagttatatggtaaaaccgatgggaatcaagggcatgtcattatccaatcgtttaaacctggcgaagtcacgcccgaacaatgtaatcaattaggcttagcactcgctgaaaagctcgcaccgaatcatcaagtggcggtctatacgcatgcagatacagaccatgtacacaatcatattgtgattaattcaattgacctcgagacaggtaagaaattcaataacaataaacaagcgttacgtaatgtcagaaatttcaatgatgaggtttgcatggaacatggtttaagcgtgccagaaaaggacacagcacgcttacgttatacgcagacagaaaaagcgattgctgaccctaatacgaaatcaacagcccaatattcatggaaagatgagattagagaggcgatagaccaatcacaagcaacgaatatggatgaattcaaagaccatttaaaccaatatggtattgaaattgaacgtgtcacacccaaaagcattacctatcgacacttagccgaagataaaaaggtgcgtgggcgtaaactcggcgaagattacaataaaggaggtatcgaagatggctttgaaagacaaattcaacgacggagacaacaagaacgagactcagacaccgaatgccagccaaaacgaccaacttcaagtcgtgatgaatcaactgaacgagatacaggcgtcactcaatcagattgggaccaattcgcccaagacacaaatgagcttgagcgtagcagacaagctgcagaatcagcaagacttgctgatgaaaaggctcgaagagatcgagaagagagagaacgagcgaaacaagcgtcacgacgaattattaacaacgatcgagaccacggcctcgaactttaa

SEQ ID NO: 420928 - DNA, 198 bp, Staphylococcus aureus
atggaaaacactaaaggaacaatgattgtaagtgcgatattattagttgtttgtttagcaattgccagttttttaattttccatgaacaacaaatttttccaagtttgatttttttaggattagcttttattgatggcactaaattttatctgtcttatcaaaaattgaaagaacgtgatcatcatggcgacaactaa

SEQ ID NO: 420929 - DNA, 255 bp, Staphylococcus aureus
ttgttaaaacaagatttaatgtatagtgtactgttatcgattaaagaaggagaaagtgtagattttaaaaccttaaatgtgagtgaaaaaacttttttattagcactcgagagtatagcgagacaagatttagctgaaaatgtagaattgttttataataaatgttttccgatttgtgggacaacacgatacgcagagttaacagaaaaaggacataaaaatatttctgaatatcaaatagaatataagtattaa

SEQ ID NO: 420930 - DNA, 450 bp, Staphylococcus aureus
atgaaacggattaaattaaatttctttgatttagatgaaattagtagtagagagtttgatttctcagttttaatcattatgttatgtatcgcatttagaaattacttcagaggttatggttttgctattcatttaacttccgacttattttttgaaatgacattgctattactcccagtatcacttttactcttaaataaaaagacaaatgaagaaatcgctaatacattaaaaagtaatatacctctcatctttccaattttagggggtatgttttatataggtatagggagatttttaatatatctcgctcacaagatcccaatcattgacttcatatttagtctttttggattagtcatgttaattgctggtattataaacattttaatttcaatattaatattcgttacaaaacaacgcgtaaaacaatcagcgtctaaaaaatag

SEQ ID NO: 420931 - DNA, 597 bp, Staphylococcus aureus
atggtatatcttgaatgggcaaaggcagatagaaatattcaatatcgtgtaattaacgccattattaaagaacgtatttaccccgagcaaacatttatttcgcaaaaaggatctttaattgaaattcagtatcatatgcatgtgttgactattgaagttgttagaaaaagtgcattagaacgctatgagtttacaggtgatattacttatttaaataaaggtgaaacgtcattaattataactttagaaggtttattagatgtgttgaatcatgactttgatatccctatttcagagcgactacgcgaagagttaatacacagtcgagatagtttagttgaaacatataagcaaatgtctcacagacaaacgttaataagtcaaagttttaaattttcaaggttaccacaagatattaactttttttcatggttacaacatgtaaaagatagtgataagacagatgatttaacttattctgagagtttggtaccagaggggcatccaacacaccctttaaccaaaacgaaattgcccttaactatggaagaagtacgagcatatgcacctgagtttgaaaaagaaatccctttgtaa

SEQ ID NO: 420932 - DNA, 492 bp, Staphylococcus aureus; identical to SEQ ID NO: 405184

SEQ ID NO: 420933 - DNA, 225 bp, Staphylococcus aureus; identical to SEQ ID NO: 410345

SEQ ID NO: 420934 - DNA, 225 bp, Staphylococcus aureus; identical to SEQ ID NO: 410345

SEQ ID NO: 420935 - DNA, 225 bp, Staphylococcus aureus; identical to SEQ ID NO: 410351

SEQ ID NO: 420936 - DNA, 1038 bp, Staphylococcus aureus
ttgaaaagcttttcgaaaaaaaatataggtttagcaatcgctattaaatcaacacaacaattcgaaacgatgaagcaattaatactaacatttttacaaggcaatcaagactataagacaagcaagaaattagttaaatttatgctcgtattttgctctaactctatgacagcagaagaaattcatttatgtcatcttaaaattaaaaacaaaaataaagaaattaaatatagtgtgacagtcgatggctttttagaaacttattcaaccgtggaacaagtttatgatgtcatgcagcgtcttaaattccattattactttattgatattgaaaattcaaaaactgcaacacatcttatcactaaaaaccaacactatcatcaaactgacactcattttgaacagtataagaaatttattttagattcaggtatatcatcaacacaatttgtatataataacctgtctgtaagtggatttaaatatactaatgatggtaagaatccaattcaattatctgacatagtgtatcacttaatcgcattattgcgatatggcggtggcattagctatcaattattagatgaccattcaaattatatttccttgtacaacaaatatggtagccccctaccattaatgcatttatataaaatgtttagaccttttgttaatgaagacattgaaattacaaataattatgtattgagtcgtaaagataataactaccatttcttattattcaataaaattaatgaccgatatatgtcagacgtaaaacaagacttcattttccataatgaattacctcaagactctttgatgattattaaaacattgaatcatgaacatggttcaattcaacatttgcttccaacaagcgatcaacttgtctatatagaaaaagaaattctagatgaattagacaaaacgaattaccctaaaacggagcttgcagttcaagaagaaactggtcgtacatttgaactcaagttaaatcacgacgaggttaaatatatttgctttaaaccaagctaa

SEQ ID NO: 420937 - DNA, 207 bp, Staphylococcus aureus
atgttatattggcggggccccaacacagagaaattgggaccccaatttcaacaggcaatggaagttggggacggggcccaacacagagaaattggaaccccaatttcaacaggcaatggaagttggcggggccccaacacagagaaattggaaccccaatttcaacaggcaatggaagttggggacggggcccaacacagaagctga

SEQ ID NO: 420938 - DNA, 795 bp, Staphylococcus aureus
atgagggattcaaaaagagtagtattgtacataagcattatggtgttgagtatttttataattggttgtaatagttcaagcgagaatgcaaaaaaatcaaaagaagactcaaaagaagaccaaattaaaaagagctttgcgaaaacattagatatttacccaatcaaaaatcttgaagatttatatgacaaagaaggatatcgagatggcgaatttgaaaaaggtgataaggggacgtggacgatatatacagattttgccaaaagtaataaagcgggtgaattggatagtgaaggtatggtattacatttgaatagaaatacgcggacggctaaaggatattactttgtaagaaaaacttataacgaagaggataagatgccgcaaaggaaagattatcgtattgaactaaaaaataataaaatagtccttttagataaagtagaagatgaaaaactcaaacataaaatagaaaattttaaattttttgggcaatatgcagattttaaagacttgaaaaattatcaaaacgggaaaatatcgagcaatgaaaatgttccatattatgaagcagagtacaaaatagaaaatagtgatagaaatgtaaaaaaacttagaaatgtttatccaattacaaccagtgaatcgccaactttaaaatttcatatagatggggatataaaaggtagctcgataggatataaaaaagtggaatatatcttttcaaagcaaaaagataaccaaatttctgtcagtgattttttaaattttaacccatcaaaagataatcagtag

SEQ ID NO: 420939 - DNA, 501 bp, Staphylococcus aureus; identical to SEQ ID NO: 405188

SEQ ID NO: 420940 - DNA, 255 bp, Staphylococcus aureus; identical to SEQ ID NO: 412441

SEQ ID NO: 420941 - DNA, 261 bp, Staphylococcus aureus
atgagtggtacaacgatacgccgtaaagatacggacaaaaacaaactagggttaactttagaggattatgtcaatgctcagatattggcttgtagtgaattggatgtaccagtatatgatgcttatcacacagattatttcaaaccatataatccagcatttagaaaatctagcatgcctgatggattacatcctaatgaaagaggtcatgaagttattatgtatgagcttattaaaaattattatcagttttatggatag

SEQ ID NO: 420942 - DNA, 156 bp, Staphylococcus aureus
atgagttcggttaaagatcagcataaaaaagctaaagtattaccagaaacaggtaatgaaaatagcgactcaaataacgcaacgttatttggcggattattcgcagcattaggatcattattgttattcggtcgtcgtaaaaaacaaaataaataa

SEQ ID NO: 420943 - DNA, 300 bp, Staphylococcus aureus
atgaattgggaaattaaaaatttaatgtgtgatttaaagatattgaaagaaaagtttgaggatttaaaggataatcatggctcgcattttgaagatttatatctacatgagccaaatcataccttaaataaagacgatgttattaaagaagggctttcatatcatgagagacgtattcacaataatcaaatgtttgatttattccatctctatatagagcagttcgataatattatcgaaaaatttcatgaattagaaaaagcgtcatctttcgccgaccaaagccaagataacgcataa

SEQ ID NO: 420944 - DNA, 993 bp, Staphylococcus aureus
atgaaaccatttaaaacatatgaggaacaaattcaaatattgaagaatagagggttaaccatttctgatgaagataagggtgatttagaaaatgaaaattattataatgtgattaacggatataaagatttgtttttgatgaaaaagccagcatctgatgagtttttagaacctgaaacatatattacaggtacatcatttaaagaagtattttcactttataaacttgatcgccgattacgaaatactattattgaatatttgttagtctttgaaacacatttaaaatcaagaattgcatattattttagtgaaaaatatagtgagccacattcatacttatatttccaaaattattcagataatgaagattctgaaacagtattaaaaacagtagcaacactaagtagtataatgacgaaaactaataagcaacccataaaacactatattagccatcatgatggtgttccattttgggtattaatgaactatttaacgattggcaatgtttcttacttatttcaaattttagacgaagatataaaaaataatatatctaaaagttattcagataaattcaaaagagagtatggatatcaagttaatatacaaagtaaagacattgaggggatagtgaaacaagttaatttttttagaaatgtttgtgcacatgaagaaagattatatgatttcaaaataaataaacagattaactctaaaaatttaacacataattataactctatatctaataagcacattaataacaataatttacaatcgaaactgtttgatatgttagtatttttgattttctttttgaataaaagagattatgaaaacatgataaaacaagtagatgaatatatagattattatttaacagatatatgctcgattactaaagatgacatttacaacaagatgggttgcttattgaataactttactgaaattttagatttaaagcttgatacggctagtgattaa

SEQ ID NO: 420945 - DNA, 789 bp, Staphylococcus aureus
atgattgagtttataaaattgaattggacttactttttggtaggagcaattggaggagttattgcagttgcatcaattcttctattacaacatgccacgacgaactgggttgagtcattaaagatcattatctccatacttgctttattctgtaccgttcttggtgcttattttggtgctaagatttcaggggataatgctagaaatcttgaaattgataggcaaaatagagaaaagaatgaaactattctaagggttaaaacattacttgaaatgaatttagacaacttgcatattttacataatattatatgtgatttttatctgataaaaagcaacgaaattttattagacttaatagaaaatagaaaagaattatataatgataactattcacctaagaaaaagcaaacaggcgagcttaaaacaattgaatacattgaaaaacacttgaacaatatgattaagtcacatgattgcaaaagaaatatttataatgtaattgatgacataaatgatctgattaaagaaataactaaagacttactgtaccttgaagaaaaagaattactaataatttttctattaaaacagactctagaaatattaaaaagccttattgattataatagtgaagaaaatgtttatactttgcctaatattgaagagcaaagagattatgaacttttaaaagggcactttatgcattttagtatattattcatagatttaaatgagataattttaaacaaagatttaaaatcacaacttgagcaatctgaagtttaa

SEQ ID NO: 420946 - DNA, 255 bp, Staphylococcus aureus
atgaatactacagttacaatttttgatgaagatagacaggtaaagcaatttacatccaatacaccggaagaagccgatgctaagttagaattattgaaagatgataacggcaaagagtataaagttgaggtaactacaggtactggttttgtagttgaatacgaagaaagtgcttcgtttaaagcaaatcatcaaaggttgaaattgaatttaaattatttcgatgacattttttatgattcaactaaagcataa

SEQ ID NO: 420947 - DNA, 165 bp, Staphylococcus aureus
atgagtcaaacggaatatcaaataaaatctggcaatataaaaggtaactctgaagaaacaagtacagtatctaatataagttatgaaatagaaaacgcaaataacagtggtttaaaacaaaataaaattgataaacaaattaaaaagttacaagaaaaaaaataa

SEQ ID NO: 420948 - DNA, 267 bp, Staphylococcus aureus
atgactaaaaactataaagacatgacgcagaaagaattaagaggcttattatctgaaaaaacctcagaactgtatgatttagcggaagaaattaagaaagaaactgaatttgatattttgcttttttcatcagtaggagttatcgacggagattatataacaagttcaagttctgtgattgggcatactttcgatcttgcttgcttattggataacactaagagttataaagagattgtcaatgctctccaaatatataaatcataa

SEQ ID NO: 420949 - DNA, 1146 bp, Staphylococcus aureus
atgagtaatacacaaaagaaaaatgtgccaaagttgagattcccagggtttgaaggcgaatgggaagagaagaagttagaagatattataaaagttaattctggaaaagattataaacatttggataaaggcgatataccagtctatggtactggcggttatatgacaagtgtttcagaaccactaagtgaaattgatgctgttggtattgggagaaaagggactataaacaaaccatatttgcttgaggcgccgttttggacggtggatacattattttattgtacacctaaaaaagaaacagacatactatttatattaagtttatttagaaaaataaactggaaagtatacgatgaatcaacaggtgtgccaagcttaagtaaacaaaccattaataaaataaatagatttgtccctacaaataaagagcaacaaaaaatcggtgacttatttagtaaactcgaccgacaaattgaattagaagaacaaaaacttgaattacttcaacaacagaaaaaaggctatatgcagaaaatcttctcacaagaattgcgatttaaggacgagaatggaaatgattatccggattgggagaaaaagaaactaaaagaaatagcttgtgtttatacaggaaacacgccaagtaaaaaagaaaatatatattggaataagggtgaatacgtttgggttacacctactgatattaataatagtaaaaatatttatgaaagtgaacacaaattaacccaagaaggttataaaaaagcaagacaattaccagaaaatacactattggttacgtgtatagctagtataggaaaaaacgcaatattgagaaaacagggctcgtgtaatcaacaaataaatgcagtagtcccatttgaaaatataaatatagattatctttattatatttctgattcattatcaacgttcatgaaatatattgcaggaaaaacggctacacaaatagttaataaaaacactttcgaaaatttggaaatttatttagcttcttttgaagaacagaataaaatagcagatttaattagctcactagaagaattaattgaaaagcaagcatcgaagttaattaaaatgaagagtcgtaaacaaggagtgcttcaaataatgtttatttaa

SEQ ID NO: 420950 - DNA, 627 bp, Staphylococcus aureus
atgactaaagaaaaagatttaaaatatcttatggaaaagaaatcaggtagtgtaaaggctttttccgaagaaattggtttagcttatacaactgtaagatctattttagaacgtggagtttttaatgctaaagtagaaaacgtcatcaaaatttgcaatggtctaaatataagaccagaagatattatggatattaaacaaacaaaacctatcgaaccccaaattgaaactttaccagttaaaaagataccggtcgtttcaaaaatatctgcgggcttacctatctattgtgaagaaaatttagttgattacatatacttttctagagataaattgaacgacgaaaaagaagaatttggtctaaaagtatctggtgatagtatgaataaactttttgatgaaggtgatgtagttgttgtagaaaaagattctatcgtcgaaaatggtcaattaggtgtagtcatgataaatgggtataacggtactgtgaagcgtataagatacaatggagaccaaatcatattaatacctgaatcgaacaatcctaatcactatccacaagtatatggtaaagacgatgaagttaaaattgtaggtagagttgtagcaagtgtgaaaacgtattga

SEQ ID NO: 420951 - DNA, 216 bp, Staphylococcus aureus
atgttgaagaatttcaacgacattagaaaagataaaaaagtatctctggtagatttagctgatttgttagaagtcagataccaaactgtagccgataaaatcaatggcgcttcagattttaaatttggagaagctctacttatcaaaaatacgtattttccagagtatgatatcgaatttctttttgaaaaagaaaaagaaaaacaaacatcttaa

SEQ ID NO: 420952 - DNA, 756 bp, Staphylococcus aureus
atgtataaggactattcttcgttagtacaattccagttagacaaaattactaaagtgcctgatattaaagtaaacatacctactccgactctaaaactggctgatatcgagcatttaacaactcttagtcgcactataaattctttggagcaccaaattaaagttgctacaagtttttctaacagctcttaccttagaaaaaatattgagattgctcgtaaaatttcagagcgtacttccgttattcaaaattcacctaagttaaatatagagaagataaaaagcgcaaccgaattaaaacccattaatataaaaatacctgatttttcaaagtcattattttctaaagaaacctctgactttgttaaaaaatcgatagatgtagatagtaaaactatagatacgactttcaatcttttgcgttacgaatatgtcaaaaacacgcttattaacgctaaatctatccgtcggatcgaatgggaacctgtaacggctgggttcagagaatacatgacacaaatacaaacctataatgctcaatgtgattctaatcaggacaaagaaatccaaaagttatcacctcagctttctttattaatatcgtcattatttcaaagtagtttatttgaagatttaaagccttttataacttttcttgcaaatgaacttttaccttttatgcctcccgaaattcgaaacactatgttgttagctataatttttgtggctgcttttaacaagttggataaagactaa

SEQ ID NO: 420953 - DNA, 654 bp, Staphylococcus aureus
atgacaactacaacaatcacgggtgatacgtgggatgtatattttaatgatagacgttatagaaatttgttaggagattttgaagatctaataacagaaacgaaatcattaattagacaaggctataaaacggatgttattaaaaataaaatggataataaggctttgagcctacaatctaaattcaaagaattaggacaaatattattagatgaacatgaagaaaaaatagtagaaatccaacaaaaagagaaagaatcttcatatgagaatccacaagttgaaatgttgaaacgtcaagacatagaggcgaaagtaaatttaattgatgcagaagaactatttaatcttgtttataatgccaatcctaaaaccactaatgtatatgaacttaatatctataaaaaagcgatagaaagtcgtcttactgaagatgaaaatgtaaggttaaaaccttactttgatgtattggtagaaaaggtaatttatccatatcgaaataatgaagaatatcaaaaattagagtataactataatgttttaagacagtttgggttacaaaataacgggcaaccagtcatcaaagatagtgatggcgatatagaaattattaacattcaaagtaagtataacgaagtgttccgtaacgcttaa

SEQ ID NO: 420954 - DNA, 342 bp, Staphylococcus aureus
atgcaaagtatcgcagaaaaagagacgtatcatttacccaccgaacacctgcaagttttcaatgtgataaaaaatacgtccaataagtatattactaaaactaaaatcttaaatcaattgggatatgaatataattcaagcaatgaacgatggttacgaagagtaatcaattcattagtatatgattatggctatcctatcggatgcagttataaacctagtgaacgtggttattacatcattacgacagaacaagaaaagcaacaagcgatgagaagtattaagaaattagctgatggcagtatgaaacgctatgaagctttgaaacgaatcgaagtgtaa

SEQ ID NO: 420955 - DNA, 630 bp, Staphylococcus aureus
atgaacatagaaactatcgtaaatcaatttgaaacacgagcaggcacgttactaaggtactacactggattattagaacatagtaaagtacaaccatgttgctttaagttatataatgatccgtttgatatgtgttatgtggtgatgaatagtaagttgtttggtcatgtatatattaaagattgtaaagtaaggcaatcatttgaattagcgtcacctaagcacactgaggggcttataagaagcatagaggggcattatgtaggttatgaattacatgacggtaaacagctttctattagcgatatgatggccagtcaattgtttgaagatgagtattttatgtatggattacaaacatatgcagaatcaaataatagtgatgtgtttaagtacttagaaaatggatttgatgagggcattcaatcgagtaatactgatgtgatagcgaatattgaaatgttgtatcagttagctacgggaatcaatgaaccagtaccagagttagttgaggggttaaaattagtaactgagtttgtacaagatgagaatgcgacacaagaggattacaaggcgttagaacgtaaattgaatgatctaaaagcgtcttactatagcttgagtaaataa

SEQ ID NO: 420956 - DNA, 285 bp, Staphylococcus aureus
atgaatgacaaagagaaaatttataatcaacttcatcatgatgcaccaatccaaattatgccagcacccgaaaatttatttgttgaatatatagaagatggcgaagtgtggtattcaccagttgtatgtatggctttaagtaaagcccataatattaatttttatgatagtgatgatgtgggatgcatcgataaagcggctacatgtagcattaagaaatttaatactgagacaggtgagtttgaacaattcagcaaaatgcctcaaaaggagattgcacaatga

SEQ ID NO: 420957 - DNA, 363 bp, Staphylococcus aureus; identical to SEQ ID NO: 407366

SEQ ID NO: 420958 - DNA, 1458 bp, Staphylococcus aureus
ttggaagatgttacaaacgaagaagtatttgaaatgattggtagcagaaccggtgttttaaatgctaatgattggaaaagtcaattaaggcgttctgctactacacaagcattgaaaaaaacgactacaaatgctgaaatcatattgtgtaatgatgagagtttaaaagggctagtacaatatgacgcttttgaaaaagtaaccaaactgaaacgtctaccgtattggaggtcaaaaggggatgcgaattattattgggctgatatagataccacacatgtgatttcacatattgataaattgtataatgtgcagtttagccgtgatcttattgatactgtaattgaaaaggaagcttatcaaaatagattccaccctattaaatcgatgattgaatctaaatcatgggacggaatcgaaagaatcgaaacgttattcattgattatttaggtgctgaagataatcactacaatcgagaagttacaaaaaaatggatgatgggtgcagttgctagaatctatcagccaggtattaaatatgattccatgattattttatatggtggtcaaggtgttgggaaatctacggcagtgagtaaattgggaggtcattggtataaccaaagtattaaaacgtttaaaggtgatgaggtctataagaaattgcagggttcttggatatgtgaaattgaagaactgtcggcatttcaaaagtctactattgaagatattaagggttttataagtgccattgtagatatttatagagcttcgtatggtaaacgcacagagcgtcatcctagacagtgtgtgtttgtagggacaaccaataactatgagtttttaaaagaccaaacaggcaatcgtcgtttttttcctattacgacagataaaaataaagcaactaaaagcccatttgacgatctaacaccagatgttgtgcaacaaatgtttgccgaagctaaagtatattttgatgagaatccgacggataaagcattgttgctagataaagaagcgagtgaaatggctttaaaagtccaagaagctcattctgaaaaagatgctttagttggagaaatagaagaatttcttgaacgtcctattccgtcagactattggtatagaacgttagaagaaaaaagagtgtctgcgcatgatgttatagaccaagactatattaaattatatggtgatggtaaattgattgaattaccgaatacaaaaccaggtgcttatgtatggcgtgacaaggtatgtagcatggaaatttggaaagtgatgatgaaacgagatgaccaaccacaacaacaccatttaagaaaaattgataaagcgttaagaaatacaaattattgtggcactgtgaaaaagcaaacgcgatatggtgaaggtattggtaagcaatatggctttagtgtagatttagcttcttattataagaagcttaaagtttaa

SEQ ID NO: 420959 - DNA, 870 bp, Staphylococcus aureus
atgaatgaaattaaattagaatatgacacacatgtttcagtggtacattatgaaagtttagactcacgttcatttaagagcttttcaaaacctaaatggagtaagttaattaataaactgtctgtgcctatagaagcaaattataagtatgcacgtggtgttgctgtttacggtgatattaaaaatggtgcaaatgatcatggtgaaattatcaaaaagcatcgcaatgacgttaatgtcgtatacagagatgtgattgtacttgattatgatgaaataaatgatttaaagcaattacatgaagcaatcagctcagctttaagcaatgttgcatggttttggcacacatcgttcagccatacaactgaacaagctagaatacgcctgtatatccctctgaatgagcgaataagtgcagatgattatcgtaaatatacaaaagtattagcaaataaaattggtcataaagtggatgaaggttcatatcagccaagtagatgttttgcgttaccagttattcaaaaaggacacatatttattaagcgagtgaatgactgtccgattatgaatgttgatatgctcgaacagtggtcaaaggagtatgaacaatcaaatgatagtcctaatatcaaaggatacacgcgacatggtagtgcgtattggcgagatatagcttttggtgtaagtgagggagagcgcaattcaacattggcttcaattacaggttatcttttgcgtaggtatgtagatccaaacttagtttatgggttagtgagtgcgtgggcaagtgtatgcaaaccacctattaatcaaagtgaagtaaacaatacttttaaaagtattttaaaaaaagatagtaaaaacagttag

SEQ ID NO: 420960 - DNA, 321 bp, Staphylococcus aureus
atgaattgggaaattaaagatttaatgtgtgacattgaagtgataaaacaaaaaattaatgatgtagctaccaaacatgcttggtttgttgaagatagatttgtaaaaaatgaattagaaacaaaacgggaacatattaatttttctgctagctatttagaacatcgtatacaaaatgaacatacagttgagttattacaggtttatttaaaagagttcgatgaacttatacaaaaatttcatgaaatagaaaaagcatcatctgatgtaagtttggcgacagaatcagatgacgcaaagaaattaaaaattacagagtaa

SEQ ID NO: 420961 - DNA, 210 bp, Staphylococcus aureus
atgaataatgaacaaaaagaagtaatagaacacttggtttatcaacttgagttaagtgtcatgaataatttggaaagttatgaacacacagaatatgttaatggtattgaagtggtttcagagatcagtcgtgaaaagcacttagaattgataatgaaatggtgcgcacaagaattaaagaataattttcaattagagaaaggagaataa

SEQ ID NO: 420962 - DNA, 147 bp, Staphylococcus aureus
atgaaaatgtacttaacttatatttgcttagtttcgttgttaacaattttattactagcaatatcgaatatgtatgtcgcttttagtgtgtacggcatgatggtaacttatggatttaatttaacaggaggattagaaaatgaataa

SEQ ID NO: 420963 - DNA, 273 bp, Staphylococcus aureus
atgcctagaacaaagttacaagattttccattaaaagaaaatacagttacagaaccaaagcaagttgtagtaaatccgttgtttgcgaaacctaatgcactagctggtatttttggaatttcatacagttcggtcaatcgtattttaaaagagtgggaaaaagatcataaaggtattgatgatttatattattcactatcatcatcaatgattgttatcagtattccgcgattcgaggagtacatgaaggcacgtcataaaaaatggatgtag

SEQ ID NO: 420964 - DNA, 213 bp, Staphylococcus aureus; identical to SEQ ID NO: 407314

SEQ ID NO: 420965 - DNA, 735 bp, Staphylococcus aureus; identical to SEQ ID NO: 407315

SEQ ID NO: 420966 - DNA, 729 bp, Staphylococcus aureus; identical to SEQ ID NO: 407316

SEQ ID NO: 420967 - DNA, 729 bp, Staphylococcus aureus
atgaaaaaattaataagcatcttattaataaatataataattttaggtgtctctaataatgccagcgctcaaggcgatataggaattgataatctcaggaatttttatacaaaaaaagactttgtagatttaaaagatgtaaaagacaatgatactcctatagctaatcaactacaattttcaaatgaatcttatgatttaatttcagaatcaaaagattttaataaatttagtaatttcaagggaaaaaaacttgatgtttttggtattagttataatggccagtgtaacactaaatacatatatggtggagtcacagctactaacgaatatctagataaatctagaaatatacctataaatatatggatcaatggaaatcacaaaactatttctaccaataaagtttcgacaaataaaaaattagttaccgctcaagagattgatgtcaaattaagaaagtaccttcaagaagaatacaacatttatggacataacggcactaaaaaaggagaagaatatggtcataaatcaaaattttattctggatttaatattggtaaagtaacgttccatttaaataataatgacactttttcatatgatttattctacacaggagatgatgggttaccaaaaagttttttaaaaatttacgaagacaataaaactgtagagtctgagaaattccatttggatgtcgatatttcttataaagaaacgatataa

SEQ ID NO: 420968 - DNA, 1221 bp, Staphylococcus aureus
atgtggtttgaaaaatttaaaaataagaataaagaaactaaatatagatattacgagaagtacaaagacccactcacaaacaaatggcgacgtgttagtgtggttcttaataagaatggtaagcaatcacaaaaagaagctcaaaggctcttaaatgagcgtatagaagcaaaactgaatgataagacacctactacacttaagtcactaacttttcatgctgcaagtgatgagtggtttcagaactatatcaaaacgtctgggtcaaaaagaacgactattaaaactaaattgagtaagctaaacactttgaagaaatttgtagatgaagatattttaatcaataaaataacactttcatatgcgcaacaagttttcgatgaaatggatagtaaaggttatgtatatcaagttaacaaagatgcgttaagcatattcaaaaatgtatttgaatacaccagacgcatctataaactgcaagatttagaatttttaaaagatataacgttaaataaaagaattaagtcttatgatgaagtgaaagctaaacgtaataaatacctcgaattaaatgaaatacaatctatcatcaaagatattaatatgaaggctcagaaaatgcactcaggtatccataaacggttttatttattcgttgcactcatgaccgaatttcaagccttaaatggtatgcgtattggtgaaatgttagccattcaaaatgaagatatagactttgataataagagtttaaatattaacggaacaatccattggtttcacgatgaatctggtggattcggtgtaaaagataccactaaaacagagtctagttatagaacaattggattgagtagcagaagttgcgagatattaaagaaagcaatactggagaacaaaaaggattcaaaatggaatgatggatatctaaatagaaattttgtatttactaatcataaaggtaacccaatgcagactgaaagattcaataaaatccttagggaagcagctaaagatgttggtattgataaagaagtttcttcacatatattaagacatagccacatatcattactctctcaacaaggcgtgtcacttaaagctattatggatcgtgtaggccattccgaccaccgtacaacgctttccatttattctcacgttactgaacagatggataaggatatgatgaacaaacttgaacagttaaaacttggataa

SEQ ID NO: 420969 - DNA, 354 bp, Staphylococcus aureus
atgggcgcgagaaaatccaaagttatcacgaggaaaaatttttatacaaaagattttagtgatggatacgttcgttttcatctagatacaaataaatgtttgataacaggtttcgtgtcacttaatgaacctttcatagtcgaagttgaaaaggaaatcacagaagatactaagtttgataggttgcttgaggtatttaaagatgatgcggagtgttatgattctacaatttatacggatattagcataaaagaacgcatggcttcaaaactttttcctattgaatctttctatatcttaaacgacgacctaactatgacgttaattcggaaagatggggagttggtagtatga

SEQ ID NO: 420970 - DNA, 864 bp, Staphylococcus aureus
atgacaggagagacagttgtatataaaaatgaaatgaacctagttccattaagacgatttacggccactgaaattaatttattttttgcgatgtgcaataaattaaaagaaaaagataccaatacattacatttgtcttttgatgaactaaaagaattaagtaactatagcccagcaacacgtaatatcaatagatttgttaatgatttagatgatgtatataaaaagatgttagatttaactattggatatgaagatgacgatgtaatagaaagattcgttttatttaatcactatagaattcataaacgggaacaatatttggaaatatcaacttctccaaatttaaaacatatactaaattcaattactaataattttactaaatttgaattaaaagaaatgacaaatcttaaatctacatattctaaaaatatgtttagaatacttaaacaatataaacatactgggtatatgaaaattaaaatcgatgattttaaaaatcgtttagatatacctaaatcttacagaatgaccgatattaacaaaaatgtttttaaacctattattacagagttaagcactatttttaataaccttaatattaataaaatcaaagctaaaaaaggtcgtaaaattgaatggttagagtttgcttttgacgctgagaaacgcattcacaacaagcgacaaccacaaatgacgaatataggtaaatcaagacaatatataagtcgtgagaaaacaccaaaatggttagaagaacggacatatgagcacaaacccaaaagagaatatgatccacaactagaaaaagaaagagaagcttttttaaaacaacttgaaatgaactgggaagaataa

SEQ ID NO: 420971 - DNA, 198 bp, Staphylococcus aureus
atgataaaaaataatgtatctcaatacaggaagaaagctggtttaactcaattgcaactaagcaatatagtaggcgtaacaaggagaactattatttctttagaaaaaggtggctatactccctctttgcttttagctttaaatattgcaaaagctcttgatactgatattaataaaatattttcgttagaggactaa

SEQ ID NO: 420972 - DNA, 465 bp, Staphylococcus aureus
atgaaaaaagttatttttgaacaaactgggaatatcatttctgttttattactaatagcttcatcaatagaatttattagtacgtttaaagttgataattataatttcgaaatttatttcgggatatttacatttgcattaatagcatggataccttgttttataattgctcgtttaatttatagtaaatttgataaaaattataatataaagaaaggtgaatatagtgcaactgatgaaagagaagtgattatatattacaaatcaagtttaggcgcctataaagctattgttttttcactgttaatattttttgtagcgatcaccttattagccgccttttcaaattcaatgtcatttaataatatacacttaggtatcatcagcatgttattttttggtttttctattatagtaggccttttgacttatctacttatttggatattcttatatttaaaatag

SEQ ID NO: 420973 - DNA, 294 bp, Staphylococcus aureus
atggaaaaagcaaaccactatatgatttatatgtacacttttattaaaatattggttgaaaatactatggaaaaatttagtcaagcaaagaatgagttgattctaggtataaaaaacaaagatttacaattcaatgcatggtttgtggttttattagctgcaattttggtttttgctactgcaatttttgctggtttaactatttggtgtgtagtgaatcaacatggtaagttcactgggaattggaattggcacataaaaggggttagcctcgatgttgagtgcaaaagataa

SEQ ID NO: 420974 - DNA, 522 bp, Staphylococcus aureus
atgacatactatagtaaaattaaagatgttacatttttaaaaatcttattttggatgattagaagctatgctataataataacgctaatatgttctctaattatgttgccttatgtgttaacactcaaacaaagcattttaatgatttgtttgagtattcagataatatttttatttggtttgcttctttcttttgctatacatgaatatatgcatatatatttcttgaagaaaaagcatgctaataataaggtgaaaataatgtttggctggaataaaatgacggtctctccaattatttcaaatgtaagcggaagaactattataagagttgctatctccccgctattaatattatttgctatagggttatttttatcgctgatttactcagtaactaatattttattattaaagatattaagctatatatactgttttcacattgttaacatacttccaccattaggagatggagtaatgttaatcaaaggaatattaaagagcattgagaggaggtga

SEQ ID NO: 420975 - DNA, 288 bp, Staphylococcus aureus
atgaaacacttaatatatttaattaacagtttagttttttctatagtaactaccggaataattctaacagttagttttttaataatgctttttagcagtaaagatatcggttataagacaacttattttggaagtttgttttttaatagcattgaaaaagggaatgatacattggggctacatataggaatagctaattggggaccaatagtactaacaattatcatattaatgttattttattatataataactatttttttaaaaaaacatacacattcgaaatga

SEQ ID NO: 420976 - DNA, 1446 bp, Staphylococcus aureus
atgtcaatcaaaagtattattgaattaaataaaatttataaactttatttaactagaagattgttaaatttaggattgttaaaatcaaaactagtcagaatagtattgatttctatatttattgcattattgagtatattttcaatatctggatacttgtttattaatcaagtggctaatgatgaacaagcggttttattactaatcaaagcttttataacttctagtgttatgtggacgataacagtagtattggccttaaaggtaattttttccaagagccaagatttttttaaaattatggagaattttccaataaataataaagttaaaaatttatctatatttatttttgaatctttatgctccttagcggttgttttttgtatgtgtttttcttttatcattgctattattctaagcagtcctacaaattatttaggctacttagtggtcaatattttttacgttagtgcaataacttatttattactacaattaataagtaaaatcatatcaataagctgtgtcattttaaaaatagaaaaactatattcattaataaatatatctgcattagtattagtctttattatagcttataagcaaactgaaccactagttaaatcattaataaatgactacttaaataacaaaaacagcactaaaagtgtgtttttgttatttaatgaaatttatcaacatagcggccttttgcttactactttaatatttttaattcttttctcagggttaagtctcattatgtttatactgccagataactcttattatgatcagtcaaagtatattaatgtttttaaaagcatcaaaagaataaatgtttttaaaacgtacttattgtcaatagtacgagataaaaatgtattaagtaatattataggaacatatatttttgctattttgctattatctataaatttagataaatacatactgttcgctttattattagtagtatttaacagtatttattgttttgttcaaactttacgaataagattgatatcttattcaataaattattcggttatcaaagactatatattaatggtattttctcaattagctgtaacttatatcacatcaattcctctactaattatatctatatgcttgaatggggcaaattcaagcatattaacgccgtattatgtgattactgtaggaacatttattttagttatggctggaatattgttccctccatataatgataatccattttcaatattagtaagcttgataattatttcagtaccattattgtttatactattaattatcatattatttaatttaggactgaaaataatttttggaatttttatcgctatgtttatattcgttatatgttttagtatattggcattaaagaatacagaaaagaggtcgagaaatgaaacacttaatatatttaattaa

SEQ ID NO: 420977 - DNA, 708 bp, Staphylococcus aureus
atgttgaaaattgaaaatgtatcatttaagtatacaggtacgaaacatgaagttttaaaaaaaatcaattgcacttttacatacggagactttgttgctctaataggaccaaacggttctggtaaaaccacgttaataaaactaatagcaaacacactaaatttagaaaaaggtgttattactcttggtggtattagcaataaaaaagcatattttaaaaataaaatcctttatcttccaagcgatgacttactaccagggtttatgtctggctacgaatacatagaacttatgcataagttatataataaaaaattacaaaaaacaacattgtatgatttagcagaaaaattatcaatcaagggtgctttagaattgttaatcgatgattattcgacagggatgaaaaaaaaactgcaagttattttaagtgtgttaatagcacccaatattctaataatagatgaaacattaaatggaatggatattgaatcagttgaaataactaaaaaaatatatagacaaatatccaataaccaaactatcatcataatgtgttcacatgatttaaatttgctcgaagatctgtgcaataaatgtttaatattgtattcaggtaaagtgtatttgtacagacatattgaagaattgaacggggatttgactactactttcaaaaagattataaaccgagaaaaggaagtatag

SEQ ID NO: 420978 - DNA, 654 bp, Staphylococcus aureus
atgaaaaaaatttccatttttctaattttgtttattttttgcaccattttagttgttctttttcgtcataatagcgaaaaagaagatgaaaaagaaatattcttttccaagaatctagaagaaaagtacactcttcattctccgaaattaggtaacagttcaaaaaataaaattatagttttcgaagattttaaatgtcctcactgtagaactctatataataatattataaaaaaaattgatgatggaatagaagtacgttatgtcaatattgcttttctaggcaaagactctttcgtagcttcaaaagcttctcatgctgtatatatttatgctccagagaagtttccagcatttcatgatgctatgatgaatcaacacaccaacaataaccagcgactgcaatttactgaaaaaatcattgattatgaaattgataagctatcattagataaatataaaattgataaaattaagagtacttacaaatcaaagaacagtatagcttcgaaatacgctaataaagacattaaagcaggcgaagcaatgaaagtttcttctgttccaacaatatatgttaatggtcattatataaaaaacaaatcttcaaatttaaaagagttcaaaaaaaatatttcaccttatataaagtaa

SEQ ID NO: 420979 - DNA, 1215 bp, Staphylococcus aureus
atgagtaatacacaaaagaaaaatgtgccagaattgaggttcccagggtttgaaggcgaatgggaagaaaagactattagtagttttttaaaggaaagtaaaataaaaggaagcaatggaagtcatgctaaaaaattaactgttaagctttggggaaaaggagtagttcccaaaaaagagacatttaaaggaagtgacaatactcagtattataaaagaaaagcagggcaattgatgtatggtaaacttgattttttaaattgtgcttttggtattgttcctgattcattaaataattatgaaagtactattgattccccaagttttgattttataaatggtgattctaaattcttacttgaaagaattaaattaaagtctttttataaaaaatttggagatattgcaaatggtagtagaaaagcaaaacgtattaatcaagatacattcttatcattgccagtttttgcaccaaagtatgatgaacaattaagaattggcgaattctttagcaaacttgtccgacaaattgaactagaagaacaaaaacttgaattacttcaacaacagaaaaaaggctatatgcagaaaatcttctcacaagaattacgattcaaagatgagaatggtgaagattatccagattgggaagagaagcagttaggcgaaatttttcaaataatttctggttcaacaccactaaaatcaaataaagagttttatgaaaagggcaatattaattgggtcaaaacgacagatttaaataattctaaagttacgcatagtagagaaaaaataactgaatatgctatgaatagtttgaaattaaaattagtacctaaaaattcagtacttatagctatgtatggtggttttaatcaaattggtagaacaggtttgttaaaaatagatgctacaataaatcaagcaatttcagccttattaatgaatcatgaaacgaatccagaatttatacaagcatatctaaattatcaagttaagggttggaagcgatatgcagcaagtagcagaaaagacccgaatataactaaaaaagacatagaacaatttaaagttccttatgtcagtattaatgaacagcaaaaaataggtggattcttcagcaaacttgaccaacaaattgaattagaagaacaaaagctagaattacttcaacaacagaaaaaaggcttacttaaatcgatgtttatttaa

SEQ ID NO: 420980 - DNA, 486 bp, Staphylococcus aureus; identical to SEQ ID NO: 408995

SEQ ID NO: 420981 - DNA, 222 bp, Staphylococcus aureus; identical to SEQ ID NO: 407439

SEQ ID NO: 420982 - DNA, 402 bp, Staphylococcus aureus
atgattatcaccttacgacccttaggtcgtaaggtaactgatatagaaaacgctctacactcaatgttttcatctttaccttctcatatatttaaatcaattacttttgattgtggtaaggagttctcaaactggaaaacaatatgtaactgtcacgatatatctatattttttgctgatccaggcacgccatcacagcgaggtttaaatgaacattctaacggaataattagacgcagtggattagataaagaactagatttcaatttagtaacggatgatcatatcatcagtgttgctcaaaaaatcaatcatcgtcctagaaaatctttaggttatagaacaccattggaagtatttatgagtttcatcgaagatgataaactgtccagcttaatttga

SEQ ID NO: 420983 - DNA, 960 bp, Staphylococcus aureus
atggcctatacacatcttaacacggatgaacttacgttcatagaatcatattatcaccagaatctttcagttaaagagatttcgattagattgaaacgttctagacagacaatttataacgtaatcaatgcttttaagtcgggtatgtctgcccttgaatattatcaagaatacaaacaaagaaagtctaattgtgggagacatagaatagtgcttccagaagaacagtctgattatatccgagagaacgtagctgatggatggacacctgatactattattggcagaggtgaacgcacgatcaattgttctgttaaaacactttacagaatgtttaaagagaacatttttgctgtacatgatttacctatgaaaggtaaaagaaagccaaatggccattctgaaaaaagagatagacagacttttaaaagacatatttctgaaaaaatagaagaatttcctttattcaataaggagtttggggatcttgaagcagatactattgttggtcgtcgtcatggtagtgcaatcattactttggtagaaagagtatccaagatgattatcaccttacgacccttaggtcgtaaggcaactgatatagaaaacgctctacactcaatgttttcatctttaccttctcatatatttaaatcaattacttttgattgtggtaaggagttctcaaactggaaaacaatatgtaactgtcacgatatatctatattttttgctgatccaggcacgccatcacagcgaggtttaaatgaacattctaacggaatacttagacgcagtggattagataaagaactagatttcaatttagtaacagacgatcatatcatcagtgttgctcaaaaaatcaatcatcgtcctagaaaatctttaggttatagaacaccattggaagtatttatgagtttcatcgaagatgataaactgtccagcttaatttga

SEQ ID NO: 420984 - DNA, 492 bp, Staphylococcus aureus
atggcgtttgtagacgaacaacaaatatctcgactatatgaaaaatttgttctagagtactataaaaaagaatttccagagcttgttgttacatcatcaaatattcaatggtcattagataattatgacaacgtgaatatgcttcctataatgagaagtgatattatgttgagatataaaaataaatgtctaattatcgatgcaaaattttataaaaatacattaaacaattattatgatactaaaaagatccattcaactaacttgtatcaaatatttacctacgtgaaaaaccaacaattaaatttaaaaaagaaagcaatgcaggtctcaggaatgttgctatatgctaaaacagacgaaaatattgatttgaacaataagtttcatatgagtggtagtcaaatcattattaagacattagatttgaacagtgattttactattattaaaaaacagttgaatgagatagttgatgatatattttactaa

SEQ ID NO: 420985 - DNA, 381 bp, Staphylococcus aureus; identical to SEQ ID NO: 409383

SEQ ID NO: 420986 - DNA, 255 bp, Staphylococcus aureus; identical to SEQ ID NO: 414747

SEQ ID NO: 420987 - DNA, 189 bp, Staphylococcus aureus; identical to SEQ ID NO: 408212

SEQ ID NO: 420988 - DNA, 1671 bp, Staphylococcus aureus
atggggatttttgaacgaatacaatcttttaatgaaaaaaaagcatacgaaaatttaaagagctatgatcagggagtatatcgacctaaaagatatccaagtatagacaaagatttaaaaattgaagatttcgaagaaaaaaccaaactgaatttaaatgaaagattgttaaaggaatatgttgagcatggaagagttcttaatactagacattcggattttcaaccaggaaattttgtagaaaagagtaattatgaagcatcatttgctaaaaaagtttattgtagttctgaattagagtttttaatcgaattatttatttcacataataatattcatagtttttctgatgggaataaaaggacggctttaaattattttcttgatttgataaataaatatactaaattttttattaaagacatattatcaattcaagatgcacaaatacattatttgacaaaagacataaatgaagatgaatttaaaaatattatattaaatgaggtagaagtcaaaatggtaaaaagaaatacaaaagttcatttagaacatttaattcctagagttgagttagaagatgaggtaggagaacaaaatattacaccttctgaaagaaaatcaagttttacattatcagatttagaagataatgcatttttttatacccaattaaagaaaccatattttcaaagagatactaatgagtggtctgttgaaagggttcaaaagttattagagacatttttagaagatggattaatacctgctattattatgtgggaatctaatgagggtgacttattaattatcgatggtggacatcgagtaagttctcttatagcttggattcatgatgattttggtaaaaatgatataaattctatgacatctgataaagctctttctgaatattttaatttaaacatagggaattataaagagataaaaagtagtaagaatgaggagtataaaagaataaaatcaattatagccaaaaagtcaattcctattcaatgggtaattggagattatgagaaagtaaaggaatcatttataagaattaatgaacaaggagtctcgttgtctaatgatgaaaaagagcttattgagaatgataagctacctacctctcgtctagccagagcaatattatctcatgggtctgggcaatcctcatcttattcaaataaaaaaacaaagatcatatatgattatttttttgttcctatgtacataaaagatcacaatatttatcctatgttaggagcagttgatgatgagtttgtaatttcaagagtatataatgtgataaaaataatagatgattattgtcatgaagatttagaatctttaacaaataaagttattgagttttgcaaattctttcacaatgatttacaaatatgttgtaaatcatatttttatggtgcgaatcaaaggtttaaaacatcttcgttatttggatttacaaaattttctatggaacttcataaaaataaagaattacttgaaaaatatttgaaaaataggggagaatttgaaaaatatataactgacaatgaaagaaatattcaagagatttcaaggaagagaagacaatcatcaaaatctattgatgacatatgtaattattatagagtagttttatttatggtaaatattaggtga

SEQ ID NO: 420989 - DNA, 420 bp, Staphylococcus aureus
gtgtataagagacagtcatataagctaacgccacaacgcgaagctactgttagagttctaattgaaaatgaaaaagatcatctaagtgctgaagacgtatatctgaaagtaaaagataaagcgcctgaaattggcttggcgacagtatacagaacgttagagttgttagctgaactaaaagttgtcgacaaaattaactttggtgatggcgtcgctcgttttgatttaagaaaagaaggcgcaaaacatttccaccatcatttagtatgtatggaatgtggtcgtgtagatgaaatcgatgaagatttgttaccagaagttgaaaatcgagttgaaaatgagttcaattttaaaattttagatcatcgtttaactttccatggtgtgtgtgaaacgtgccaagctaaaggtaaaggatag

SEQ ID NO: 420990 - DNA, 771 bp, Staphylococcus aureus
atgataaaacgtataaacaaattagtgttaggtattagtcttctgtttttaatcatcagtatcaatgctggttgtggcatgggtaaagaagcggaaataaagaaaagttttgagaagacattgagtatgtatccgattaaaaatctagaggatttatacgataaagaaggttatcgtgatgacgaatttgataaaaatgataaaggtacatggattattggttctgaaatggcaactcaaaataagggggaagctctgaaagttaaaggtatggtcttatatatgaatagaaatacaagaagtgcaaaaggattttactatgttaatgcagtaaagaaagatgaagatggtagacctcaggataataaaatagaatatccggtgaaaatggtagacaataaaatcattccaactaaaggtatcaaagacgaacacataaaaaaagaaatcgaaaattttaagttcttcgcgcaatatggcagctttaaagatttgtcgaagtacaaagatggagatatttcatacaatccagaggtaccgagttattcagctaaatatcaattaacgaatgatgattataatgtaaaacaattacgtaaaagatatgatataccaacaaataaatcgccaaagctattgttgaaaggttcgggagacttaaaaggttcatcagttggatataaagatattgaatttactttcgtggagaaaaaaggtgaaaatactttttttactgatagtctacatcttgaaccaagtgaggctaaataa

SEQ ID NO: 420991 - DNA, 993 bp, Staphylococcus aureus
ttgaaaaataaattgctagttttatcattgggagcattatgtgtatcacaaatttgggaaagcaatcgtgcgagtgcagtggtttctggggaggagaatccatatgtatctgagtcgttgaaactaatagattataaaaacaataaacaatataccgcagaagcttataagaaaagtttagaagatttaatcgatacattaccacaaattggtaatgttaagtatgatgaacctgaatttaaagaaacagtaaaaaaatatcagcaacggtttatggcggaagatgatgcactaaaaaaatattttggtgaagaaagattattgaaacaaactactgtaaataatggtttgaattctaacatactaggaatgacgcaaggtagatatgagctcatatatgaaggattaaagaatcaaagtactgagtttttgaaggaaattgaacaagtgaaaaataataatcctcagttaaaagatttttcatgggaagaacaaaataaggctgatattgaattaaatactttagaaaataaagctctaatggtaggagctacttattttaatgaacacagagatgaagtagaagatttatataataaattagatatgattcttggttatgaagaagatgagcgaaaatctaaaaagcctataaataatagaatgttggaacgaactaaagaagatttagaaactataattagtgaattcttcagagatataaaaaaggaaaggccaaaagatattcctatgctgacagcagataaaaatcataatcaaactatggcattacgattaaaagcagatacagaagaagctaaaacaaataccgctaagagaagtaaaagaagtttaaatactcaaaattacaaatctgcatctcaagaagtaactgcagaacaaaaagcagaatacgaaagaaaagctgaagaaagaaaagaaaagtttttaactaaacaaaaaataaaaataacacaccagttgtatcgttag

SEQ ID NO: 420992 - DNA, 780 bp, Staphylococcus aureus
atgaggtctataaaaaggatcagattgtgcataatcctgttgattctaatcatttttgtaacatcttgcgatggtgataataagattactggagattcgaaagaaacacaaatcaaaaagagttttgcgaaaacattagaaatgtacccaattaagaatctcgaggatttatacgataaagaaggatgccgtgatggtgaatttaaaaagggcgacaaaggtacatggacaatatcaacagattttgctaaaagcaacaaacaaggtgaaatgaatagcgaaggtatggtactacattttaatagaaatacgagaacagcaataggatattatactgtaagaacaacttatgatgaagtggataagttgacacgcgaaaaaaaatatcgtgttgaatttaaaaacaataagatagttctattggacaaagtagaagatgaaaatcttaaacaaaaaatagaaaattttaaatttttcgggcaatatgccgattttaaagacttgaaaaattataaaaatggaagaatatctagcaatgaaaatgttccttattatgaagcagagtacaaaaggaataatagtgatggaaatgtaaaaaaacttagagaaaagtacccaattacaaccaagcagtctccaatattaaaactgcatatagacggcgatattaaaggtagctcagttggatataaacagatagaatacacattttctaaggagaaagatgatgagacttttatgagtgattttttgaacttcggtccatcacacagtaaatag

SEQ ID NO: 420993 - DNA, 1032 bp, Staphylococcus aureus
ttgatttggttttggctactcttcgtctttagttttatattacttatatatttaatgattaatgaacgtcgcacaattttttatggagtaatattagtttttacactatctatactcacattatgtctagtattagaatttgatcggtatggtataaatatttttacgagtataattgggtcacttctttctattatactaatccctgtcattcttatattagtaatagggtggttaatatttccccttactttgattattgaaggtttcaagttacttcataaagaagggtatgtatttcgtaatttattagcaattggacttggctttgcatttatacttagtccaatgttaacgaacaatttaatcaaattatcgaatgagaatttagtcgtagtaacgatttgtaatacttatcgaattattgcaacatacttaatatctgtagctggcgcatatactttatcaagttttctaaatttctttaatgtaaatcatcggaatttacagtatgtagtagtacttggatcaggattaaagggtgacaaggtgacacctctattaaagaatcgtattaataaaggaataatggtatacaaaaagcaaaagtgtgccaagcttatcatgtctggtggtcaggggcctgatgaattcgtagcggaaagtgtggcgatggcaaagtatgctgaaagtattggtgtacaaagacaagatattatcattgaagatcgatcaaaaaatacagaagaaaacattcaattctcacatcgcttgatgcatgataaaaatgcaaaatttgcaattgtaaccaactactatcatttgtttagggcattgataatagcaaaaaaacacaacatagattgcattggttatggtgcaaaaacaaagctatactttagcttaaatgcttttgttcgtgagtttattggttatttagtttttagatataaagttcatctttcaattctagttattttaacgagttcttatatactatttatgttaatatctacaatctttaatcactaa

SEQ ID NO: 420994 - DNA, 381 bp, Staphylococcus aureus
atgaaaaaacttattttattattatttttagctctagcaataggtgcagctatttggggaaagaattattataacgatcgttatgtattagatgagtacgtctatacacagattccttccgatgctaatgctaccaaagatgagtggctgtatgatgataacggaaaaaaattgcaaaaaggaaaggaatatcagcttaaaggatataataaagaaggaaaagaaagagatgtacaattttcaataacaggtactgcaaaaaattactataaaccagatactatcatcaaagtcagcatgtctaaaacaatcgttattggacaacaagtcgtgactgaaacagatgtgccgaaaaaagctttacagcaatttaataaataa

SEQ ID NO: 420995 - DNA, 750 bp, Staphylococcus aureus
atgagtaattatatatttgccaatttaaaaagaattttaggcaaaaaatctttttatacgtccactacgattttcataggtttaatgctttttttaacctatgtgaagtcaggaccatcttatacatcagatggatatatcaatgatgtacagaccatgattggattatatccgctgttcataggtgtcgctatatttatagcaacattctatgatgactttaaggcaaagacggttcaggcagctttaggtcttggtatatcaaaaacacaggtgatattctcgaaatttatcgaagttgtaatattatcaatcatattagccgttattacaactataagtgtaatgctgttaccacttctatttaaagtagacatgtcattagctggttataaaagtattttcattcaatattgtggtgctacaatacagatgataggttatttttgtatatgtttaccaatcttgttctataggtacaatgccatagaaggtgtaattatatatgtcatgttgtcttcaagtgttatctatctattctcaaatttatttttaggtagcaaaacagttattaatatgatcggagataaaacatttttattattaacaaattcagtgactcatattcaaagtgcaataatatctggccgtacaatagatttaattaatatagtcatagttattatatatatcgtactaccaactgtattagctattgtgttgtttaagaaaaaggagttagagttttaa

SEQ ID NO: 420996 - DNA, 804 bp, Staphylococcus aureus
atgatttcattacgagatatccataaaaattatggtgtacataaagttttatcggaagttaatttaacagtaaataaaggtgatatttatggtttgataggaaaaaacggagctgggaaaacaacaatattcaaaataatcttagggttgactgaatattcatctggcgaaatgcagattattggttcaaataatattagctctttacaaaaaaatagaaaaaagattgggttctttataggtcataattttttcgactatttaacagcttatgaaaatttaaaatactattgcacattaaaaggaattaaagattcaaaaaaagagattgaaagagtactgacaattgttaacctaaaagatgttaacaaaccatataaatcattctctatgggaatgaaacagcgccttggtattgcaaatgctattattggtcatccagagatattaattcttgatgagcctacaaatggattagacccacaaggtatattagacattcgccaccttatcatgagattaaataaagagttcggtatgacagtactcatttcatctcacattcttggtgaattagaacatgtcgttaatacatttggaattgttcataatggtacgatattaaaggaattttcacaattagagttgcaacaaaaacaatcaacaatagagttaaaggtgagtgactatgaacaagctaaagcactattgcagaaaaataatatccaaatactagaagagcaacacactcataacacgttagagaaaatttattttgaaattgtaggtgatagtcatgagtaa

SEQ ID NO: 420997 - DNA, 210 bp, Staphylococcus aureus; identical to SEQ ID NO: 409578

SEQ ID NO: 420998 - DNA, 726 bp, Staphylococcus aureus
gtgtgcttacctgcatctgagtctgaatcactgtctgaatctgagtcgctatctgagtctgaatcgctgtccgaatctgagtcactatctgagtctgaatcgctgtctgaatctgagtcgctatctgagtctgagtcgctatctgaatctgaatcactgtctgagtctgagtcgctgtccgaatctgaatcactgtctgagtccgaatcgctatctgaatctgagtcactatctgagtctgagtcgctgtctgagtctgagtcgctatctgagtctgaatcactgtctgagtctgaatcactgtctgagtctgagtcactatctgaatctgagtcactatctgagtctgagtcgctgtctgaatctgaatcgctatctgagtctgaatcactgtctgagtcgctgtctgagtctgagtcgctatctgtgtctgagtcgctgtctgaatctgagtcgctgtctgagtctgagtcgctatccgaatctgagtcgctatctgagtctgagtcgctatccgagtctgagtcgctgtctgaatccgaatcgctgtctgaatctgaatcactgtctgaatctgaatcgctatccgagtctgagtcgctgtctgaatctgagtcgctgtctgagtctgagtcgctatctgaatctgaatcgctatctgaatctgagtcgctatctgatgtatcttcttcgaagtatccgttatcaagtgtgaaatcatcatga

SEQ ID NO: 420999 - DNA, 918 bp, Staphylococcus aureus
atgtttaaaagaactaaactaatcttaatagcaacattactgctatcaggatgttcaactaccaataacgaatctaataaagaaacaaaatcagtgccagaagaaatggaagcttcaaaatatgtaggtcaaggcttccaaccacctgcagaaaaagatgtggttgaatttgcgaaaaagcataaagataaaattgccaaacgaggcgaacaattttttatggataacttcggtctaaaagttaaagctaccaatgttgtaggtagtggaaaaggcgtagaagtattcgtgcattgtgatgaccacgatatcgtatttaatgcgagtattccatttgataaatcaataattgagagtgatagctcattaagaagtgaggacaaaggcgatgatatgagtactttagttggtacagtgttgagtggctttgaatatcgaacacaaaaagaaaagtatgacaatttatataaattttacaaagataatgaagagaaataccaatatacaggctttacaaaagaagcaataaacaagacgcaaaatgtcggatataaaaatgaatatttttatatcacttactcgtcaagaagcttaaaagaatatcgtaagtattacgaaccattgattcataaaaatgataaagaatttaaagaaggaatggaacaagccagaaaagaagtgaattacgctgctaatacagatacagtaacaacattgtttagtacaaaggaaaattttactaaagacaatacagttgatgatgtaattgaactgagtgataaactatataattttaaaaataagccagaaaaatctacaattacaattcaaataggaaagcctactattaatactaaaaaagccttttatgatgataatgatccaatagaatatggagtgtatagtaaagatgaataa

SEQ ID NO: 421000 - DNA, 357 bp, Staphylococcus aureus
atgtatagcgttggcccaacaataaaaagaccaataagtactacaaaagcaagtaacatgttgatattactcaacgttttgatacctttatcgatacctgaccatgctgaccaagtaaataatatggttgcaatgacaatcaagattacttgcatcgtgaagttactcggtacattaaataaaaaatgtaaaccttcgtttatttgcaatgcaccgaaacctaatgttgcagcaacgcctgttactgtagctatgactgccaatacatcaatggcaccacctaaaggtccacgcattgccttttcacctaataaaggcgtcaatgtagcgctgactaagccaggatatcctttatga

SEQ ID NO: 421001 - DNA, 195 bp, Staphylococcus aureus
atgaatattagtaaacatacactgtatttcaatgtcatttttaataattctgattccttaccaacttgttttactgctgcagttgcaattgcaattgattgtggtgaaatcaattttgccgctacaccaccaactgtattagcagatacaagaagtgaaccacttgttccaatttgttgtgcaacagaagcttga

SEQ ID NO: 421002 - DNA, 1026 bp, Staphylococcus aureus
gtgattgaattaaaagaagttgttaaagaatatcggactaaaaataaagaagtccttgctgtagatcacgttaatttatcgattcgagcaggatcgatttatggcgtcattggtttttctggagcaggaaaaagtactttgattcgaatgtttaatcatttagaagcgcctacatcaggtgaagttattatagatggagaccatataggccaattgtccaaaaatggattaagagcaaaaagacaaaaagtaagtatgatcttccaacattttaatttgttatggtcaaggactgtgttaaaaaatattatgtttccgcttgaaattgcaggtgtccctagaaggagagcaaagcaaaaagcattggaacttgtcgaactcgtcggtttaaaaggtagagaaaaggcttatccatcagagttatcaggcggacaaaagcaacgtgttgggattgcacgagcgttagctaatgatccaacggtcttgctttgtgatgaggcaacaagtgcacttgatccgcaaacaacagatgaaattttagatctactactaaaaattagagaacaacaaaatttaacaattgtactaattacgcatgaaatgcatgtcattcgtcgtatttgtgatgaagttgcagttatggaaagtggtaaagtgatagaacatggaccggtaacacaggtttttgaaaatccgcaacacactgtgacaaaacgatttgtgaaagaagatttaaatgatgatttcgaaacatctttaacagaattagagccattagaaaaagatgcttatatcgttagattagttttcgctggttcaacaacaaccgagcctattgtatcgagtctatcaactgcctatgatattaaaattaatattttagaagcaaatattaaaaatacaaaaaatggaacagtcggctttttagttctgcatattccatatatttcaagtgtagatttcggaaaattcgaaaaagagttaattgagcgacaagttaaaatggaggtgttaagacatgggtaa

SEQ ID NO: 421003 - DNA, 237 bp, Staphylococcus aureus
gtgaaacctgttaagtatgctaaatttcctaaaccaccggcaccaattacacctgcaactgctgttgaaccaactaaagcgattgctgtaactgtaatgccagaaactagcgctggcatggcttcaggtaaaaggactttacgaattactgtccaagtattagcacccattgaccaagccgcttcgatgacacctttatcaatttctttaaaagcaatttctacgagccttgcataa

SEQ ID NO: 421004 - DNA, 510 bp, Staphylococcus aureus
atgatttcacacttgataacggatacttcgaagaagatacatcagacagtgattcagactcagacagtgattcagactcagacagcgactcagattcagacagtgattcagactcagacagcgactcagattcagacagtgattcagactcagatagcgattcagattcagacagcgactcagactcagatagcgactcagactcagacagcgactcagactcagacagtgattcagactcagacagcgactcagattcagacagcgactcagactcagatagcgactcagattcagacagtgactcagactcagatagcgactcagactcagacagtgactcagactcagacagcgattcagattcagatagcgactcagattcggacagtgattcagactcagatagcgactcagattcagacagcgactcagactcagatagcgactcagactcagacagtgattcagactcggatgcaggaaaacatacacctgttaaaccaatga

SEQ ID NO: 421005 - DNA, 579 bp, Staphylococcus aureus
gtgactcagattccgatagcgattccgatagcgattccgactcagatagcgattccgactcagatagcgactcagattcagacaacgattctgactcagacagcgattctgactcagacagtgactcagattccgatagcgattccgactcagatagcgactcagattcagacagcgattctgactcagacagcgattcagactcagacagtgactcagattccgatagcgattccgactcagacagtgactcagattccgatagcgattcagactcagacagtgactcagattccgatagcgattcagattcagacagtgattccgactcagatagcgattccgactcagatagcgattccgactcagacagtgactcggattcagacagcgattccgactcagacagtgactcggattccgacagtgattccgactcagacagtgactcagattccgatagtgactcggattcagcgagtgattcagactcagatagtgactccgattcatcaagtgattccgactcagaaagtgattcaaatagcgattccgagtcaggttcaaacaataatgtag

SEQ ID NO: 421006 - DNA, 138 bp, Staphylococcus aureus
atgagatcagacaatgatattattaatacaattttaagtgttgccaaaaataatgaaaatataagactagtatgtatgaatgggtctagagctgtctcttatacacatctgacgctgccgacgatctactctgtgtag

SEQ ID NO: 421007 - DNA, 1479 bp, Staphylococcus aureus
atgacaacacaacatagcaaaacagatgtcatcttaattggtggcggtattatgagtgcaacattaggaacattacttaaagaattatcacctgagaaaaatattaaagtgtttgaaaaattagcacaacctggcgaagagagttcaaatgtatggaataatgccggtacagggcattcagcactttgcgagttgaactatacaaaagaaggtaaggatggcacagttgattgtagtaaagcaattaagataaatgagcagtaccaaatttcaaaacagttttgggcatatttagttaaaacaggacaattagataacccagatcgctttattcaagcggtgccacacatgagttttgtcattggcgaagataatgtagcttttataaaaagtcgtgttgcaacgttaaagaaaagtgttttattcgaaaaaatgaaattatcgcaagatgaagaagaaatgaaatcttgggtaccgttaatgattgaaggtcgtaagtctgatgaaccaattgctttaacttatgatgaaactggtacagatgttaactttggtgcgttaactgcaaagttatttgaaaatttagagcaacgtggtgtgggaattcaatataagcagaatgtattagacatcaagaaacagaaatctggggcatggctagttaaagttaaagatttagaaactaatgaaacgacaacatatgaatctgattttgtatttattggtgctggcggtgcgagtttaccattactccaaaagactgggattaaacaatcaaaacatattggtggtttcccggtaagtggattattcctgcgctgtacaaatcaagaagtgattgatcgtcatcatgctaaagtgtacggaaaagcagcagtgggtgcgccaccaatgtcagtgccgcacttagatacacgttttgtagacggcaagcgttcattgttatttggtccatttgcaggtttctcacctaaatttttaaaaacaggttcacatatggatttaattaaatcggttaaaccaaataatatcgtgacgatgttatctgcaggtatcaaagaaatgagtcttacgaagtatttagtgtcacaattgatgttatctaatgatgagcgtatggatgatttaagagtctttttcccaaatgctaaaaatgaagattgggaagtgattacagcagggcaacgtgtccaagtaatcaaggatactgaggattctaaaggtaacttacaatttggtactgaagtcattacgtcagatgatggcacattagctgcattacttggtgcatcacctggtgcgtcaacagctgtagatattatgtttgatgttttacagcgatgctatcgtgatgaattcaaaggatgggaaccaaagattaaagaaatggtgccgtcatttggttatcgcttaacagatcatgaggatttatatcacaaaattaatgaagaagtaactaagtatttacaagttaaataa

SEQ ID NO: 421008 - DNA, 918 bp, Staphylococcus aureus
atggcgacaaaaaacgaggaaatattacgtaaaccggattggttgaaaataaaattaaataccaacgaaaactatacaggacttaagaagatgatgagggaaaaaaatcttaatactgtatgtgaagaagctaaatgtcctaatatacatgaatgttggggtgcacgtcgtacagcgacatttatgattttaggtgccgtatgtacaagagcttgtcgtttttgtgcggttaagacaggtttacctaatgaacttgatttaaatgagcctgaacgtgtagctgaatcagttgaattaatgaacttgaaacacgttgttatcactgctgttgcgcgtgatgatttaagagatgctggttcaaatgtttatgctgagacagtacgtaaagttagagaaagaaatccatttacaacgattgaaattttaccatcagatatgggcggggactatgatgcgttagaaacattaatggcatcaagacctgacattttaaaccataatattgaaactgttcgtcgcttaacaccgagagttcgtgcgcgtgcgacttacgacagaacattagagtttttacgtcgttcaaaagaattacaaccggatatcccaactaaatcaagtattatggttggattaggtgaaactatagaagaaatttatgaaacgatggatgatttacgtgcgaatgatgtagatattttaacgattggtcaatatttacaaccttcacgtaaacatttaaaggttcaaaaatattacacgcctttagagtttggtaaattaagaaaagtggcaatggataaagggtttaaacattgtcaagctggacctttagtacgtagttcttatcatgcggatgagcaagtaaatgaagctgctaaagaaaagcaacgccaaggtgaggcacagttaaatagttaa

SEQ ID NO: 421009 - DNA, 822 bp, Staphylococcus aureus
atgaaaaaattatttggtcttattttagtattaacatttgcagttgtattagcagcttgcggtaatggaaacaaaagtggcagtgacgacaagaaaataacagtaggtgcttcaccagcaccacatgctgaaattttagaaaaagcaaaaccattattagagaaaaaaggttatgaactagatattaaaacaattaacgattacactacgcctaataaattactagacaaaggtgaaattgacgcaaactatttccaacatacaccatatttaaacacagagaaaaaggataaaggttacaaaatcgtaagtgccggtgatgttcacttagaacctatggctgtatactctaaaaagtataaaagtttaaaagaattaccaaaaggtgcaacagtctatgtgtctaataatccagctgaacaaggacgtttcttaaaattcttcgttgatgcaggtttaattaaaatcaaaaaaggcgtaaaaattgaagatgctaagtttagtgatattacagagaataaaaaagatattaagtttaataacaaacaatcagcagaattcttacctaaaatttatcaaaatgaagacgcggatgctgttatcattaattcaaactttgcaatcgaacaaaaactaaatcctaaaaaagattctattgctgtagaaagtgcgaaagataatccttatgcaaacttaattgctgttaaagaaggacatcaagatgacaagaaaatcaaagcattaattgaagtattacaatctaaagatattcaagacttcattaatgaaaaatacaacggtgcagttattcctgctaaataa

SEQ ID NO: 421010 - DNA, 615 bp, Staphylococcus aureus
ttgctcgatattacaaaaaatccatttatcgcattattatttatggttagcgaagaaaataaaaataaaattaataaacctagttttattttgtatgaaatagacgaaaatattcatcatgagtctcatctatttattagagttataaaagatgcaaataacaaacgaattgaagcgcaaagaggagcatttctatgttatgattatctatatagtttgaatataacagatataaaaagaattaatcgtataattttagatatagaagttagcaaagataaatatgtagaaaagttaaaaaaagacattgaaataatcaatcaattaaaaaaggaatatgaaaatagtgaagaaaaaaaagatagtgattttaataatatagtaaatgaagctatagaatttagaaaaacactattagaaaatcttgaaattcctaaagatgcgaatgaaaaaattgatgaatgctatgaagaactcagaaaagaaatgttaactaagctaaaagaatatcattattttgaaaatcaactttatccagatttagataaacaaattgcgtatatattgtctaaatacaatgaccaatcaagtaaaaaatacatttctgatttgtaa

SEQ ID NO: 421011 - DNA, 927 bp, Staphylococcus aureus
ttgttgacaattatttcgttgttcataggtgtgagtgaactatcaattaaagatttactacatttaactgagtcacagcggaatattttattctcaagccgaataccaaggacgatgagtattttaattgctggaagttcgttggctttagcaggcttgataatgcaacaaatgatgcaaaataagtttgttagtccgactacagctggaacgatggaatgggctaaactaggtattttaattgctttattgttctttccaaccggtcatattttattaaaactagtatttgctgttatttgcagtatttgcggtacgtttttatttgttaaaatcattgattttataaaagtgaaagatgtcatttttgtaccgcttctaggaattatgatgggtgggattgttgcaagtttcacaaccttcatctcattgcgcacgaatgctgttcaaagcattggtaactggcttaacgggaactttgccattatcacaagtggacgctatgaaattttatatttaagtattcctcttttagcattgacatatctttttgctaatcatttcacgattgtaggaatgggtaaagactttactaataatttaggtttgagttacgaaaaattaattaacatcgcattgtttattactgcaactattacagcattggtagtggtgactgttggaacattaccgttcttaggactagtaataccaaatattatttcaatttatcgaggtgatcatttgaaaaatgctatccctcatacgatgatgttaggtgccatctttgtattattttctgatatagttggcagaattgttgtttatccatatgaaataaatattggtttaacaataggtgtatttggaacaatcattttccttatcttgcttatgaaaggtaggaaaaattatgcgcaacaataa

SEQ ID NO: 421012 - DNA, 201 bp, Staphylococcus aureus; identical to SEQ ID NO: 406409

SEQ ID NO: 421013 - DNA, 147 bp, Staphylococcus aureus
atgtttgtactcggcatatttgttttcaaagagccttttagtatagatcaattaattacgtttatatttatttggacaggtattgtgttatatagtctttctcaatacattaaattgaagaaacatccggtcgcaaaaaccctataa

SEQ ID NO: 421014 - DNA, 207 bp, Staphylococcus aureus
atgaaaatcaaactagaaaaagaaatgaacttgcctgaacttatccaatgggcatgggataatcctgaattatcaggaaataaaagattctatccaaatggtgttaggcgcaactgttatgtaacttttggtgttgatagcgtcttatgtaatgtgactggatatgtatcaattaatgataaattcactatacaagaggagatataa

SEQ ID NO: 421015 - DNA, 405 bp, Staphylococcus aureus
atgaaaatcaaaactaaaaaaataatgacattaactgaattaattgaatgggcttgggaaaatcctgagctaacaaatgataaaagatttttttcgagaaacagttgtctctcaggttttgttaaatttcatcctggtataaatagaactatcacaactgacaatataatgtttgatgatgaatttgaagttgatattgaagaaaaagtaaccaaagatacggtatttaatagattgtttgaagtgtacgagttttcagaaggagagtataattctgcatcatataggaatgctagtataaatgaacgtttaaatgatatacgctttcctattaaagcattctatatcttaaacgacgacatgacgatgacattgatttggagagatggggagttggtagaatga

SEQ ID NO: 421016 - DNA, 426 bp, Staphylococcus aureus
atgatgttgaaatttagagcgtgggataaatatgaaaaaacaatgttagatgttcatggaattaattttgatgaatatggtgtatggactcgtgaattgattgatgatgaagatgatggtggttttatccttacagaagatgtaaaactattacaatacacaggacttaaagacaaaaacaacaacgaaatatatgcgggagatatagttgagttcgatatttccgttgcatacgaatatgacatattaaacaaagctatagttacgatgtcaaatgttggtggtgttaagcctactcttttcacgatggaagaatgcggtgacgtagttgaatggtcgtattttgaaaaagatatagatgaattggatttcttcgatgattgcaaggttgttgggaatatttacgaaacaccgcatctattatga

SEQ ID NO: 421017 - DNA, 264 bp, Staphylococcus aureus
ttgagttatcttccggtcgatgttttcatttattcttctgaggttgtagttttagatgcaatagataataaaaaatatgatttagtataccaatcttttagctatttacaaaaatctgaaaataaccttactgaaagacaaaatgttattgctgataaatatcatacatttttggataaaatacctaaatgtgatgtttgtggaggatttatagatggttattcaacggaaaatcaaaatattcataattgttgtaaagaataa

SEQ ID NO: 421018 - DNA, 396 bp, Staphylococcus aureus
atgaaaaacaataaaattattttattagacaaggtggaagatcaaaaacttaaagaaagaatagaaaactttaaatttttcggacaatatgccgatttcaagagtttgaaaagttacaacaatggcgacgtttcaattaatagtaatgttccaagttatgacgcgaaatttaaaatgagtaataaagatgaaaatgttaagcaattaagaagtcgttataacattcctactgaaaaagctccaatattaaaaatgcatattgatggggacttaaaaggcagttccgttggatataaaaagttagaaatagacttttcaaaagaagaaaatagcgaattatcagtagtcgattcattaaattttcagcctgccaaaaaaaataaagatgatgaatga

SEQ ID NO: 421019 - DNA, 1035 bp, Staphylococcus aureus
atgcctgcaactttgtctattattaagtcatattacattgggaaagatagacaacgcgctttaagttattggtcaattggctcatggggcggctctggtgtttgttcattttttggaggtgcagttgcaacgcttttaggttggcgttggattttcatcctatcaattataatttcattaattgcactgtttcttattaaaggcacacctgaaactaaatctaaatcgatttctctaaataaatttgacattaaaggtctggttcttttagtcattatgctcctcagtttaaatattttaattactaaaggatcagaattaggtgtaacctcacttctttttatcactttattagcaattgcaattggatcttttagtttatttatagttcttgaaaagcgtgctacaaatcctttaatcgattttaaattatttaaaaataaagcttacacaggtgcaacagcttcaaactttttgttaaatggtgttgcaggaacattaatagtagccaacacatttgttcaaagaggtttaggatattcttcattgcaagcaggaagtttatcaatcacttatttagtaatggtactaattatgattcgtgttggtgaaaagttacttcaaacactcggatgcaagaaaccaatgttaattggaacaggagttcttattgtcggagaatgtctcatttcattaactttcttgccagaaatattgtatgtcatttgttgtattataggttatttattctttggtttaggactagggatatatgctacaccatcaacagatacagcaattgcaaatgcaccgttagaaaaagtaggcgttgctgcaggtatctataaaatggcttctgcattaggtggagcatttggcgtcgcattgagtggtgcagtatatgcaatcgtatcaaatatgacaaacatttatacaggtgcaatgattgcattatggttaaatgcaggtatgggaatattatcattcgttatcattttgttacttgtgcctaaacaaaacgacactcaattatga

SEQ ID NO: 421020 - DNA, 165 bp, Staphylococcus aureus
ttggatgctaacgcaccaacagcaaaagagcccctaattaataaattaaaaggggacaaaggaacgcagttgattgttaatgcaccaacagcaaaagagcccctaattaataaattaaaaggggacaaaggaatacagttggatgctaacgcaccaactgcataa

SEQ ID NO: 421021 - DNA, 843 bp, Staphylococcus aureus; identical to SEQ ID NO: 406649

SEQ ID NO: 421022 - DNA, 471 bp, Staphylococcus aureus
atgagtgttattgtttttggttattttggtggttttttagtggatagaaaaggatcattatttgtttttattttaggatcattgtctatctctataagttttttaactattgcattttttgttgagtttagtatgtggttgactacttttatgtttatatttgttatgggcggattatcttttactaaaacagttatatcaaaaatagtatcaagtagtctttctgaagaagaagttgcttctggaatgagtttgctaaatttcacaagttttttatcagagggaacaggtatagcaattgtaggaggtttattgtcactacaattgattaatcgtaaactagttctggaatttataaattattcttctggagtgtatagtaatattcttgtagccatggctatccttattattttatgttgtcttttgacgattattgtatttaaacgttctgaaaagcagtttgaatag

SEQ ID NO: 421023 - DNA, 618 bp, Staphylococcus aureus; identical to SEQ ID NO: 407393

SEQ ID NO: 421024 - DNA, 348 bp, Staphylococcus aureus; identical to SEQ ID NO: 407392

SEQ ID NO: 421025 - DNA, 348 bp, Staphylococcus aureus; identical to SEQ ID NO: 407392

SEQ ID NO: 421026 - DNA, 693 bp, Staphylococcus aureus
atgatggtttattatgtcgttatatcgttaataatgctagataattttaaaaaaatgaaaaaccgtgaatatcaaaaagaaatagcagaaaaaaatagacatattaatacattaattgctgaacaagagcgacatagaattggtcaagacttacatgatacgttagggcatgtgtttgcaagtttatcattaaaatcagaattagcttataaactaatagatactgatgtagaaaaagtaaaagctgaattattagcaattaataaattatctcgtgaatcattgaacaaagttcgagaaattattgatgatgtaaaattaccatcatttattgaagagattgatagtatacgtaaagttttaaaagatgctgatattgattttacatttgaaaataaagaattagcgcaagtattaagtcctactaaacaatctatgttagttatgattacgcgtgaagcgataaataatgttattaaacatgcaaatgcttcaaaagttcatggtaaattaaaaactgtaaacaatcataaattactgcttatgattgaagatgatggcaaaggtatcgatagtgattgtgaggtgaaaagtatttcacagcgtgtacaacatttaaatggaactttagcagtcgactcaacaaatggaactaaaataatcattgaaatctcaacaggaggaatagcatga

SEQ ID NO: 421027 - DNA, 333 bp, Staphylococcus aureus
gtgggctcggagatgtgtataagagacaggtctaaattagttggtacggttgcaattgttacgatagcaagttgtggcgccgataatattggtttatttgttccgtattttgtgacattaagtgttactaatttattacttactctgtttgtctttttaattttaattttcttcttggtgtttactgcacaaaaattagctaatatcccaggaattggagaaattgttgagaaatttagtcgttggattatggctatcatttatatagctttaggtttatttattattattgaaaatgacactattcaaacaattttaggatttatattttaa

SEQ ID NO: 421028 - DNA, 348 bp, Staphylococcus aureus; identical to SEQ ID NO: 407392

SEQ ID NO: 421029 - DNA, 1065 bp, Staphylococcus aureus
atgtgtataagagacaggaattatacaggcaaaagaaaaattagaacagacgcgattaaacacattgatggtttaattacatcagacaatgatttctttgataatcaaacgccagaacatacaaagcagttttttgaatatgctaaagagtttttagaacaagaatacggtaaagataatttattatatgcaacagttcacatggacgaaaaaacaccacatatgcattatggcgttgttccaataactgatgatggtcgtttaagtgctaaagaagttgtaggtaataaaaaagctttaacagcgtttcaagatagatttaatgagcatgttaaacaacgaggatatgatttagaacgtgggcaatcaagacaagtaacaaatgctaaacatgagcaaataagtcagtataaacaaaaaacagaatatcataagcaagaatatgaacgtgagagccaaaaaacagaccatataaagcaaaagaacgataaattaatgcaagagtaccaaaaatcgttaaatacgcttaaaaagcctataaatgttccgtatgagcaagaaactgaaaaagtaggtggtttatttagcaaagaaatacaagaaactggaaatgttgtaataagccaaaaagatttcaatgaatttcagaaacagataaaagctgctcaagatatttcggaagattacgagtatataaagtctggtagagccttagatgataaagataaggaaatacgagagaaagatgatttattaaataaagcagttgagcgtattgaaaacgcagacgataattttaaccaactttacgaaaatgcaaagccacttaaagagaatatagaaatagcgttaaagcttttaaaaatcttactaaaagagttagaacgagttttaggaagaaatacctttgcggaaagagttaataagttaacagaagatgaaccaaaactaaatggtttagcaggaaacttagataaaaaaatgaatccagaattatattcagaacaggaacagcaacaagaacaacaaaagaatcaaaaacgagatagaggtatgcacttatag

SEQ ID NO: 421030 - DNA, 717 bp, Staphylococcus aureus; identical to SEQ ID NO: 70581

SEQ ID NO: 421031 - DNA, 3552 bp, Staphylococcus aureus
gtgtataagagacagaatttagcttcacgatatactgcgaataatgatgtcgatactattaataataaaattatagaaggtatttctattaccaataattttaaatatactaatatttcatatctaaaagaattaaaaggttatatcgaaaatgatattttagataagatgaaatcaaaatacgcaaagaatatttatttgaatttcaaaaaaatattctctaatttagaacaatcagtcaataattatttggaactggaagaagagtttgaagaaaagaaaaaatacttaagtgaaatttatgaattgatagacgaaattaatattgacccttatatttttctgacagaacataatgaatgtaatatatacaaaataagtgagaatgaaaaattagaacttcaaacttatatgagtaaaatcgaaaaagtattattaaaatatcaaacgtatttaaaagaaacatgtaaagaatgcttgttttatccttatttgctagttcaaggtgaagctggcataggaaaatcacaccttttagcgcatctatctaaaaaacttagagatgaaaatcatattatttatctgtttttgggacaattttttactaaaaatgaagatccatggcatcaaatacttaatgatttagaagttacaaattctgttgataattttttaaggtcaataagtaataaggccaaagaaacaaaaaaaagagcttttattattattgatgcgcttaatgaaggtgaaggtaaaaggttatggggaaattattttcaaagctttatcaaccatataaagaagtattctaatatagctttaatattttctattagaaccccttttgaagatgttatattacccaaaaacgcaatacaagataacaatattgtagtatttcagcatgaaggttttagtaaggaagaaaactataatccaattgtatctttttgtgatttttatggattagagctacctaagttacctatattaaatccagaattcaacaatccattatttttaaaactaatgtgtgagtactgtgtaaataaatttaaggaatttgaccaaactataagtgttgcagagctatttacaaatgttcttaagacagtaaatattaatttatctaaggaagataaatttgattttgataaaaatattaatgttgtacaaaaagtaataaaaggattagttgaattaatgaacgactcagaatttaatcaactaaattatgaggaatcctatactgttgttaataatatagctaaagagtatgttcaaaagtcaaatagatttttagaagcgctaatagatgaaaatatattaattaaaaatactggctataaaggtgaaatgattatttatttttcgtatgagcgtatgggagattactttttatcagaataccttttagagaaatatagaaatgttgataaaagagatttagtaactaaattacagtcagatgaaaaagtgacaaggtattttcaaaaggaagacgatttatcttataatagaggtcttattaatgaactttttattaaattagcaaatgaatttaatatagagctatttgaagtatttccacagtttaaaaacaattataacatgatatattcttttataaatagtttagtatggagaaaagatggtagcataagtaaacatactaaatgctatatatccgataatgttattccttatgatgcatttagaaataattttttagatgtcttattaataaaaatgcctcaaaaaaaccatccgttaaatatttgggctttacataaattattgaaacaatgcaatttaggaaaaagagattttttatggactcaatatatatctataaataatgaaaaggtttttgaaattattaattggctatttagtaactataagaaattagatgaagaaactgcggaaaaatatatgatttttttaacgtggatattttctgcaactaataataaattaagagatctcggtactaaatctttagtaaaattattcaaaacatttccaactaaaattattggtttattaaaattatttgaaaataacaatgatccatatatagtcgaaagattatatgcttctgttttaggggcgacacttcgaatcgacatttgtgaaatacatatagagattgctaattatatttatgaagaaatatttgataaagaaatggtatatcctcatattttaatgagagattatgctaggcaaacaattgaatatattagtttatcaaaagatatatctaatataaatttagaaaaaattaggccaccttataaaagtaattggtataaaaaagaatattcgaatttaaatatagacgattacataaaatctttaaaaaacaaattagatagccatttacatttttctatcgataaaattaaaaactcaatgacaacggaatatggaagaggaactggggcatatggcgattttggcagatatgtatttggttatgctgtacgaaactgggtaaagggttttaaaagtgatcaagacttgagtaatatagcattaatgaggatttttgaaatgggttatgatgcaaaattacatggtgaatttgatatgtgggttaatcgttatgataactttaataattcaattgaaagaattagcaaaaaatatcaatggattgcttactatgaaattttagctaaacttgtagataaatttcctgatgttcaatattctggactatgggatgattatattagagatattgatcctactttactattacttgaaattgataaagaatcaaaaatactagtaccctcaccacttccttcgcatcaatcgaatgaatgggtaaaaaataccaaagtttttgatgaaacaaaattatttttagaaatagatatagacaatcatagatatatatgtttaagctcaaagtttaattttgaaaagagagagaaagaaataccatttgaagatagagactcatgttatttcttagcgatgggatatttttataataaagaagatagtaatgaaattatcaaaggttatgaaaataattatgatagaggtattaatattcctcgagcacatagtatatatttatatgaatattattggagcgaagcttataaaaattataaagagggatatttaactgaatcagatggtaaattatgtccagctatttatgaatatttttgggagttagattattctgttaaggacaaatcaataagtttttatattccgtgtaaagaaatagtagattatttttcattaatacaaacggaagaaggagtatggaaaactaaatttggtgaaacaatatgtattaattctaaattactcgaatttgataatgaatgtttacttattaaaaaagaaagtttattaaactttcttaatactaaaaaattgtctattggatggaaaatatatctagaaaaaatttctcttcgagatagacaagaatggtggtacaatgttttttatgacgatggcaaatataataagaaaataattaagaatgacatgtcaaaaattaggcgtaatttttag

SEQ ID NO: 421032 - DNA, 255 bp, Staphylococcus aureus; identical to SEQ ID NO: 414747

SEQ ID NO: 421033 - DNA, 405 bp, Staphylococcus aureus
atgatttttacagttgttcctgttcataatgaagttgaagctaaacctaaaaaaggttctgttgtaacgattaataaaaagcaatatatatatcaagggactgtaaaaaaatattatcctgcaaaatattgtaaactggttaataagtatgctaagaattcccagtcttttacaaatttagtggctggtactagcggttttgcgacttttgcaaaaaaagctggttatgctggtgtgttagcttcgagtttatatattgctaatttaggtgttcagaataatactacgatttacaaaaatgctgcaagaaaaggtacgggtgtgcaagttagttatgatttatatgttcctaaaacaggacataattatggattaacacgtaatacaaaagttgtatataaataa

SEQ ID NO: 421034 - DNA, 483 bp, Staphylococcus aureus
gtgaagtatagaaaattaataattttagtgttgagtatcttgatcatattgcctgtaagcacactggatggtcatcatattgcaaatgcagatgacgattcacctaaaaaactgaaatataaagaaaatagtgctctggcattaaattatcaccgtgtaagaaaagcgaattttctgaataattttatttacttcttttctagtagtaaagaaattaaaaattatagtgttagtcaatcacaatttgaatctcaaataaaatggctaaaatcacatgatgctaaatttttaaccttgaaagaatttttatattacaagaaaaaaggtaagtttccaaaacgaagtgtatggattaactttgatgatatggatgaaactatttatgaaaatgcttatccaatcttaaaaaatataaaataccggcaactgggtttattatcacaggtcatgttggggaagaaaactttcacaacctcgatatga

SEQ ID NO: 421035 - DNA, 348 bp, Staphylococcus aureus; identical to SEQ ID NO: 416921

SEQ ID NO: 421036 - DNA, 180 bp, Staphylococcus aureus
ttgaatcaaaaagagtggttgcgtttatggcgtgaggcaacaggaatttcagaaattacgcaagtagatgtgcgtcgggtcaaagagcaaaatagtaatgagttgtatgaaatggctaaatatacaggtaaagatagtgattatttatctaatgaaaaagtgtttaaagttttttattag

SEQ ID NO: 421037 - DNA, 204 bp, Staphylococcus aureus; identical to SEQ ID NO: 416908

SEQ ID NO: 421038 - DNA, 1956 bp, Staphylococcus aureus
atgcgttatatcggctcgaagatatcactattacacgaaataaagaaattattggatagacatgttcaaggaaatgaacaatcttttttagatttatttgctggtacaaactcagttgctagatttttcaaaaacgattatgcagtcattacaaatgatattctttatttcagttttgtaaatgctaaagccacgattgaaaataatgataaacttgaatttaataaacttgaattcaacccttttgaattttttaacaatgataaacatgctttcaactactctcgtaataattattataccgaaaactatacacctgtaggaggatcaatgtattttaccgaagataatggtagacgaattgatttcattagaaatactattgataattggtataaaaaggacctactaaccgaatatgaatactattatttaatagcttcattaatagaatccataccttttgtaagtaatacgacaggtacatacggagctttcctgaaacattgggataaaagggcattaaaaccactaaatataaagcctctaatgattgttaataataatcaaaataataaagcctataatgaggacgctaataatcttattagaaaaattaagcctgatatcacctatatcgatataccttataataacaggcaatatgcttctaattatcacctattagaaaatttagctaaaaacaatcaacctagtttaaagggcaaaactaaaatatttgattggagccatttaaaaagtgaatattcaatgaaattaaaagcatataacgctttagaagaccttattaaaaatattgatactatacatcttatacttagttataatgatgaggggattataagctataatgacattttagaactattgaaaaaacactctataaataattctgtagaccttgttaaaataccttttagaaaatataaatcaaaaatttcttctacaaaaacagaacttaatgaataccttttttatattaaaaaaaaagattgtaaaaaagaaaaattacctgaatctcaaaatggaaagataactaaatggaatccaactcaaaattattatattaagagtccacttaattacataggtggaaaatataagctacttgaccaaataatacctttattccctaaaaatatttctacatttgtcgatttatttgctggtggtgctaatgtaggagtaaatgtaaaagcttctagacatatttttattgatatgaattttaaaattaatgagatgtttagattatttgcaaaagaagattctcaaaaattaataagtcaaattaatcgtagaattaaagaaaaaaatttaagtaaaactaatgaacaatcctttattaaatttagaaatcaatataatcaaaatcccaatcctattgatttatatattttaatttcgtattcatataactatcaaattcgatttaataacaacctaaaattcaataatccattcggaaaaaatcgaagctattttagtaataatatgaagaataatttagtgaattttagcaacaagctaaaatctttaaatcacgagtttattgatagttattttcaagatatcgatttatctttcttagataaagaagcattagtttatctcgatccaccatatattataaccacaggtagttataatgatggtaatcgtggctttcaaaattggggaatatctcaagaaaagcaaatgtataatttgatgaaaactctaacagatagaggtatacgttatgcacttagtaacgttctacaccacaaaaacattgaaaacaaattattacaaaagtttatcgacgagaataatgtccaagtccaccatttaaatcatagctatcataattcatcttacaatacaacaagagctcaaagcgatgaagttttaattactaactatgataaagatactttcaaattattagattaa

SEQ ID NO: 421039 - DNA, 1743 bp, Staphylococcus aureus
atgaaatatagatcattcggatggattcaaaatccatcagatttcaataaattaaagaaaacagttgaaatctttgattgtaattctaaacaatatagcttattaaaagaaggattagtgggaaaaaatttaaataactttaaagatattcaaaaaaatttacaaagtaagttagataagaatgttgaagaatttacgtatatggaattagtgggaagaaatataaacaaagatgggaaggttccaaatactcgaaaagaagctgtcccaaatgctttaattcaaatctcattagagtcacaaagtgcaaatactaaaggtaaaaattttacagatgattggacatcagatggttttttaagatgggcagtaagtttaaattttgtcaaacataatatggaaaatgatacttttaaaataactaataaaggaaaagagttgataaatgcagtttcagaaaaagaaatgaataaagttataagtaaagctttacttagctatcctcctgcaactcgagtactagatattctaaatagtaaaaatggagtaacaaaattttatattggtaatagattggggtttaaggatgaacctggattcacttcgtactcagaagacttgatgatagagtgggttaaagaaacagagagtataaaagaattgaaaaaaattcgctctgacgttgaaggtacggcagataagtatgcaagaatgatatgtggatggctaaaaaaggtagattttgttagtcaaaaaaatagtagatatatgtcttcaaagaatacagaagttacaggttttattgagtattcaattacaggcaaaggtaagcacgctttaatgcaatctcaaggaaagtctaaaaatagcaaggtagagaaatatttattatgggaatttttatcagttaaaggagaaggtaaaaattacattagaacaaggagaggaattattttgaagtatttaaaaaattcttcttctctaaatggacttatgaatcatttgaaacataaaggttttgaagaatcattagacgtgattaaaactgacatagaaggattgaataatataggtataagaattgaactaaaaggaaattcaattaaattgttagataagataaacgatttctatattccaaatacaaatttgaaattaactagtagagaaaaaagtagattgaatttaaaggaatattttgtttctaatacaaatcttccaaataaatttattacattattagatttagcatatgatggtaaggcaaatagagatttcgaattaataacttcagaattatttagagaaatatataaattaaataccagacatttaggcggtacacgtaaacctgatatcttaatatggaatgaaaattttggcatcatagctgatactaaggcatacagcaaagggtataaaaaaaatatatcagaagaagataagatggttaggtatatagatgaaaatattaagagaagtaaagattataatcctaatgagtggtggaaagtctttgataatgaaataagttcaaataattatttctatttatggatttctagtgaatttattgggaaatttgaagaacaattacaagaaactgctcaaagaactaatgtaaaaggagcttcaatcaatgtatatcaactattaatgggagctcataaagttcaaactaaagaactcaatgtaaattcaatacctaaatatatgaataacacagaaattaaatttttatag

SEQ ID NO: 421040 - DNA, 846 bp, Staphylococcus aureus
atgagtgtattgtatagatatataaatttttatgaatataataaagaattcattgaaaatctaaaagctaagtatttagaattagaagaaattttaaactttatttcagataaaaatcatcatatgaggaaatttatgaagattttaggtaaagaaccaggacattataaaaaaataaccgatgcaatgcaaagggagttgcttataagctgttatgctgtttcagaaaatatgataaaagaatttatatattgcatattagaatataaagaacataagaatgctcatataaacaaatttttagatgataaaattagtgaagatagattctcgccaaacgtaaaatatgaaaatataaaaaaagaattatcaaagtatttttccgaacataaatttatatttaaaaaaactaaacaagaagtgaaatcatacgaaaatttaattagtaataggcattcttatgcacataataataattatagatttgagtataatgattttggagaagcaatacaaacaattgagtatatttattacgagctgtattcggctataaataacttggaattacaaaaaaatataaaagaaataaccagtaaaatagaaaaaattaaaaaaataaacaatatagaacattttaagaaaaagtcaaaagaaataacagtaattaaaaaactttcaaaagaaatagtgaaacaatatgatgaacaaaaaattgacatagaacttataaaaccattaattgatagttttagaaatattgctagactagatttacgaaaaaaaagtgaatctttaagaatgatgaaccatgaactaattaatataaacaatattttaagttaa

SEQ ID NO: 421041 - DNA, 1305 bp, Staphylococcus aureus
atgaaaatttattataaaacaaaaacaggagataataatactgaaattttaacagttaatgatttgatggatgatcaatttgattgtgaaatggaagtggaaaatatttatgattttcaaaacaaatgtaaagaattaaatcttgaagtggatgacgatattgaggctcgtgtatcaagtttgttagagaacagaattgaagaggttaatggtaatttagaagagtttgaaataaagcattgggtaagtaacagatcttttggagagttaatagaaatgtatgaagaagatgagattactataccaattatgcaaagaaattttgtatgggattctgttcaatgttcaaggttaattgaatcaataattttagggttacctataccaccactatttttaatagaaattgaaagtaataaatatgaagtgattgatggtctacaacgaattactgcaattagtaactttgtgaaacaaagaccttggaattattcaaaggatagaggaaaaaccagaactcctaaagcgagactttctaaattggtagacaaaagtattgctggaaaatcttttgaccaattaagcgaaaatttccaaagaaaaataaaaagaagtactattccattaatagaatttaaacaactaaatccagataattataagtcaaagtatcttatatttgaaagaattaatacgggatcccaaaaattaaactcaatgcaaataagaaaatcactagcttctggtgattttatgattgatttatataaaaaatgcgatgacaataagttattaaaatctatatttactaatacagcattaaaaaaggatttacatgtggaggcctacttaaggacctttgtttttaataaattagttaacaaagattttataacaagtcatcatggaataaaaaatattttgaatgactattgtgagacatatagtccaacctcaatagatcaaaatttcaatgaaaaatttataaaatctttagaacggttatgtatagaatttgaaagttttaaagataatccttttagaagggttttaaaaaaaggaaataacaattatgaatttgtagggaacctaagtgtaacaataatggaatctttgctagctgcgttgataaataatgaagaaaaaaatatcgattttaataaactagaagaattgtataaaatcagaataagtgagttttctgaaataagtaacaatccatttactacatcaacaggtaagcatgattcaattaaagaaaggtttagagtttttaaggaaattgtagatgagtgtattgtatag

SEQ ID NO: 421042 - DNA, 360 bp, Staphylococcus aureus
atgccaacagttatattaacagaagcagctgcctacgaagtaaaagatatgcttaaagcaaatgaaatgccagatggctatttaaaaattaaagtgaatggtggcgggtgcactggtttaacatacggtatgggtgcagaagaagcgcctggtgaaaatgatgaagtcttagaatactttggattaaaagtattagtagacaaagaagatgcacccgtattaaatggtacgactattgattttaagcaatcattaatgggtggcggtttccaaatcgacaatcctaatgcaattgcttcatgtggctgtggtagttcatttagaactgcaaaagttgcaggtaatcctgaaaattgctaa

SEQ ID NO: 421043 - DNA, 237 bp, Staphylococcus aureus
atgaatccgatcgtagaattttgtctctctaacatggcaaaaggtggagattatgtttttaatcaactggaaaatgacccagatgtcgatgtgttagagtatggttgcctgacacattgtggtatatgttcagccgggttgtatgctttagtaaatggtgatattgttgaaggtgattcgccggaagaattattacaaaatatatatgcacatataaaagaaacatggattttttaa

SEQ ID NO: 421044 - DNA, 1065 bp, Staphylococcus aureus
atgaaaaacttagttttgttaggcggcggatatggtaatatgcgtatcatgtcacgcattttaactacttctttaccacaagattatacagtcacattagttgatcgtatgccatttcatggattgaaaccagaattttatgctttagctgcgggcacgaaatcagataaagatgttcgcatgaaattccctaatcatccacaagtgaatacagtttatggtgaaattaacgacatagatttagatgctcaaattgtctcagtcggtaattctaaaattgattatgatgagctaatcattggtttaggatgtgaagataaatatcataacgttccaggagccgaagaatatacacatagtattcaaacactctcaaaggctcgggatactttccatagtattagtgaactaccagaaggtgctaaagttggtatcgttggtgctggattaagcggcatagaacttgccagcgaattaagagaaagtagatcagacttggaaatatatctttatgaccgtgggccgcgaattttaagaaattttccagaaaaattaagtaagtatgttgcgaaatggttcgccaaaaataatgttactgttgttccaaattcaaatattaataaagttgaacctggtaaaatatataactgtgatgaacctaaagatattgatttagttgtatggacagcaggaattcaacctgttgaagttgttcgtaacttgccgattgatataaatagtaatggacgcgtgatagttaaccagtatcatcaagtaccaacatatcgtaacgtctatgtagttggtgattgtgctgatttaccacatgcgccaagtgctcagttagccgaagttcaaggtgatcaaattgccgatgtgcttaaaaagcaatggctaaatgaaccattacctgacaaaatgccggaactaaaggtacaaggtatcgttgggtcattaggagataaacaaggttttgcatatatcatggaccgcactgtaacaggacgactcgcttctattttaaaatccggcgtactttggttatataaatatcataatggttaa

SEQ ID NO: 421045 - DNA, 324 bp, Staphylococcus aureus
atggagcacgtgagtgtggtagtatatggggaagatgttatatgtgcaagttgcgttaatgcgccaacatcgaaagatatttatgactggctacagccgctattaaaaagaaaatacccaaatatatcatttaaatatacgtatatagatattacaaaagataatgacaacttaacagatcatgatttacaatttattgaaagaatagaacaagatgaactattttatccattaattacaatgaacgatgaatatgtagcagatggttatatacaaacaaagcaaatcactcgatttatagaccaaaagcttgtgaatgaataa

SEQ ID NO: 421046 - DNA, 243 bp, Staphylococcus aureus; identical to SEQ ID NO: 405449

SEQ ID NO: 421047 - DNA, 1176 bp, Staphylococcus aureus
atgaaattaaaaccttttttacccattttaattagtggagcggtattcattgtctttctattattacctgctagttggtttacaggattagtaaatgaaaagactgtagaagataatagaacttcattgacagatcaagtactaaaaggcacactcattcaagataagttatacgaatcaaacaagtattatcctatatacggctctagtgaattaggtaaagatgacccatttaatcctgcaattgcattaaataagcataacgccaacaaaaaagcattcttattaggtgctggtggttctacagacttaattaacgcagttgaacttgcatcacagtatgataaattaaaaggtaagaaattaacatttattatttcaccacaatggtttacaaaccatggtttaacgaatcaaaactttgatgctcgtatgtctcaaactcaaattaatcaaatgttccagcagaaaaacatgtctactgaattaaaacgtcgttatgcacaacgtttattacagtttccacatgtacacaataaagaatacttgaaatcttatgctaaaaaccctaaagaaactaaagatagttatatttctggttttaaagagaatcaattgattaaaatagaagcgattaaatcattgtttgcaatggataaatctccattagaacatgttaaacctgctacaaaaccagatgcttcttgggatgagatgaaacaaaaagcagttgaaattggtaaagctgatactacatcgaataaatttggtattagagatcaatactggaaattaattcaagaaagtaagcgtaaagttagacgtgactacgaattcaatgttaattctccagaattccaagatttagaattacttgtaaaaacaatgcgtgctgctggtgcagatgttcaatatgtaagtattccatcaaacggtgtatggtatgaccacattggtatcgataaagaacgtcgtcaagcagtttataaaaaaatccattctactgttgtagataatggtggtaaaatttacgatatgactgataaagattatgaaaaatatgttatcagtgatgccgtacacatcggttggaaaggttgggtttatatggatgagcaaattgcgaaacatatgaaaggtgaaccacaacctgaagtagataaacctaaaaattaa

SEQ ID NO: 421048 - DNA, 237 bp, Staphylococcus aureus; identical to SEQ ID NO: 405451

SEQ ID NO: 421049 - DNA, 1215 bp, Staphylococcus aureus
atgattccatatggtgattttacattcttcttaattgctttaattgcattattaccagtcattatacttggatttttaggtaagcgaagttacatttataatggcgtagttacagcatttatgattgtgttaatcttttcttctgataaacataatctgtttgaccaaaagtatttaagtgttcaattaattagttttattatttacgtcgtatggcaagttttattgataatgttttattatcattcaaaaccaaaaaataattcattttcaaaatttgtaactgtaatggttttatcaatattgccattagcacttgtgaaagtgttacaaagtacatggttaggtggacatcagattcacttccatgaaagtaaattaattgaatttgttggtttcttaggaatttcttatgttacattcaaaagtgtgcagttaattatggaaattcgtgatggttctatcaaagaaattaaagtatggaaattaattcaatttatttcattcttcccaacgatttcatctggaccaatcgatcgttacaaacgtttcgttaaagacgataaaaaagtaccaacaggcaatgaatatcgtgaattagtattaaaagcaattcacatgattatgcttggtttcttgtataaatatattgttgcttaccttattaacacatatgcaatcatgccgttacaattagacttacatggctttgtcaatttgtggttatatatgtacgcatacagcttatatttattctttgactttgcaggttatagtttatttgcgatagcatttagttatttattcggtattaaaacaccaccaaacttcgataaacctttcaaagcgaaaaatattaaagatttctggaatagatggcatatgacattatcattctggttcagagattgtatttacatgagatctttattctacatgtctcgtaaaaaattattgaagagtcaatttgcaatgtctaacgtggcattcttaatcaacttcttcataatgggaatttggcatggtatcgaagtgtattacattgtttatggtttataccatgcagcattgtttataggttatggctattatgaacgttggcgtaagaaacatccgccacgttggcaaaatggtttcacaacagcacttagcattgtgattacattccactttgtaacatttggctttttaatcttctcaggtaaacttatataa

SEQ ID NO: 421050 - DNA, 1458 bp, Staphylococcus aureus
atgacagatattattaacaagctgcaagcgtttgcggatgcaaatccacaaagcattgctgttagacacacaactgatgaattaacttatcaacagttaatggatgagtctagtaaattagcacatcgattacaaggtagtaagaaaccgatgattttattcggtcacatgtcaccatatatgattgttgggatgattggtgccattaaagcaggatgtggatatgtacctgtagacacttcaattcctgaagaccgtattaaaatgattattaacaaggttcaaccagagtttgtatttaatacgactgatgaatcatttgaaagtttagaaggcgaagtatttacaatagaagatattaaaacatctcaagacccagtaatttttgatagtcagattaaagataacgacacagtatacacaatctttacatctggttctactggggaacctaaaggtgttcaaattgaatatgcaagtttagttcaatttattgagtggatgttagaacttaataaatcaggaaatgaacaacaatggcttaaccaagcgccattttcatttgatttatctgtaatggctatttatccatgtttagcatcaggcggtacattaaatcttgtagataaaaacatgattaataaacctaaattattaaatgaaatgctaacagcaacaccgattaacatttgggtatcaacaccatcatttatggaaatgtgtttattattaccaacgcttaatgaagaacaatatggtagtcttaacgaattcttcttctgtggtgaaattctacctcacagagcagcaaaagcgttagtaaaccgtttcccaagtgcgacgatttacaacacatatggtccaactgaagctacggtagcagttacaagtattcaaattacacaagaaatcttagatcaatatccgacattacctgttggcgttgaaagaccaggcgcaagattatctactacagatgaaggtgaacttgttatcgaaggtcaaagtgtaagtttaggatacttaaaaaatgaccaaaaaacagctgaagtatttaatttcgatgacggtattcgtacatatcacactggtgataaagcgaagtttgaaaatggtcaatggttcattcaaggtcgtattgatttccaaatcaaattgaatggctacagaatggaattagaagaaattgaaacacaattacgccagtctgagttcgtaaaagaagcgattgttgtacctgtatataaaaatgataaagttattcatttaattggtgcaattgtgccaacgactgaagttacggacaatgcagaaatgactaaaaatattaaaaatgacttgaaatcacgcttaccagagtatatgattcctagaaagtttgaatggatggaacaattgccattgacttcaaatggtaaaattgacagaaagaaaattgcagaggtaattaacggatga

SEQ ID NO: 421051 - DNA, 153 bp, Staphylococcus aureus
atgaaatctaaaagtaaacagccacctaataaatatgttgaagcattcaaaccatatttattaacactattgtatttggcaatatttattactttatatttaatttatggcagtggcgacacacacaataacttcatttataatgagttctaa

SEQ ID NO: 421052 - DNA, 960 bp, Staphylococcus aureus; identical to SEQ ID NO: 405455

SEQ ID NO: 421053 - DNA, 780 bp, Staphylococcus aureus; identical to SEQ ID NO: 405456

SEQ ID NO: 421054 - DNA, 435 bp, Staphylococcus aureus; identical to SEQ ID NO: 405457

SEQ ID NO: 421055 - DNA, 267 bp, Staphylococcus aureus
atgattgatatgtatttatatgatgacaacgaagagagtcaagttcagtttgttggttttgttggcgaacatagtcgatatgatttgatgttagtccatacaaatagacattatggtaagacactcgtacttaatatgcaaacaaataaattcggtattatcggtactgatgatttaaaagaagaaggctatatcgctcatattttaggtgtaaatgctgaagaaggcgatgaaattactgagtatttaaatgaagtcattcattaa

SEQ ID NO: 421056 - DNA, 384 bp, Staphylococcus aureus; identical to SEQ ID NO: 405459

SEQ ID NO: 421057 - DNA, 918 bp, Staphylococcus aureus; identical to SEQ ID NO: 412732

SEQ ID NO: 421058 - DNA, 1320 bp, Staphylococcus aureus
ttgaggcttacaatttatcatacgaacgatattcatagtcatttacatgaatacgaacgcattaaagcatatatggcagaacaacggccacgacttaatcatccttctttatatgttgatctaggtgatcatgtagatttatccgcacctataactgaagcaactttaggtaaaaagaatgtggcattactaaatgaagcaaaatgtgatgttgcaacaatcggtaataatgaagggatgaccatttcacacgaagctttaaatcacctttacgacgaagcaaaatttatagtgacatgtagcaatgttatagatgaatcaggtcatttaccaaataatatcgtttcttcttatattaaggatatagacggtgtgaaaatactattcgttgcagcgacagcaccttttaccccattttatcgtgcactaaattggattgttaccgatccacttgaatctataaaagaagaaattgaacttcaacgaggtaaatttgatgtattaatcgtgctaagtcattgtggcattttcttcgatgaaacattatgccaagaattgcctgaaattgatgtcatttttggtagtcatacgcatcattattttgaacatggtgaaatcaataatggtgtactgatggcggcagctggaaagtatggtaattatcttggagaggttaatttaacttttgaggcacataaagtagtacataaaactgcaaagattattcctttagaaatattacctgaagttgaaacttcatttgaagaagaaggaaaaacgttaatgtccaattcagtaattcaacatccagtagtgcttaagcgtagtatgaatcacataactgaagctgcatacttattagctcaaagtgtttgtgagtatacacatgcacaatgtgccatcatcaatgctggcttactcgttaaagatattgtaaaagatgaagtgacagaatatgacattcatcaaatgttaccgcatccgattaatatggtaagggttagactttctggtgtgaaattaaaagagattatagctaaaagtaataaacaagaatatatgtatgaacatgcacaaggtttgggtttcagagggaatatatttggaggatatattctttataatttagggtacattcattctacagggcgttactatctgaatggagaagaaatcgaagacgacaaagaatatgtactaggtacgatagatatgtatacgttcggtcgttatttcccaacattgaaagaattaccaaaagagtatttaatgccagagtttttaagagatatatttaaagaaaaattattggaatattaa

SEQ ID NO: 421059 - DNA, 828 bp, Staphylococcus aureus
atgttattaacaattacattattagttttaatcggaggtttgtcagcgattatagggtcaatcgtaggcattggaggcggtattattatcgttccaacaatggtttacctcggtgttgaacatggattactacataatattacaacacaagtagcgatagggacgtcttcagtcattctaattgtgacaggactttcttcatcacttggatatttaaaaacaaaacaagttgatattaaaaatggttccatctttttatttggactattaccaggttcattgcttgggtccttcattagtagatatttaacatttgagtcatttaatttatattttggtatctttttaattttcgtagctattttattaatggtaagaaataagattaaaccgtttaaaattttcgataaacccaagtatgaaaagacttatgtagacgctaaaggtaaaacatatcattatagtgtgccaccattgtttgcttttattacaacgtttttaattggtatattgacaggtttatttggtattggaggtggcgcactaatgacgccactaatgcttattgtatttagatttccacctcatgtagctgttggaacaagtatgatgatgattttcttttcaagtgtcatgagttctatagggcacattgctcaaggtcacgtagcttggggttatgcaatcattttaattatttctagttattttggtgcgaaaatcggtgtcaaagtgaatcaatcaattaagtcagatacggtagtaacattattgagaacagtaatgttgttaatgggtatatatttaattattcgtgcgttgatttaa

SEQ ID NO: 421060 - DNA, 849 bp, Staphylococcus aureus; identical to SEQ ID NO: 416214

SEQ ID NO: 421061 - DNA, 1068 bp, Staphylococcus aureus
atgtggaataagaatcgacttactcaaatgttaagtattgaatatccaattatacaagcaggtatggcaggaagtacgacaccgaaattagttgcatcagtaagtaacagtggtggattaggcacaataggcgcaggttactttaatacgcagcaattagaagatgaaatagattatgtacgccaattaacgtcaaattcttttggtgtaaatgtctttgtaccaagtcaacaatcatataccagtagtcaaattgaaaatatgaatgcatggttaaaaccttatcgacgcgcattacatttagaagagccggttgtaaaaattaccgaagaacaacaatttaagtgtcatattgatacgataattaaaaagcaagtgcctgtatgttgttttacttttggaattccaagcgaacagattataagcaggttgaaagcagcgaatgtcaaacttataggtacagcaacaagtgttgatgaagctattgcgaatgaaaaagcgggtatggatgttatcgttgctcaaggtagtgaagcaggtggacatcgtggttcatttttaaaacctaaaaatcaattacctatggttggaacaatatctttagtgccacaaattgtagatgtcgtttcaattccggtcattgccgctggtggaattatggacggtagaggagttttggcaagtattgtcttaggtgcagaaggggtacaaatgggcactgcatttttaacatcacaagatagtaatgcatcagaactactgcgagacgcaattataaatagtaaagaaacagatacagtcattacaaatgcgtttagtggaaagcttgcacgcggtatcaacaataggtttatcgaagaaatgtcccaatacgaaggcgatatcccagattatccaatacaaaatgagctaacaagtagcataagaaaagccgcagcaaacatcggcgacaaagagttaacacatatgtggagtggacaaagcccgcgactagcaacaacgcatcccgccaacaccatcatgtccaatataatcaatcaaattaatcaaatcatgcaatataaataa

SEQ ID NO: 421062 - DNA, 1041 bp, Staphylococcus aureus; identical to SEQ ID NO: 409088

SEQ ID NO: 421063 - DNA, 315 bp, Staphylococcus aureus
atgtattttgttttagcaatatttacaatcattagtgccagtgtaagtttaggttattcaattcaagcatgtgcatctagccataatataaatgcatattatgcacttagtcgaagcttacctttatttttattagctattttttctttagtcattcatagtgctatatttttgataactatatccattgcaatgatcttagttcaatttttagatgcgattgttggttataaaagtgaagatgtctttaaaacttatggtccattagcaacatctgtagtgaacttaatattattaatagttttcttattttaa

SEQ ID NO: 421064 - DNA, 843 bp, Staphylococcus aureus; identical to SEQ ID NO: 410472

SEQ ID NO: 421065 - DNA, 1413 bp, Staphylococcus aureus
atgccgtcggttagaacatacagtcaagctattagctaccttaaaagcctagagggtaaggcgtggaatccagacaatgcatttggatgtcaatgcttcgatactgccaaccaatattggctttacttatttaatcataggttgaaaggtgtgggcgctgcggacattcctacatggaatgatttcactaacgaagcaaccgtttacgaaaatactgtgtcgtttcaagcattgcctggcgacgtcgttatttttaaccgtaactatggcggtggttatggtcacgtaggtatcgtaataagcgctacgttagattctataactattttagagcagaactggctaggcggtgcttactggagtccaccagaagttactacaagacgcacacacggctacgacttccctatgtggttcattcgtccattctacgcaaaagaaacgaccgctaataaaataagaagcgcagtaacgccagttaaacaagataagttatcaaaaggtaaaaaaatcatgcttgtagctggtcatggtattggcgcatactctaacgacccaggtgccgttgcgaacggagaaaacgaaagagatttcaaccgtaaaaatattatccctagagtgaaaaagcatcttgagtcagtaggtaacacagtattgttatacggtggcaactcaatgaatcaagatttatatcaagatacgttatacggtcaacgtgttggaaactataaagattatggcatgtactggattaaaaacgaagtcaaaccggatgcaatcatagagtttcatttagattctgctagtccacaagcaagtggcgggcatgtaatcattagcgaccgtttcccagctgatgacattgacaaggcattaagtagcgcattagataaaacagtaggaaaaataagaggtgtgacacctagaggggatttattgaacgctaacgtgtccgctgaacttaatcttaattatcgtttaatcgaattaggttttatcacatcaatgaaagatttaaactacattaaaaataatttagacagcttcacgaagcggattgctgaagccattaacggcagacaaattgatgcgccaagtagtaagccaagcgctgacaaaatcacatggaattggaaaggcgtattttatcctaatccagaaaaagctataagagtcagaaaaacacccggattaaccggcacagtcgttgaagaagattcatggctatacacaaaagatgattgggtaaaattcgatcaagtaattaaaaaagatggctactggtggattagattcaaatatcaacgtgagggctctagtactaacgattttttttgtgcagtatgtagaatcactgacaaggaacaaaagattaaaaatgaaaaatattggggaactattgagtggaattaa

SEQ ID NO: 421066 - DNA, 276 bp, Staphylococcus aureus; identical to SEQ ID NO: 407193

SEQ ID NO: 421067 - DNA, 396 bp, Staphylococcus aureus
atggaaggtaattttaaaaatgtaaagaagtttatttacgaaggtgaagaatatacaaaagtatatgctggaaatatccaagtatggaaaaagccttcatcttttgtaattaaacccttacctaaaaataaatatccggatagcatagaagattcaacagcaaaatggacaataaacggagttgaacctaataaaagttatcaggtgacaatagaaaatgtacgtagcggtataatgagggtttcgcaaactaatttaggttcaagtgatttaggaatatcaggagtcaatagcggagttgcaagtaaaaatatcaactttagtaatccttcagggatgttgtatgtcactataagtgatgtttattcaggatctccgacattgaccattgaataa

SEQ ID NO: 421068 - DNA, 1239 bp, Staphylococcus aureus
atgtacaaaataaaagatgttgaaacgagaataaaaaatgatggtgttgacttaggtgacattggctgtcgattttacactgaagatgaaaatacagcatctataagaataggtatcaatgacaaacaaggtcgtatcgatctaaaagcgcatggcttaacacctagattgcatttgtttatggaagatggctctatattcaaaaatgagccccttattatcgacgatgttgtaaaagggttccttacctacaagatacctaaaaaggttatcaaacacgctggttatgtacgttgtaagctgtttttagagaaagaagaacaaaaaatacatgtcgcgaacttttctttcaatatcattgatagtggtattgaatctgctgtagcaaaagaaatcgatgttaaattggtagatgatgctattacgagaatcttaaaagataacgcgacagatttattgagcaaagactttaaagagaaaatagataaagatgtcatttcttacatcgaaaagaatgaaagtagatttaaaggtgcgaaaggtgataaaggcgaaccgggacaacctggtgcaaaaggtgaagcaggtaaaaaaggagaacaaggcgtacccggtaaaaacggtactgtagtatcaatcaatcctgacactaaaatgtggcaaattgatggtaaagatacagatatcaaagcagaacctgagttattggacaaaatcaatatcgcaaatgttgaagggttagaagataaattgcaagaagttgaaaaaatcaaagatacaactctcaacgactctaaaacgtatacggatacaaaaattgctgaactagttgatagcgcgcctgaatctatgaacacattaagagaattagcagaagcaatacaaaacaactctatttcagaaagtgtattgcaacagattggctcaaaagttagcacagaagattttgagagattcaagcaatcattaaacagtttgtatgcagataaaaatcatagtcatacaatcaaacagattgaaggattagaaaatgctttatcaaaaaaatcagacataaatcacagtcatgatgaacgttatcttttatcatcaaatgcttttacaaaagaggaagcagataaactttatcaacctatcggttcttcgcagccgtcactgaatatttggacaggcagtgaaacagaatataattatttgtatcaaaaagaccctaatacactttacttaattaaggggtga

SEQ ID NO: 421069 - DNA, 1875 bp, Staphylococcus aureus
atgggattacctaatccaaaaaatagaaaacctacagcaagtgaggtagctgaatgggcaaagtctaatataggcaaaaggattaatattgacggttatagaggtagtcaatgttgggatacgccaaactttatttttaaaagatattggggttttgtaacatggggcaatgctaaggatatggctaattacagatatcctaagggtttccgattctatcgttattcatttggatttgtaccggaacccggagacatagcagtttggcaccctggcaacggaataggttcggacggacacaccgcaatagtagtaggaccatctaataaaagttatttttatagcgttgaccaaaactgggttaattctaatagttggacaggttctccaggaagattagtaagacacccttatgtaagtgttacaggctttgttaggcctccatactcaaaagatactagcaaacctagtagtactgatacaagttcagcatcaaaagccaatgactcaacaattactggtgaagcgaagaaaccgcaatttaaagaagttaaaacagtaaaatacactgcttacagcaatgttttagataaagaagagcacttcattgatcatatagttgtaatgggagatgaacgctcagacattcaaggtttatacatcaaagaatcaacacacatgcgttctgttgatgaattatatacacaaaggaataaatttattagtgattacgagataccacatttatatgtcgatagagaagcgacgtggcaagcgagaccaactagttttgacgacccgcgttatcctaactggttagttatcgaagtatgtggcggtcaaacagatagcaaacgacaattcttattgaatcaaatacaagcgttaatacgtggtgtttggttattgtcagggattgataaaaacttatctgaaacgacgttaaaggtagaccctaatatttggcgtagtatgaaagatttaattaattacgacttgattaagcaaggtataccggatgacgcaaagtatgagcaagttaaaaagaaaatgcttgagacgtatattaaacgagatatattgacacgagaaaatattaaagaagtaacgacaaaaacgacaatacgaattagtgataaaacatcggtcgacagtgcatccagaagaggacccactgcatcagacgaaaaaccaagcatcgttactgaaaaaagtccgttcacgttccagcaagcactggatagacaaatgtctaggggtaacccgaaaaaatctcatacatggggctgggctaatgcaacacgagcacaaacgagctcagcaatgaatgttaagcgaatatgggaaagtaacacacaatgctatcaaatgcttaatttaggcaagtatcaaggcgtttcagttagtgcgcttaataagatactcaaagggaaaggaacgctagacggacaaggcaaagcatttgcagaagcctgtaagaaaaacaacattaacgaaatctatttgatcgcgcacgctttcttagaaagtggatacggaacaagtaacttcgctagtggtagatacggtgcatataattacttcggtattggtgcattcgacaacgaccctgattatgcaatgacgtttgctaaaaataaaggttggacatctccagcaaaagcaatcatgggcggtgctagcttcgtaagaaaggattacatcaataaaggtcaaaacacattgtaccgaattagatggaatcctaagaatccagctacccaccaatacgctactgctatagagtggtgccaacatcaagctagtacaatcgctaagctatataaacaaatcggcttaaaaggtatctactttataagagataaatataaataa

SEQ ID NO: 421070 - DNA, 396 bp, Staphylococcus aureus
atgcaagaagaaagtaatttcgtttctaagcacgaatttaccaaagctaacggcaagatctatgagcgtattaacgaaatagatagaaagcatacagagtcgttaggcgaattgaaagttaaagtagaaacgcaaacagcagtgcaaaaacaatcatacgaagctcaaaaagaaacgaacgcaaatataaaagatttaactaaggttatgactgatgttagttctgaaatgaaagacattaaatacaaagtgcaaggtcatgacgaaaagataaaagcaatacaaggtacaattgattcgaaaataaaaggtagctctcaaataataacgacgcttataactacaactggcggtgtaatagtcgctgcgattggagtagctaaatttttcttttaa

SEQ ID NO: 421071 - DNA, 435 bp, Staphylococcus aureus
atgaaaaataatataaaagatttaacgatttctgaaattgtcggtgctatcatgttattttctttcggtttcagaattctattccgtggcgtgttttgggttaaagaacaaggtgatgtgctagatgattctgatttttatttagctttgcatcatgttatgcctatttggatatggggcatattggttggcgttgcaggattgattataattgtttcatctgtatttttagcttcaagtgacgaaaacaatcgatgtagttggttgttgttggtgggttgtgctttaacaggcgtattgtactttttgatgacaagtgcaagcgtttatcatgctattaactggctttctactgtgcattttgccgtaatgtcaacgactggttttatcgttgcatttattggaggtgctgacatctatgcaagaagaaagtaa

SEQ ID NO: 421072 - DNA, 177 bp, Staphylococcus aureus
atgattaaggtgatctatccgacttttaaagacattaaaactttttatgtatggggttactataaaaatgagcaaattaagtggtacgtagacaagggtttaatcgataaagaagaatacgctttaatcactggagaaaaatatccagaggcaaaaataagtgagtcacaagtgtaa

SEQ ID NO: 421073 - DNA, 378 bp, Staphylococcus aureus
atgaaaatcacagtaaacgataaaaacgaggttatcggatatgttaatactggcggattacgcaatagtttagatgtagacgataacaatgtacctatcaaattcaaagaagagtttgaacctagaaagttcattttcactaacggcgaaattaaatacaatagcaatttcgaaaaagaagacgtaccgaatgcatcaagccaacaaagtgcatcagatttaagtgatgaggaacttcgcggaatggttgcgagtatgcaaatgcaggtggcacaagtaaacgtattaacaatggaattagctcaacaaaacgctatgttaacacaacagttgactgaactgaaaattaaccaaacaagtactgagggggacgtttaa

SEQ ID NO: 421074 - DNA, 1824 bp, Staphylococcus aureus
atggtagtagataatttttcaaaagatgataacttaatcgagttacaaacaacatcacaatataatccagttattgacacaaacatcagtttctatgaatcagatagaggaactggtgttttaaattttgcagtaactaagaataacagaccgttatctataagttctgaacatgttaaaacatctatcgtgttaaaaaccgatgattataacgtagatagaggcgcttatatttcagacgaattaacgatagtagacgcaattaacgggcgtttgcagtatgcgataccgaatgaatttttaaaacattcaggcaaggtgcatgctcaggcattctttacacaaaacgggagtaataatgttgttgttgaacgtcaatttagcttcaatattgaaaatgatttagttagtgggtttgatggtataacaaagcttgtttatatcaaatctattcaagatactatcgaagctgtcggtaaagactttaaccaattaaagcaaaatatggctgatacacaaacgttaatagcaaaagtgaatgatagtgcgacaaaaggcattcaacaaatcgaaatcaagcaaaacgaagctatacaagctattactgcgacgcaaactagtgcaacacaagctgttacagctgaagtcgataaaatagttgaaaaagagcaagcgatttttgaacgtgttaacgaagttgaacaacaaatcaatggcgctgaccttgttaaaggtaattcaacaacaaattggcaaaagtctaaacttacagatgattacggtaaagcaattgaatcgtatgagcagtccatagatagcgttttaagcgcagttaacacatctaggattattcatatcactagcgcgacagatgcgccagaaaagacggatataggcacgttagagaagcctggacaagatggtgttgatgacggttcttcgttcgatgaatcaacttatacatcaagcaaatctggtgtgttagttgtttatgttgttgataataatactgctcgtgcaacatggtacccagacgattcaaacgatgagtacacaaaatacaaaatctacggcacatggtacccgttttataaaaagaatgatggaaacttaactaagcaatttgttgaagaaacgtctaacaacgctttaaatcaagctaagcagtatgtagatgataaattcggaacaacgagctggcaacaacataagatgacagaggcgaatggtcaatcaattcaagttaacttaaataatgcgcaaggcgatttgggatatttaactgctggtaattactatgcaacaagagtgccggatttaccaggtagcgttgaaagttatgagggttatttatcggtattcgttaaagatgatacaaacaagctatttaacttcacaccttataactctaaaaagatttacacacgatcaatcacaaacggcagacttgagcaacagtggacagttcctaatgaacataaatcaacggtattgttcgacggtggcgcaaatggtgtaggtacaacaatcaatctaactgaaccgtacacaaactattctattttgttggtaagtggaacttatccaggtggcgttattgagggattcggactaaccgcattacctaacgcgattcaattgagtaaagcgaatgtagttgactcagacggcaacggtggcggtatttacgagtgcttactatccaaaacaagtagcactactttaagaatagataacgatgtgtactttgatttaggcaaaacatcaggttctggcgctaacgcaaacaaggttactataactaaaattatggggtggaagtaa

SEQ ID NO: 421075 - DNA, 1899 bp, Staphylococcus aureus
atggcttacggattaattacaagtttacattcaatgacaggtcggaaaatagttgctcaacatgagtataactatcgcttgttagatgaaggtatgagcaaacttgagaaaatgtttatataccatcaaaaagaagaaatatacgcacactcagcgaaacaaattaaatacttgaatgacagtgttgaagattatttaacgtatttaaatggccgttttagcaatatgattctaggccataacggcgacggtatcaatgaagtaaaagacgcgcgtattgataatacaggttatggtcataagacattgcaagatcgtttgtatcatgattattcaacactagatgctttcactaaaaaggttgagaaagctgtagatgaacactataaagaatatcgagcgacagaataccgattcgaaccaaaagagcaagaaccggaatttatcactgatttatcgccatatacaaatgcagtaatgcaatcattttgggtagaccctagaacaaaaattatttatatgacacaagcgcgtccaggcaatcattacatgttatctagattgaagcctaacggacaatttattgatagattgcttgttaaaaatggcggtcacggtacacacaatgcgtatagatacattgatggagaattatggatttattcagctgtattggacagtaacaaaaacaacaagtttgtacgctttaaatatagaagtggagaaatgacgtatggcaacgaaatgcaagacgtcatgccaaacgtatttaacgatagatatacgtcggcaatttataatcctatagaaaacttaatgatttttagacgtgaatataaagcttctgaaagacaagctaagaattcgttgaactttgttgaggttagaagtgctgacgatattgataaaggtatagacaaagtattgtatcaaatggatatacctatggaatacacttcagatacacaacctatgcaaggtatcacttatgatgcaggtatcttatattggtatacaggtgattcgaatacagccaaccctaactacttacaaggtttcgatataaaaacaaaagaattgttatttaaacgacgtatcgatattggtggtgtgaataataactttaaaggagacttccaagaagctgagggtctagatatgtattacgatctagaaacaggacgcaaagcgcttttaataggggtaactattggacctggtaacaacagacatcactcaatttattccatcggccaaagaggtgttaaccaattcttaaaaaacattgcacctcaagtatcgatgactgattcaggcggacgtgttaaaccgttaccaatacaaaacccagcatatctaagtgatattacggaagttggtcattactatatctatacgcaagacacacaaaatgcgttagatttcccgttaccgaaagcgtttagagatgcaggttggttctttgatgtactgcctggtcattataatggtgcgttaagacaagtactaactagaaacagcacaggtagaaatatgcttaaattcgaacgtgtcattgacattttcaataagaaaaacaacggagcatggaatttctgtccgcaaaacgccggttattgggaacatatccctaagagtattacaaaattatcagatttaaaaatcgttggtttagatttctatatcactactgaagaatcaaaccgatttactgattttcctaaagactttaaaggtattgcaggttggatattagaagtaaaatcgaatacaccaggtaacacaacacaagtattaagacgtaataacttcccgtctgcacatcaatttttagttagaaactttggtactggtggcgttggtaaatggagtttattcgaaggaaaggtggttgaataa

SEQ ID NO: 421076 - DNA, 1887 bp, Staphylococcus aureus
atgccaattttattaaaaagtctacagggtgtagggcacgctattaatgttagtacaaaaataagtaaaaagctaaatgaagatagttctttggatctaactattatcgagaacgcgagtacgtttgacgcaataggtgctataactaaaatgtggacgatcactcatgttgaaggtgaagatgatttcaacgaatatgtaattgtcatacttgataagtctactattggcgaaaaaataaggcttgatatcaaagctaggcaaaaagaacttgatgaccttaacaattctaggatttaccaagagtataacgaaagttttacaggcgttgagttcttcaatactgtctttaaaggaacgggttataagtatgtattacatccaaaagtagatgcatctaaattcgagggattaggcaaaggagatacacgattagaaatctttaaaaaaggacttgagcgttatcatctcgaatatgaatacgatgcaaagactaaaacgtttcatttgtatgatgaattatctaagtttgccaattattacattaaagctggtgtgaatgctgataacgtcaaaatacaagaagatgcatctaaatgttatacctttattaaaggttatggtgattttgatggacaacagacttttgcagaagcgggactacaaattgaattcactcatccattagcacaattgataggtaaaagagaagcgccaccgcttgttgatggacgtattaaaaaagaagatagtttaaaaaaagcaatggagttattgataaagaaaagtgtcactgcttctatttccttagactttgtagcgttacgtgaacatttcccagaagctaaccctaaaataggtgatgttgttagagtggtggattctgccataggatataacgacttagtgagaatagtcgaaatcactacacatagagatgcgtacaataatatcactaagcaagatgtagtattaggagactttacaaggcgtaatcgttataacaaagcagttcatgatgctgcaaattatgttaaaagcgtaaaatctacaaaatccgacccatctaaagaactaaaagcattaaacgcaaaagttaacgcaagtttatctataaataatgaattggttaagcagaatgaaaaaataaacgctaaagtcgataagatgaatactaaaacagttacaactgctaatggtacgatcatgtacgactttactagtcaatcaagtataagaaacatcaaatcaattggaacgattggcgactctgtagctagagggtcgcacgcaaaaactaatttcacagaaatgttaggcaagaaattgaaagctaaaacgactaatcttgcaagaggtggcgcaacaatggcaacagttccaataggtaaagaagcggtagaaaacagcatttatagacaagcagagcaaataagaggagacctaatcatattacaaggcactgatgatgactggttacacggttattgggcaggcgtaccgataggcactgataaaacggatacaaaaacgttttacggtgccttttgttctgcaattgaagttattagaaagaataatccagattcaaaaatactagtgatgacagctacaagacaatgccctatgagtggtacaacaatacgccgtaaagacacggacaaaaacaaactagggttaacacttgaggactatgtaagcgctcaaatattagcttgtagtgagttagatgtaccagtgtttgacgcatatcacacagattactttaagccatacaatccagcttttaggaaagcgagcatggaggacggcttacaccctaacgaaaaaggtcacgaggttattatgtacgagttaatcaaggattattacagtttttacgactaa

SEQ ID NO: 421077 - DNA, 942 bp, Staphylococcus aureus
ttgatagcgcacgatatagaagtgataaggaatggttcgcagtatcgcgtcagtgacaatcctttcacttataatcacttggaagtagttgaatataacgttacaggcgcaggatatcatcgtaactattctgatatagagggtattgatggtagatttcataattacgctaaagaagaacttaaaaaagtagagcttaagctaaggtataaagtacctaaaattgcttatgcttcacatttaaagtcagacgtccaagcattatttgctggacgtttttatttaagggaattagctacaccagacaattcaattaagtatgagcatatattagatataccaaaagacaaacaagcatttgagcttgattatgttgatggacgacaactttttgtaggattagtaagtgaagtttcttttgacacaactcaaacatcaggggaattttctttgtcgtttgaaacaaccgaactaccatactttgaaagtgtcggttatagtactgatcttgaaagtgataacgaccctgaaaaatggtcggtacctgatagattgcctacaaacgaaggtgataagaggcgtcaaatgacattttacaacactaactcaggagaagtttattataacggtgatgttcctttaacacagtttaatcagtttaatgttgttgaaatagagttagctgaagatgttaaagctaatgataaggatggattcactttctatacagataaaggaaatatctcagttattaaggaagttgatttaaaagccggagataaaataatcttcgacggtaaacatacctatagaggttatttaaatatagattcttttaataaaactttagaacaaccggttttatatccaggctggaatcgattcaagtctaataaagtaatgaaacaaattacatttagacacaaattatattttagataa

SEQ ID NO: 421078 - DNA, 2886 bp, Staphylococcus aureus
ttggatactcattttatggcaaagattatggccaatattagagatttccaaagcaacgtaaggaaagctcaacgattagcaaagacgtctgtaccaaacgaaattgaaacagatgtaaaagcagatatttcaagattccaaagagctttacaacgcgctaaagctatggcgcaaaaatggcgtgaacataacgttaaaatagatggtaataattcaccgttaaaacgtgcaattgctagtgcaaaaacgatgttggccacgttacacaacaaaacaataaaagttaatttcgatacgagaggtatgacaaaaacccaaattttaactaaggcactgaatcagtccttaactgattatagtgagaaaatggacgcgctagctactaaaattcgtacatttggtacaatttttgcacaacaagttaaaggcttaatgattgctagtatacaagcattgataccagtgattgccggattagtacctgcaataatggcagtacttaatgcggttggtgtattaggtggtggcgttttaggtttagttggcgcattctctgtcgcaggtcttggagttgttggctttggtgcaatggctattagcgctcttaaaatggttgaagatggaacattggcattaacaaaagaagttcaaaactttagagatgcgagcgatcagttaaaaactacatggcgtgatattgttaaagagaatcaagcaagtatctttaatgcgatgtcagcaggtatcagaggtgttacaagtgcgatgtctcaattaaaaccattcttatctgaagtatctatgctggttgaagcaaacgcacgcaagtttgaggattgggttaaacattctgaaacaactaagaaagcatttgaagcattgaatagcataggtggcgcaatcttcggagatttattgaacgctgcaggaagatttggcgacggattaattaacattttcactcaattaatgccgttgttcaaatttgtgtctcaaggactacagaacatgtccatagctttccaaaattgggctaatagtgtggctggtcagaatgctattaaagcgtttattgactacactaccactaacttacctaagattggtcagatatttggcaatgtgttcgctggtattggtaatttaatgattgcttttgctcaaaacagttctaacatttttgactggttagttaaattaacttctcaatttagagcatggtcagaacaagtaggacaatcacaaggatttaaagactttatcagttacgttcaagagaatggtcctactattatgcagttaatcggtaatatcgtaaaagcattagttgcttttggtactgcaatggctcctatagctagtaaattgttagactttatcactaatctagctggatttatcgccaaactattcgaagcacacccagcagtcgctcaaattatcggtgttatcggtattttaggtggcgtattttgggctttaatggctccgattgttgctataagtagtgtacttacaaatgtgtttggtttgagcttattcagcgtcactgaaaagattttagacttcgttagaacatcaagtttagttactggagctacggaagcattaataggtgcattcggttcgatttcagcacctattttagcagttgttgcagtaattggtgcattcattggtgtcctcgtttatttatggaaaacaaacgagaactttagaaatactattactgaagcgtggaacggtgttaaaacggcagtttctggtgcgattcaaggtgtagtcggctggttaactgaattgtggggcaaaatccaatctaccttacaaccgataatgcctatattgcaagtattaggacaaatattcatgcaagttttaggtgttttggtaataggcatcattacaaacgttatgaatatcatacaaggtttgtggactttaattacaattgcgttccaagccataggaacagtgatatccgtagctgtccaaatcatagtaggtttattcactgctttaattcagttgcttactggcgacttctcaggtgcttgggagactattaaaactacggttaccaatgtacttgatacgatttggcaatacatgcaatcagtttgggagtcaattatcggctttttaactggcgtaatgaatcgaacgctttcaatgtttggtacaagttggtcacagatatggagtacaatcactaattttgttagcagtatttggaacactgttacaagttggttcagtcgtgttgcttggagtgtggctgaaaaaatgggacaagcattaaactttattatcacaaaaggttctgaatgggtttctaacatttggaatacagttacaagtttcgcgagtaaagtagctgatgggtttaaaagagttgtctcaaatgtaggtgacggtatgagtgatgcacttggtaagattaaaagtttcttcagtgatttcttaaatgccggagtggaattaatcggcaaagtagctgagggtgtagccaatgctgcgcacaaagtagtcagcgcggtaggcgatgcgatttcatcagcttgggactctgtaacttcattcgtaagtggacacggtggaggtagtagcttaggtaaaggtttagcggtatcacaagcaaaagtaattgctacagactttggcagtgcctttaataaagagctatcctctactttgacagatagtatagtagatcctgtaagtacttctatagacagacacatgactagcgatgttcaacatagcttaaaagaaaataatagacctattgtgaatgtaacgattagaaatgagggcgaccttgatttaattaaatcacgcattgatgacatgaacgctatagacggaagtttcaacttattataa

SEQ ID NO: 421079 - DNA, 285 bp, Staphylococcus aureus; identical to SEQ ID NO: 408833

SEQ ID NO: 421080 - DNA, 507 bp, Staphylococcus aureus; identical to SEQ ID NO: 408834

SEQ ID NO: 421081 - DNA, 558 bp, Staphylococcus aureus; identical to SEQ ID NO: 408835

SEQ ID NO: 421082 - DNA, 426 bp, Staphylococcus aureus
atgtgggtatcagttgagcctgaacttacaaatcaaatatataaaagattaatctcagaccctaacattaacaaactagttgatgatagggtctttgacgttgttcaagatgacgctgtttacccatatattgttgtgggtgaatcaaacgtcactaacaacgaatctagcgcaacaatgagagaaacagtcggtattgtcatacatgtgtattcacagttcgctacacaatacgaggctaagctcattttaagcgcgataggttatgtgcttaacagacctatagaaatagataattacgagtttcaatttagccgtatcgatagtcaagcagtattccctgatatagacaggtttactaagcatggcacgatacggcttttatttaagtacagacataaaaagaaaaacgaaggagtgtattaa

SEQ ID NO: 421083 - DNA, 414 bp, Staphylococcus aureus
atggcaaaagttaagtacggtgctgatagcatggttgttgaattggataagttcgataagaaaatagaagagtgggttaaaaaaggtattgctaaaacaacgacgaagatttacaacactgctgtagcattagctcctgttgacttaggttttttagaagaaagtattgactttaaatatttcgatggtgggttatccagtgttataagtgtcggcgcagattatgcaatatacgttgaatacggtactggtatatatgctactggtcctggtggtagtcgtgctacaaagattccgtggagttttaaaggtgatgacggcgaatggtacacaacatatggtcaagcgccacagccattttggaaccctgcaattgacgcaggacgcaagacattcgagcagtatttttcatag

SEQ ID NO: 421084 - DNA, 336 bp, Staphylococcus aureus
gtgtttaacccatacgacgaattccctcacactatttctattggaagtatcaaaaaagtaggagagtatccaattatacaagagcgctttgtaagcgataaaacaattaaaggatttatggatacgcctactacatctgaacaactaaaatttcatcaaatgtcacaagaatatgacagaaacctatatgtaccttacgacttaccaatagctaaaaacaatttatttgagtatgagggtagaatctttagtattgtaggcgattctgtagatcagggcggacaacatgaaattaaactactacgacttaagcaggtgccatatggcaaaagttaa

SEQ ID NO: 421085 - DNA, 351 bp, Staphylococcus aureus
atgactctttatgaagatgttaaacttttactcaagaaaaatggagtggaagttaaaagtgatgaagaagaaatatttaagatggaagttgacggaatactagaagatgttagggatataacaaacaatgattttatgaaagatggtcaagtcatttatccttactcaatcaaaaagtatgtcgcagacgtcctagagtattatcaacgacctgaagttaaaaagaatttaaagtcaagaagtatggggacagtgtcgtacacttataacgatggtgtccctgattacattagtggagtattaaacaggtataaacgagcaaagtttcatccgtttaaatcaataaggtag

SEQ ID NO: 421086 - DNA, 144 bp, Staphylococcus aureus
atggctaatcctgcagaagagattaaggtaaaaaaagacaatatgactattactgttacaaagaaggcgtttgactcttattacagtcttgtcggttacaaagaggttaaatcacgccgtactacgtctgataagagcgagtga

SEQ ID NO: 421087 - DNA, 915 bp, Staphylococcus aureus
atggcaactccaacatacacgccaggcaatgttattttatcggattttaaaaacggcgttattccagcagaacaaggtactttaatcatgaaagacattatggctaattcagcaattatgaaattagctaaaaatgagccaatgacagcacaaaagaaaaaatttacttacttagcaaaaggtgtaggcgcctactgggtatcagaaacggaacgtattcaaacttctaagcctgaatatgcacaagcagaaatggaagctaagaaaattggtgtaattattccgttatcaaaagagtttcttaaatggactgcaaaagatttctttaatgaggttaaacctctaattgcagaggcattttacaaagcgtttgaccaagctgttatctttggtactaaatcaccttacaacacttcaactagtggtaaaccgcttgttgaaggcgcagaagagaaaggtaacgttgttacagatactaataatttatacgtagacctttcggcattaatggctactattgaagatgaagagttagatccaaacggagtattaactacacgttcattcagaagtaaaatgcgtaatgctttagatgctaatgacagaccattatttgatgctaacgggaacgagattatgggattaccactatcttatactggagcggatgtatacgacaaaaagaaatcgttagcactaatgggtgattgggattacgcacgttacggtatcttacaaggtattgagtatgcaatttctgaagatgccacgttaacgacgttacaagcatcagatgcttctggccaaccagtatcattatttgaacgtgatatgttcgctttacgtgcgacgatgcatattgcatacatgaacgttaaaccagaagcgttcgcaacgcttaaaccaactgaatag

SEQ ID NO: 421088 - DNA, 585 bp, Staphylococcus aureus
atgaatatcgaagaagttaagtctttttttgaagaacacaaagacgataaagaagtaaaagattatctaaacggacttaagacggtgtctgttgatgacgttaaaggctttttagatacagaagaaggtaaacgattcattcaacctgaattagatcgttatcattcgaaaggattagaatcatggaaagagaaaaatcttgaggatctaatcgaacaagaagtacggaagcgtaatcctgagcaatcagaagaacaaaaacgtattagtgctcttgaacaagagttagaaaaacgcgacgcagaggcaaaacgtgagaagttaagaagtaacgcgctaggtaaagcgcaggaactaaatttaccaacatccttagttgatagatttttaggcgattctgatgaagatactgagcaaaacttaaaagctttaaaagaaacctttgacaagtatgttcaaaaaggtgttgagtctaaatttaaatcgagtggaagagatgttaaagaatcacgaaatcaagatttagacccttcaaatgtaaagtccattgaagaaatggcgaaagaaatcaatattagaaaataa

SEQ ID NO: 421089 - DNA, 207 bp, Staphylococcus aureus
atggattttaaaataaaagtaaatgttgatactggcgaagctatagaaaagttagaacacattaaatccttgtacgaagagataatagagttacaaaacgaaaaagttgttgtaaacgtaacagttaaaaatgaagctgatttagatatggttaaaacatctattagcgaagaaaatgctaaaaataatgatttcacacttttttag

SEQ ID NO: 421090 - DNA, 954 bp, Staphylococcus aureus
atgacaaatcccaaaataaccaatcagaatgatattaatgagtatatcgagggtttaatctctaaagcagaaaaaccaatagaacaactatttgctaatcgacttaaagagataaaacaaatcatcgcagatatgtttgagaaatatcaaaatgatgatgtgtatgttacatggactgaattcaataaatacaacaggctcaataaggagttaactcgtataggtacaatgttgactgatgactataggcaagtagctaagatgattcagaagtcacaagaagatgcttatatagaaaaattccttatgagcctttatttatatgaaatggcgagtcaaacatctatgcagtttgatgttccgagtaaagaggtaatcaaatcagctattgaacaacctattgagttcattcgtttaatgccaacactacaaaaacatcgtgatgaagtattgaaaaagatacgtatgcacattacacaaggtattatgagtggagagggttactctaagatagctaaagcaatacgtgatgatgtcggcatgtctaaagctcaatcattgcgtgtggctcgtacagaagcaggcagagcaatgtcacaagctggacttgatagcgcaatggttgctaaagataacggtttgaagatgaagaaacgttggcatgctactaaagatacacgaacacgtgatactcatcgtcatttagatggggaatcagtggaaatagaccaaaactttcaatcaagtggatgtgttggacaggcacccaagctatttatcggtgtaaacagtgcgaaagagaatattaattgtcgttgtaaattactctattacattgatgaagatgaattaccaactgtgatgagagtgcgtaatgatgatggtgaaaacgaagttataccattcatgacttatcgtgagtgggagaaatataagcgaaaaggtggtaattga

SEQ ID NO: 421091 - DNA, 1425 bp, Staphylococcus aureus
atgacattgtataagttaatagatgatattgaagcacaaggaatattgcctaagcatattgaggctctaatagagtcacataaagacgatagagagagaatggttaatctctataatagatacaagacacatattgactatgtaccaatattcaaacgtcgaccaattgaagaaaaagaagattttgaaactggtggaaatgtaaggcgattagacgtgtctgttaataacaaacttaacaactcttttgacagcgaaattgttgatacacgtgttggttatttacatggtgttcctgttacttatgatttagatgaaaacgcagaaaaaaacgaaaagttgaaaaagtttataaccaactttgccattagaaatagtgttgatgatgaggattctgaaataggtaaaatggcagcaatttgcggatatggtgctaggttagcatatattgatacgaatggtgatattaggattaagaatatagatccctataatgttatttttgttggcgacaatattttagaacctacatactcattgcgctacttttatgaaaaagatgatgataatggcactgattatgtgtacgcagagttttacgataatacttattattatgtatttcgaggagaaggtattgacgctttgcaagaagttggacgatatgaacatttatttgattacaatccattgtttggtgtacctaacaacaaagagatgataggagatgctgaaaaggttattcacttaattgacgcatatgatttaacaatgagcgatgcatcaagtgagattagtcagacacgtttagcataccttgtgttacgcggtatgggtatgagtgaagaaatgattcaagaaacacaaaagagtggcgcatttgagttgttcgacaaagatatggacgttaaatacttaacaaaagatgtaaatgacacaatgattgagaaccatttagatcgaatcgaaaagaatatcatgcgttttgcaaagtcagtaaactttaattctgacgagtttaacggaaatgtacctatcattggaatgaaacttaaacttatggctttagagaacaagtgtatgacgtttgagcgtaagatgacagctatgttgaggtatcaattcaaagttattttatctgcattaaagcgtaaagggtacaacttggatgatgatagttatttaaacctgatatttaagttcactcgtaacattccagttaataagttagaagaatcacaagtgctaattaacctgaagggacaagtttcagaacgaacaaggttaggacaatcacaactagttgatgatgttgattacgaattagacgaaatggaaaaagaaagtcttgaatttaatgacaaattacctgacatagatgaaggtgacgcaaatgacaaatcccaaaataaccaatcagaatga

SEQ ID NO: 421092 - DNA, 1224 bp, Staphylococcus aureus
atgaataaacttaaatctttatatacggacaaacaaattgaaatattgaagcaaacgcaaaaacaagattggtttatgttaattaatcacggagcaaagcgtacaggtaaaacaatattaaacaatgacttatttttacgtgagttaatgcgtgtgcgaaagatagcagacgaagaaggaattgagacacctcaatatatacttgctggtgcaacattaggtacgattcaaaaaaacgtactaatagagttaactaacaaatatggcattgagtttaattttgataaatataattcattcatgttatttggcgttcaagtggttcagacaggtcacagtaaagtaagtggtataggagctatacgtggtatgacatcgtttggtgcatatatcaatgaagcgtcgttagcgcatgaagaggtgtttgacgagattaagtcacgttgtagtggaactggtgcaagaatattggtagataccaaccctgaccatcccgagcattggttgttgaaagattatattgaaaatacagatcctaaagcaggtatactgagtcaccaatttaagctcgatgacaataactttcttaatgatagatataaagagtctattaaggcttcaacaccatcaggtatgttctatgaacgtaacatcaacggtatgtgggtgtctggtgacggtgtagtatatgccgactttgatttgaatgagaatacgattaaagcagatgaactggacgacatacctatcaaagaatactttgctggtgtcgactggggttacgagcactatggatctattgtgttaataggacgaggtatagatggtaacttttattttattgaggagcatgcacaccaatttaagtttattgatgattgggtggttattgcaaaagatattgtaagtagatatggcaatattaatttttactgcgatactgcacgacctgaatacatcactgaatttagaagacatagattacgtgcaattaacgctgataaaagtaaactatcgggtgtagaggaagttgctaagttgttcaaacaaaacaagttacttgttctttatgataatatggataggtttaagcaagaggtatttaaatacgtttggcaccctacaaacggagagcctataaaagaatttgatgacgtgttggactcgttaagatatgccatatacacacatactaaacctgaacgattaaggagggggaaatga

SEQ ID NO: 421093 - DNA, 495 bp, Staphylococcus aureus
ttgattaaattaacaccgaagcaagaaaagtttgtgctaggactcatagagggcaagagccaacggaaagcatatattgacgcagggtattcgactaaaggtaagagtggggaatatctagataaagaagcgagtacactttttaaaaatcggaaggtttccggaaggtacgaaaaattgcgtcaagaagtagctgaacaatcaaaatggacacgccaaaaggcctttgaagaatatgagtggctaaagaatgtagctaagaatgacattgaaatagagggagtgaagaaagcgacagctgatgcattcctcgctagtttagatggtatgaatagaatgacgttaggtaacgaagttttagctaacaagaaaatagaaactgaaattaagatgcttgagaagaagattgaacaaatagataaaggtgacagtggaacagaagataaaatcaaacaacttcacgacgcaataacggaagtgatcgtcaatgaataa

SEQ ID NO: 421094 - DNA, 402 bp, Staphylococcus aureus
atgtatagcaaagagtcaattgttaatatgataggcacacataaaatgaagtgcaatgtattagctgatgtaataccggaatatgatagcaattcaatagctcagtacggtatacaagcaacgttaccaaaaccacaaggggaaaactcaagtaaagttgaagatgttgttgtgaggcttgaaagagcaaataaaaggtatgcgcagatgttaaaagaagtcgagtttataaatcaatcacaacagagattggggcacgttgacttttgtttcttagagttgttaaagaaaggttataacagggatgcaattatcaagaagatgcctaactctaaattaaacagaaacaacttcctagcacgccgtgatgagttagcagaaaagatttatctactacagtga

SEQ ID NO: 421095 - DNA, 243 bp, Staphylococcus aureus
atgggcaataaaagtaattcagaaataatcgcaagagtattagaaatgagcaaaagcgatatatatatttgggatgtactaagcgagtttgacagtaaacaagaggaagaaatacttgattttatagatgagaacattgaagaatttgaaatatttctcaataccgcactaattcatattgttgaaagattgaaattgagaatagcgtttgctacagctaaggaggacaatgataatgactaa

SEQ ID NO: 421096 - DNA, 399 bp, Staphylococcus aureus
atgaactatgaaacagggttccaactaggtgtaatggaagctaggttgaagaagatgagaaaacaacgtgatgagtacaagaagcaacgagatgagcttattggggatatgacggaagttaagagaaaagcaaaagcatttgatgagatagataatctgatttatgaagtgttcgaaatgatgaattgctttaaacacagttttatcaatgaaaataaagagcttatcctcgatagagaatcaaatattttcttttcactaaaagattgcgctaacaaattagatttagttgttaaatttattcattgggttagcagatgttgttttgaaaatatatctcctaaaagaacacagtttttttacaaacaggtttcgaactttatattggcaaacatttaa

SEQ ID NO: 421097 - DNA, 453 bp, Staphylococcus aureus
atgatgcctaaatatcgagtgtgggacgaatatacagaaagaatacacgatgttgtaggattcgacttcatcgagaatgaagttcactatgaaaactacgcggaagcagaagctttaatacacgcaagagatttcaaagatgtagaacttatgcaaagtacaggacttaaagacaaaaacaacaacgaaatatatgcgggagatatagttgagttcaaagatggagtactcatgatagcgggcgacgatgagtctttagtagatacaattaatagagcagtgatatctattgatattgtaaatggtattcaattaaaagattttatgtttgagggtgcactctctgaaaatgattactttgagtatatagacaaaaaatccttccttagatatgactgtgaggttaaaggcaacatatttgaatcatctcatttactggaggtaacagaatga

SEQ ID NO: 421098 - DNA, 195 bp, Staphylococcus aureus
atgatgcaaacctataaagtaagtctttgtatcaagttcttagcgtctaaatgtaattataaattaaaaaagcattattttgtgcaaagtacgaatgaggaagaagccacgaatacggtattaaaactgactcgtaaaaaactcccattcaaaactgcaagcatagaagtagaaaaagtggaggtagtagaatga

SEQ ID NO: 421099 - DNA, 405 bp, Staphylococcus aureus; identical to SEQ ID NO: 408138

SEQ ID NO: 421100 - DNA, 243 bp, Staphylococcus aureus; identical to SEQ ID NO: 412726

SEQ ID NO: 421101 - DNA, 255 bp, Staphylococcus aureus
atgagcataatcagtaacagaaaagtagatatgaacgaaatacaagacaatgttaagcaaccagcgcactacacatacggcgacattgaaattatagattttattgaacaagttacggcacagtacccaccacaattagcattcgcaataggtaatgcaatcaaatacttgtcaagagcgccgttaaaaaacggacacgaggatttagcaaaggcgaagttttacgtcgatagagtatttgacttgtgggagtga

SEQ ID NO: 421102 - DNA, 372 bp, Staphylococcus aureus
atggcgaaaacagcaagaattgtaaggatacatgataaaccttataggttcagtaaatttgaaatggaattaatagaaagtcacggtataacacctggaatggtttctaaaagagtaaaagacggttgggaactacatgaagcaatggacgcaccagaaggtacgcgtttaagtgagtacagagaaaagaaaacaatagaaagactggaacaagctagactcgaacgcaaattggaaagagagagaaagagagaggctgagctaagaagaaagaagccacacttgtttaatgtaccacagaaacattcacgtgatccgtactggttcgatgtcacttataaccaaatgttcaagaaatggagtgaagcttaa

SEQ ID NO: 421103 - DNA, 405 bp, Staphylococcus aureus
atgagtaaatacaacgctaagaaagttgagtacaaaggaattgtatttgatagcaaagtagagtgtgaatattaccaatatttagaaagtaatatgaatggcactaactatgatcgtatcgaaatacaaccgaaatttgaattacaacctaaattcgggaaacaaagatcgattacgtatatagccgatttctctttgtggaaggaagggaaactggttgaagttatagacgttaaaggtaaggcgactgaagttgccaacatcaaagcgaagatattcagatatcagtatagagatgtgaatttaacgtggatatgtaaagcgcctaaatacacaggtcaagaatggatggtatatgaggacttagtgaaagtcagacgtaaaagaaaaagagaaatgaagtga

SEQ ID NO: 421104 - DNA, 222 bp, Staphylococcus aureus
atgccgaaagaaaaatattacttataccgagaagatggcacagaagatattaaggtcatcaagtataaagagaatgagaatgaagtttattcgctcacaggagcccatttcagcgacgaaaagaaaattatgactgatagtgacctaaaacgattcaaaggcgctcacgggcttctatatgagcaagaactaggattacaagcaacgatatttgatatttag

SEQ ID NO: 421105 - DNA, 804 bp, Staphylococcus aureus
atgggagaagtatcgtggataaaacttaaagttggcatgtttgatgacagcaaaatcaaatatatcgaagctttacccgaaagagatacgatcataactatttgggttaagttgctaactttatcaggaaagtacaacgaacagggttacattatgctatctgaaaacttgccgtataacgaagaaatgttagcaaatgagtttagtcgacctattaactcaataaggttagcaatacaaacttttgagacattgggcatgattgaaaaagttaatggtgtcataaaagtgacaaactgggaaaaacaccaaaacattgaaggactcgagaaaatcagggctcagaacaggttgaggaaacaaaagcaacgagaaaacaacagaaaattgctaaatggtcacgtgacgtcacgtgacagtcacgcaacagaagaagataaagaattagataaagaattagaaagagataaagaaaaagatatagataagaacttaagttcaaataatagcgcaactgacgttacgcatgagcaatttgaggaatggtggaaactttacaacaagaaaaaagataagaagatgtctttcactaaattcaaatcatgcttaaagaaacatacttttgagcaaatcatgcaaggtactcgagaatatttaaaaactattacagacaaacaatatcaaaagtaccctaaaacatttttaactaacgaaagctatatgaatgattatagcgaagagattaaagaaactggcatagatcaattggaacgtatgaagtacgacgaaagttattgggactag

SEQ ID NO: 421106 - DNA, 429 bp, Staphylococcus aureus
atgttaaatagaacagtattagtaggacgcttaacaaaagatccagaatatagaacaacgccaaatggtgtgagtgttaccactttcactatcgcagttaacagaacatttactaacgctcaaggagaacgtgaggcagactttattaactgtgtaacttttagaaaacaagcagaaaatgtaaataattatttatccaaagggtcattggctggcgttgatggacgtttacaatcacgcagttatgaaaacaaagacgggcaacgtgtatttgtcacagaagtagtagcggacagtgttcaattcttagaaccgaagaataacaaccaacaaccaaacaacaattatcatcaacaaagacaaactcaaactggtaataatccttttgataataccactgcgattactgatgatgacttaccgttctga

SEQ ID NO: 421107 - DNA, 624 bp, Staphylococcus aureus
atgactgaacaaacattatttgaacagttgaacagtaaaaacgtgaatgatcatacagaacaaaaaaatggattaacttatctagcatggtcatatgcacaccaagagctgaaaaagattgacccaaactacacagtaaaagtacacgagtttccacatccagatattaacacagaaaattattttgtaccttatttggctacaccagaaggctattttgtacaggtatctgtgactgtgaaagatagtacagagactgagtggcttccagtattggactttagaaataaatcgcttgctaaaggtagtgcaacaactttcgatattaacaaagcgcaaaaacgatgttttgttaaagcttcggctttacacggtctaggtttatatatctacaacggcgaggaactaccaagtgcaagtgacaacgatattacagaattagaagagcgtatcaatcagttcgtgaacttatctcaagaaaaagggcgagatgcaactatcgataaaacgatgagatggctaaaaatatctaacattaataaattaagtcaaaaacaaatcgcagaagcacaccaaaaattagatgcaggattaaaacaattggatagtgaggagaaacaataa

SEQ ID NO: 421108 - DNA, 222 bp, Staphylococcus aureus
atgaagcagactgtaacttacatcatccgtcatagggatatgccaatttatataactaacaaaccaactgataataattcagatgttagttactccacaaatagaaatagagctagggaatttaacggtatggaagaagcgagtatcaatatggattatcacaaagcaatcaagaaaacagtgacagaaactattgagtacgaggaggtagaacatgactga

SEQ ID NO: 421109 - DNA, 654 bp, Staphylococcus aureus
atgaataatataaatctcactcaacgacagttagatttaataaagaaaaatcaagctatcttgtctaaattgcctgtcgaagcttacgctaaagccgcaaatactatgaataattcgtatgttatgaacgctctggaaattcaatcgacggttaataatgttatgaatagcattagaattaaccaatcgaaattatctaattgggcttcctatatgcatcaagtaactaagaatcatccaatgttcaaatctaatttattttctaatgaggttcttaatagttttataaaatctacgagcattcctaaaaacgatattttgaaaatgtcttatgctcttagaaatttgaatgtcgatgtagctaatagttctacctttattaaatccatcaatcctgcccatccagtagagcaaaaacaacatgaaagcaataattacagcggtaaaaaaattgtcgacataatgcatattaatcactccagtttaggttttattaatgctagttctgtaggtgtaagcggtaatgctatttgggactttttattaaagtttattaataacgaaccaataaatactcctttttatatttcggtactttttatagcgtatttttgctatctattaaccagtttttcaaattcaaatgatgattag

SEQ ID NO: 421110 - DNA, 144 bp, Staphylococcus aureus
atgttacaaaaatttagaatcgctaaagaaaaaaataaattaaaacttaatttactaaaacatgcaaacagtaatttagaaacaagtaacaaccctgaactgttgcgagcagttgcagagttgcttaaagagattaatcgataa

SEQ ID NO: 421111 - DNA, 768 bp, Staphylococcus aureus
atgtataaccagcaattaccagttcacagattacagacagatatgagttatcaatcaccggtgcaagaaagacaagtaagaaagatagttaataaatttgattcaaaaaaattacacacaattgtagttagtaaaagaaaagatgggtcattttatatcatcgatggtcaacatagggtggaagcgttgaaagaattgaacatttcatttatagaagcgacagtgcacgaaaacttaactattgaagaagaagctgagatgtattacggagttaatgatagaccttcgaaaaacgcaaactctaaaggtaaatcacgacttagatttaaagagccggtagctgtagctatagacgaaacggtaaaaagtgtcgggttggaaattgattatgaaaaaagcgcaccaacaaaagggtacatcaaagcttatgatgcactgcaatcaatatacaaaggaaatggtgctaatcacttaggtttagttttggaaataatcaaagattcttttggagaggatacaaggaattaccaatcttttattttgagaggtttctctaaattgttgaaagtatatctgcatgaagtggatttaaattttttagttaaaaaacttcaaaacattggttacgaaggcttcattttagagattaataagaagcatgctggatttaagacaaaaaaagaatgcctaccatttgtagtagtagacatttacaacaaaaatcgtcgtcaaaaaaatcaattggacaaaatgaaattgcatgtttaa

SEQ ID NO: 421112 - DNA, 882 bp, Staphylococcus aureus
atgcttatagatatcaataaggtaactgtcggcaaacgcataagaaaagattacggagatataacatcacttgctgatgatattgaagacaggggtttaattaatccgccggttgtcacgccggattatgaattaatagctggagaacgaagattaaaagctatgaagaaacttgattataggcaaatagaagtgagggttatgtccgtagaagattatgaacatcaactcaaaatagaaattagtgaaaatgaagagcgaaaagcttttacttattcagaaagaatggattacgcgaaacaattagaaagaattgaagctaaaaaagctaaagatagaaagacttctaagctaaaacaaaacaaagacaccgttacggaccaaggaccggaacggaaaggagaaactcgagatatcgtcggtaaggcttctggttttggcagtggacgaacatatgcaagagctaaatacatctatgaaaacgcagacgaagaaactataaaagaagttgatgaaggtaaaaaaagtattcgcaaagcgcatgatgaacttcgtgctaaagaaaagcaaaatgaggcaaataaagtgaaagtgacaacaaaagaaaaacctcaaacgacagtagtagatcgaagggaacggatgaacgcagaagttgaagctatgagtgaaacagaaacaaatttagctttgtctgaagctgcagctgcaaacatagtaaatgtctgttctaacttattatacgcgataaacaacattgaagatttagagttaactttgaatttcttgaaatcaagagatgctgaagaattatcaaaagttgttaaggcttctaaagctttaaacaaaattatagaaaaaggagattttataaatgtataa

SEQ ID NO: 421113 - DNA, 264 bp, Staphylococcus aureus
atgaactacatcaaacatagtttgaagttagatgaatggcgaaagcgaaaaggttacacccagtcatctttcgcagaaaaacttggcatttcgccgtctacttataacatttgggaaaacaacccagaaatgattaaacctagagatgcttttagaattgctaagacattagatatctctattgatgagattatttttttaaaagatgaatcgtattttaaatacgttttagtcgaagaaaaaaaacatcttaaaaggaggtaa

SEQ ID NO: 421114 - DNA, 639 bp, Staphylococcus aureus
atggctttcaaaaattccataaaagaaatcagattgaacaatagattgtctaaagttgagatggctagaaaattagatgtttccgaaggtactataagaatgtgggaaagtggaagaactgaacctagaatgggtatggtcgaaaaaatttcaagtttgttcaatgtttctaaaggttatctcttaggagaaattgaagaaattgttttaccagaatttgatagcgaaatcgaggttccatatttcggtaaagtttctgctggaaatttcgaggaagttgcaattgataacgaaaaattaaaagttccaccatttgcttttaacggtcgtaaacctagcgaatgtatagcactaaaaataaatggtgatagcatgaataaaatactcgctaacggttcttatataattgtccatgattatagaaagtcttgtgatcataaacttaacagcaatgacatccttgtattacgtctaggtggtgaatatacagttaagcgtgtgagacgtactgaaacaaaactacatttagacccagtaagctattcagatgaatttaaaactaattcttacgatttagattctattgatgaaatcgaagtgataggcaaagttatttataactatcgtatttttgattaa

SEQ ID NO: 421115 - DNA, 426 bp, Staphylococcus aureus
atgacaaatatagattggataatcacctctaatagagtattcaacaatccaagtaacaatttattaatcgatgagcctataacaagcatttcgctgtttaatgttcctagtcaatataccttcacaatatcttttggaatctcaaatatagatctaaatgatgtacaaactataaatcttagaattggaaatttagatacggaaaaagaaattgttaacgcacctttatatatagataaagcaaaggaaaacgaagtgaaaaacaaacgtgctaacggacttgtagattttgtttcaaccgttacattgaataatttccttttcgaagaaacaggtaatcattatataacaatgaagttgggcgaaagcactcagacttgttattttaacgtcatgttaaatcaggagttagaagatggaaaataa

SEQ ID NO: 421116 - DNA, 372 bp, Staphylococcus aureus
atggaaaataaaaagtatcacactgacgcagctagacctaattttcaagttgtagatgataaatataaagaatctttacttaacaacattcgccagaataatggtaaaatgaaagaaaaaggtaactattctggaggtggtaagatgaatggaaaatatattaccaaagaagtatttgaacagtttgaaaagcgtatagacaataagttagattctttacctgacagaatggctgataaaatggatgctaaaataagcggtttagaagctaggcagacaaaatggtttgtaggaatagctataagtacagctattggtggtttaagtctgatagtaggagcagtaggattgatcgtcaacttatttatatag

SEQ ID NO: 421117 - DNA, 1050 bp, Staphylococcus aureus
atgccagtatataaggatgataatacaggtaaatggtatttttccattagatataaagatgtatacggtaataacaaacgtaagatgcaacgcggtttttcaactaagcgtgaagctaagagagcagaggctatttttttgaatgacgtaaacgaaggatatagtgattcgaaaacatttgattatgtttttcatcactacttagaaaatagcgatttgagacctaaaacaaaacgacgcaaacaaaatgaatatcataaacactttaaagctaagttcgggcacataaaaatgaataagataacacaaaatcaatgccaagagtttcgtaaatatctaatagagaatgtagcatcaacaaattctgctcgtacaatttggtcaggttttaaagttgtaattaattatgctaaaaaatactttggattacgtacagatccaacaatatcaattaaacctattccgcgtgtaaagccaaaacctaagtttatgatgcgtgaagaatttgaagaaagaatcaaagacattgaagatcaagattacagagagttatttacattaatgttttatacaggtttaaggattggcgaagctatggcgcttgtttggacagactacaataaatataaaaaagagatatccataaataaaacaatggacatctctaatagaactatatatccgagaccaaaaacagatagttcagaggatattgttcctttacctaaattcatcaatacaatgttaactgaacgacaccaacgtgaaaaagagttaaacaaatattttgatgaacgtagttattttattttcggaggaatggctcccaaacattacagtcatgttcaaaagaaatttcaaaaagctttccctcattataacattcacgcgttaagacattcttatgcatcttatcttgcaaataatggtgtagatattttcgttttacagtcactcatgagacatgctcaaatcactgaaacgatgggcacttatagccatttatatactcagaaaaaacacgatgcaatagccatttttgacaagtaa

SEQ ID NO: 421118 - DNA, 1398 bp, Staphylococcus aureus
atggctaaaaaagcacctgatgttggggattataaatatggattccacgacgatgatgtgtccattttcagatcagaacgtggtttaactgagaatatcgttagagaaatttctaacatgaaaaatgagccggaatggatgttagatttccgtcttaaatcattaaaattgttttataaaatgccaatgcctcaatggggtggcgacttatcagaattgaatttcgatgacattacttactatgtaaagccttcagaacaagctgaacgttcatgggatgaagtgccagaagaaattaaaagaactttcgataaattaggaattcctgaagctgaacaaaaatatttagctggtgtttctgctcaatatgaatctgaagttgtttaccataatatggaaaaagaacttgaagaaaaaggtattatctttaaagatacagatagtgctttacaagaaaatgaagaattattcaaaaaatactttgcttctgtagtacctgcagcagataacaaatttgcggcgttaaactcagcagtatggtcaggtggttcgttcatttatgtacctaaaaatatcaaactagatacgccactacaagcttatttccgtattaactctgagaacatgggtcaatttgaacgtacattaatcattgctgatgaaggtgcttctgtacattacgtagaaggttgtactgcaccagtttatacaactagttctttacactctgctgttgtggaaatcattgtgcataaagatgcgcacgttcgttatactacgattcaaaactgggcgaacaatgtatacaatttagttacaaaacgtacttttgtttatgaaaacggaaatatggaatgggtagatggtaacttaggttctaagttaacgatgaaatatccaaactgtgttcttttaggtgaaggtgcaaaaggtagtacattatctattgcatttgctggtaaaggacaagttcaagatgccggtgctaaaatgattcataaagcgccaaatacatcttcaacgattgtttctaaatctatttctaaaaatggtggtaaagttatttatcgcggtattgttcattttggacgtaaagcaaaaggtgctcgttcaaatattgaatgtgatacattaatcttagataacgaatcaacatcagatacaattccatataacgaagtattcaacgatcaaatatcattagaacatgaagccaaggtttcaaaagtttctgaagaacaattattctatctaatgagtcgtggtatttctgaagaagaagcgacagaaatgattgttatgggattcatcgaaccatttacaaaagaacttccaatggaatacgcggtcgaaatgaaccgtttaatcaagttcgaaatggaaggtagtattggatag

SEQ ID NO: 421119 - DNA, 465 bp, Staphylococcus aureus; identical to SEQ ID NO: 405468

SEQ ID NO: 421120 - DNA, 1242 bp, Staphylococcus aureus
gtggccgaacactcatttgacgttaatgaagtaatcaaggattttccgatattagatcaaaaagtcaatggcaaacgtttagcatatcttgattcaacagcgacaagtcaaacgcctgtgcaagtgttaaatgttttagaggattactacaagcgttataattcaaacgttcatcgtggtgttcatacattaggatcattggcaactgatggttatgaaaatgcccgtgaaactgttcgtcgttttattaatgcgaagtattttgaagaaatcattttcacacgcggaacaactgcgtcgattaaccttgtagcacatagctatggtgatgcaaatgttgaagagggcgatgaaattgttgtcactgaaatggaacatcatgccaatattgttccttggcaacagttagcaaagcgtaaaaatgcgacattgaaatttataccaatgacagctgacggtgaattaaacatcgaagatattaagcaaacgattaatgataaaacaaagatcgttgctattgcacatatttctaatgtactcggtacaattaatgatgttaaaaccattgcagaaatagctcatcaacatggtgcaattatcagtgttgatggggcgcaagcagcaccacatatgaaacttgatatgcaagaaatgaatgctgatttttatagttttagtggtcataaaatgcttggaccaacaggtattggcgtattatttggtaaacgtgagttactacaaaaaatggaaccgattgagttcggtggcgacatgattgattttgtaagtaagtatgatgcaacatgggctgatttacctactaaatttgaggcgggcactccattaattgcacaagcaattgggcttgcagaagctattcgctatttagaacgcataggatttgatgcaattcataaatatgaacaagaattaacgatatatgcttatgagcaaatgtctgcaattgaaggaattgaaatttatggcccgccaaaggatcgtcgtgcaggtgtaataacgtttaatttacaagatgtacatccacacgatgttgctacagccgtagatacagaaggtgtagcggttagagctgggcatcattgtgcgcaaccgttaatgaaatggttaaatgtgtcttcaacagctagagcgagtttttatatatacaacacgaaagaagacgttgatcagttaataaatgccttgaaacaaacgaaggagtttttctcttatgaattttaa

SEQ ID NO: 421121 - DNA, 1308 bp, Staphylococcus aureus; identical to SEQ ID NO: 405470

SEQ ID NO: 421122 - DNA, 762 bp, Staphylococcus aureus; identical to SEQ ID NO: 405471

SEQ ID NO: 421123 - DNA, 852 bp, Staphylococcus aureus; identical to SEQ ID NO: 405472

SEQ ID NO: 421124 - DNA, 195 bp, Staphylococcus aureus; identical to SEQ ID NO: 405473

SEQ ID NO: 421125 - DNA, 822 bp, Staphylococcus aureus; identical to SEQ ID NO: 407319

SEQ ID NO: 421126 - DNA, 696 bp, Staphylococcus aureus
atgggtaaatcatttagtgaaattataaatgaaatgattacaatgcctaatattcagtggccagaagtttggactgcaatagtcgaaacactatacatgacagtcgtctcaactatatttgcatttatacttggtcttattttaggtgtgttattattcttgtctgctaaaggtaagtctatcggtgcaaggttattttattctatcgtttctttcattgttaacttatttagagcgataccatttattattttaattttattattaattccatttacaagtttgatacttggaacgataagtggtccgacaggtgcgttaccagccttgatcattggcgcagcaccgttttatgcaaggctcgtagaaattgcttttaaagaaattgataaaggtgtcatcgaagcggcttggtcaatgggcgctaatacttggacagtaattcgtaaagtccttttacctgaagctatgccagcgctagtgtctggcattacagttacagcaatcgctttagttggttcaacagcagttgcaggtgtaattggtgccggtggtttaggaaatttagcatacttaacaggtttcactcgaaatcaaaatgatgtcattttagtatcaacagtttttattttaattattgtatttataatccaattcattggggattggcttacaaataaacttgataaacgataa

SEQ ID NO: 421127 - DNA, 1026 bp, Staphylococcus aureus; identical to SEQ ID NO: 407321

SEQ ID NO: 421128 - DNA, 297 bp, Staphylococcus aureus; identical to SEQ ID NO: 407322

SEQ ID NO: 421129 - DNA, 390 bp, Staphylococcus aureus; identical to SEQ ID NO: 411750

SEQ ID NO: 421130 - DNA, 630 bp, Staphylococcus aureus; identical to SEQ ID NO: 406925

SEQ ID NO: 421131 - DNA, 903 bp, Staphylococcus aureus
atgaaacaatacttaattactggtgggactggtatggttggatctcaattagttaatgaaattaaaaaatcagattcacatatcacgatattaacgcgacacgaccaaatttcaaatgataagaaaatttcatatgtcaactgggctaaatctgggtgggaacacaaagttcctcaaaatatcgatgtggtcatcaacttagcaggtgctacactgaataaacgatggacaccggaatataaacaaacgctaatgctaagtagaattcaatctacgcaagctttatatgaattgtttaaatcacgtaataaagcacctaaagttttatttaatgctagtgccactggttactatcctcctgatttatttatgagttacacagaagtttataaaactttaccatttgatttcttgtcagatattgtgtatcaatgggaacgtttcgcacaacaatttgaacaattaggtacgcgagttgtcatcggtcgtttcggtatgattttatcgaatgaaggcggtgcgttacaaacaatgaaactaccatacaaatattacattggtggtaaattaggttctggtcaacaatggtattcatggattcatatcaatgatttaattcaagctattttatttttaataaataacgagtcagctagtggtccgtttaatttaactgcacctatacctgagcgtcaaaatttatttggctacactttagcaagagctatgcataagccccatgaaacttgggcaccaagtcttgcaatgcgtctcatacttggtcaaatgtcaacagtagtattggatactcaaaaagtattacctaataaaattcaagcattgggattccaatttaaatatagtaatttaaaaatggcacttgaagatttaattaaagaataa

SEQ ID NO: 421132 - DNA, 588 bp, Staphylococcus aureus; identical to SEQ ID NO: 406923

SEQ ID NO: 421133 - DNA, 945 bp, Staphylococcus aureus
atgagctttgcatcagaaatgaaaaatgaattaactagaatagacgtcgatgaaatgaatgcaaaagcagagctcagtgcactgattcgaatgaatggtgcacttagtctttcaaatcaacaatttgttataaatgttcaaacggaaaatgcaacaacggcaagacgtatttattcgttgattaaacgtgtctttaatgtggaagttgaaatattagtccgtaaaaaaatgaagcttaaaaaaaataatatttatatttgtcgtacaaagatgaaagcgaaagaaattcttgatgaattaggaattttaaaagacggcatttttacgcatgaaattgatcattcaatgattcaagatgatgaaatgagacgcagttacttgagaggagcttttctggcaggtggctcagtgaataaccctgaaacatcttcgtaccatttggaaattttttctcaaaatgagagtcatgcagaaggcttaacgaaactaatgaatagttatgagttgaatgccaaacatttagagcgaaaaaaaggaagtattacgtatttaaaagaagcggaaaagatttcggattttcttagtttgataggtggctatcaagcgttattaaaatttgaagacgtacgtattgtaagagatatgcgtaattctgttaaccgactcgttaattgtgaaacggcaaatctaaataaaacagttagtgctgcgatgaaacaagttgagagcattaaattgattgataaagaaattggtattgaaaatttaccagacaggttgagagagattgctagaattcgagtagaacatcaagaaatttcgttgaaagagcttggagaaatggtatcaactggtccaatttcaaaatcaggtgtaaatcaccgattaagaaaacttaatgatttagccgataagattagaaatggtgaacaaatagaattataa

SEQ ID NO: 421134 - DNA, 996 bp, Staphylococcus aureus
atgagacaaataaaagttgtacttatcggtggtggcactggcttatcagttatggctaggggattaagagaattcccaattgatattacggcgattgtaacagttgctgataatggtgggagtacagggaaaatcagagatgaaatggatataccagcaccaggagacatcagaaatgtgattgcagctttaagtgattctgagtcagttttaagccaactttttcagtatcgctttgaagaaaatcaaattagcggtcactcattaggtaatttattaatcgcaggtatgactaatattacgaatgatttcggacatgccattaaagcattaagtaaaattttaaatattaaaggtagagtcattccatctacaaatacaagtgtgcaattaaatgctgttatggaagatggagaaattgtttttggagaaacaaatattcctaaaaaacataaaaaaattgatcgtgtgtttttagaacctaacgatgtgcaaccaatggaagaagcaatcgatgctttaagggaagcagatttaatcgttcttggaccagggtcattatatacgagcgttatttctaacttatgtgtcaatggtatttcagatgcgttaattcattctgatgcgcctaagctatatgtttctaatgtgatgacgcaacctggggaaacagatggttatagcgtgaaagatcatatcgatgcgattcatagacaagctggacaaccgtttattgattatgtcatttgtagtacacaaactttcaatgctcaagttttgaaaaaatatgaagaaaaacattctaaaccagttgaagttaataaggctgaacttgaaaaagaaagcataaatgtaaaaacatcttcaaatttagttgaaatttctgaaaatcatttagtaagacataatactaaagtgttatcgacaatgatttatgacatagctttagaattaattagtactattcctttcgtaccaagtgataaacgtaaataa

SEQ ID NO: 421135 - DNA, 912 bp, Staphylococcus aureus
atggataataatgaaaaagaaaaaagtaaaagtgaactattagttgtaacaggtttatctggcgcaggtaaatctttggttattcaatgtttagaagacatgggatatttttgtgtagataatctaccaccagtgttattacctaaatttgtagagttgatggaacaaggaaatccatccttaagaaaagtggcaattgcaattgatttaagaggtaaggaactatttaattcattagttgcagtagtggataaagttaaaagtgaaagtgacgtcatcattgatgttatgtttttagaagcaagtactgaaaaattaatttcaagatataaggaaacgcgtcgtgcacatcctttgatggaacaaggtaaaagatccttaattaatgcaattaatgatgagcgagagcatttgtctcaaattagaagtatagctaattttgttatagatactacaaagttatcacctaaagaattaaaagaacgcattcgtcgatactatgaagatgaagagtttgaaacttttacaattaatgtcacaagtttcggttttaaacatgggattcagatggatgcagatttagtatttgatgtacgatttttaccaaatccatattatgtagtagatttaagacctttaacaggattagataaagacgtttataattatgttatgaaatggaaagagacggagattttctttgaaaaattaactgatttgttagattttatgatacccgggtataaaaaagaagggaaatctcaattagtaattgccatcggttgtacgggtggacaacatcgatctgtagcattagcagaacgactaggtaattatctaaatgaagtatttgaatataatgtttatgtgcatcatagggacgcacatattgaaagtggcgagaaaaaatga

SEQ ID NO: 421136 - DNA, 927 bp, Staphylococcus aureus
atgacttcatctactaatgttaaagctttaatcgaaaaaaataataataaaaaagggaagcataatgacaaaattataccagttattttagccgcaatttcagcgatttccattttaacaacactaggtatattaatcacattgcttttagaaaccatcacttttttcaccagaattccaataactgaatttctattttctactacttggaatcctaccggttcagaccctaagtttggtatctgggcattgataatagggactttaaaaatcacagttattgcgactatatttgcagttccagtcgggcttggtgcagcaatttatttaagtgaatatgcaagtgaccgtgcacgacgcataattaaaccgatattagaaattttagcaggaataccaacaattgtgtttggtttctttgcattaacctttgttacaccagtattaagatctttcataccaggtcttggagagtttaatgctataagtcccggcttagttgtcggtattatgattgtccctctcatcacaagtttgagtgaggatgcaatggcatctgtaccaaataaaattcgagaaggtgcctatggacttggagcaactaaattagaagtagcaactaaagtcgtacttcccgcagcaacatcaggtattgtagcttcaatcgttctcgcgatttcaagagcaattggagaaacgatgattgtatcattagcggcaggtagttcgccaacagcttcattaagtttaacaagttcgattcaaacaatgactggatatattgttgagatagcgacaggtgatgcaacatttggatcaaatatttattacagtatttatgctgtagggttcacactatttatctttaccttaatcatgaatttactttctcagtggatttctaagcgttttagggaggagtattaa

SEQ ID NO: 421137 - DNA, 1815 bp, Staphylococcus aureus
atgtctcaaggtttacctttaagagaagatgttcctgtttcagaaacatgggatttagtagacttatttaaagatgatcaacaatattatgaaagtattgacgctctagtacaacaagcaaatcaatttcatcatacatatgcaacaacattaaattcaatcgaacaaattaatactgctttagctgaattagaaaatattttaattgccttagatcgcttaagtaattatgcagaactacgtttaagtgtagatactagtaatatcgaggcacaagtattgagcgctaaattatctactacatacggtaaaattgttagccaattatcatttgtagagtcagaaatacttgaattaccagaagaaatacttcaacaattagaagaatcatgtccatatcaacactatattaaacagttaataaaacaaaagccattccaattatctgcgtcggtagaacaagtatttgcaactttatcacctacgctaaacagtccttacgatttatacggcacgacaaaaatgctagatattacattcgattcatttgaacatgatggtacaacgtaccctgtcgactatgctacgtttgaaaatgattatgaagataataaagatcctgagtttagacgtaaaagtttcaaatcgtttagcgatgggattcgaaaatatcagcatactaccgcggctacatataatatgcaagtacaacaagaaaaaattgaagctgatttacgtggatttgaatcagtcatcgattatttattacatagtcaagaagtaacgcgtgatatgtttgaccgtcaaatcgatatgattatgcgtgacttggcaccagttatgcagaaatatgctaaacttttacaacgtattcacggattagataacatgcgttttgaagacttgaagatttctgtagaccctgattatgaaccagagatttcaattgaagactcaaaaaattatattttcggtgcgttaagtgttttaggtgatgactatacaaacatgttacgtgaagcatacgatcagcgatggattgattttgcacaaaataaaggtaaagatacaggcgcattttgtgcaagtccatactttacacattcatatgtgtttatttcttggactggtaaaatggctgaagcatttgtcttagcacatgaattaggtcatgcaggtcattttacattagctcaaaaacatcaaccatatcttgaatcagaagcatcaatgtactttgttgaagccccttctacaatgaatgaaatgttgatggccaattatttatttaacacaagtgataatccaagatttaagcgttgggttattggctcaattttatctagaacatattatcataatatggttacccatttattagaagctgcttatcaacgtgaagtgtatcacaaagtagatcaaggtgaatctttaaatgcgccgacattaaatgaaataatgctaaatgtttataaacaattttttggagatgcagtagatatgactgagggtgctgaattaacatggatgcgtcaacctcattactatatgggattatattcgtatacgtattctgctggcttaacaatcggaactgtcgtttctcaaaagattaaaaatgaaggccaaccagctgttgatgcttggttagaaacattgaaaaaaggtggtagtgtatcacctgtcgaacttgcaaacattgcaggtgtagacattactacagaacagccacttaaatctacaattaaatatatttctgatttagtcgatgaagttgaaaaattaacagatgaaattgagcaagcaaataactaa

SEQ ID NO: 421138 - DNA, 348 bp, Staphylococcus aureus
atggttacttctgaaccaaagttagcaaatgctgtacctaattctgatccaatgtatcctccaccaactacaactaatttacctggtacttcttgtaagtttaaagcacctgttgagtcaataacacgtttaccgaatttgaaattaggaatttcaattggtcttgaacctgttgcaatgattgcatttttaaagttgtatgtttgtgcgctcttttcgtccataacacgtaagctattgttatctacgaaatatgcttcacctttaacgatgttaactttgttacctttaagtaagccttcaacaccaccagttaatttattaacaactgatgatttgaattcttga

SEQ ID NO: 421139 - DNA, 1023 bp, Staphylococcus aureus
atgggtatcaaagatgttgctaaggcagaaatgattaaagccaatgttccagttgttcctggtagtgacggtttaatgaaagacgtttcagaagctaagaaaatcgccaaaaaaattggctatccggtcatcattaaagctactgctggtggtggcggaaaaggtatccgtgttgctcgtgatgaaaaagaacttgaaactggcttccgaatgacagaacaagaagctcaaactgcatttggtaatggtggactttatatggagaaattcatcgaaaacttccgccatattgaaatccaaattgttggggacagctatggtaatgtaattcatttaggagaacgtgattgtacaattcaaagacgtatgcagaaattagtggaggaagcaccttccccaattttagatgatgaaacacgtcgtgaaatgggaaatgccgcagttcgtgcagcgaaagctgtaaattatgaaaatgcgggaacaattgagtttatatatgatttaaatgataataaattttattttatggaaatgaatacacgtattcaagtagaacatcctgtaactgaaatggtaacaggaattgatttagttaaattacaattacaagttgctatgggtgacgtgttaccgtataaacaagaagatattaaattaacaggacacgcaattgaatttagaattaatgctgaaaatccttacaagaactttatgccatcaccaggtaaaattgagcaatatcttgcaccaggtggatatggtgttcgaatagagtcagcatgttatactaattatacgataccgccatattatgattcgatggtagcgaaattaatcatacatgaaccgacacgagatgaagcgattatggctggcattcgtgcactaagtgaatttgtggttcttggtattgatacaactattccattccatattaaattattgaataacgatatatttagaagcggtaaatttaatacaaactttttagagcaaaatagcattatgaatgatgaaggttaa

SEQ ID NO: 421140 - DNA, 378 bp, Staphylococcus aureus; identical to SEQ ID NO: 418416

SEQ ID NO: 421141 - DNA, 285 bp, Staphylococcus aureus
gtgttaaaaaagtggctaaattcaaacgtcaaacaattctttgttataactttcattagtgtaatattaacgcttattttattttctactcatatctatgattatattgtgaatggtactgtttttagtggggctggagatggattccgtcaaatgatgccatttcaaatgtatttgtatgaacatttaagtagtttttctagtttatatgatgcatcgtttggattaggtggcgattatatgaaaggactatcatattattattcgctgtcacctttaatgtag

SEQ ID NO: 421142 - DNA, 1020 bp, Staphylococcus aureus
atgatcgctacgattttatacggcatgtcaactgtcgttatatactttaattttacttggtcattttatggaagtttattatatttattaccattatcgattcttggtttggaaagatattttcaacaacgcaaaatcggtattttcattgttgcgatagccttaacactatttagcaatttttatttcagttattatcaagctattattataggttgctactatttatatcgactcattttcacttacaaatatgacattgtctctagaacacaaaaattaatttgcgtcatatctgctacagttttgagtgtgttatcaagtgtatttggtttattcactggcatttctgcgtttttggaaaatgacagaaagcaaaatcccaatgttgatataccgtttttgacaccacttgattaccattattttttctttagcgatggattttatattacgatttcaattcttactatcgttgcattattgtcattcaaactgtatcgtttttacttttatagacttttcgcaatagtaacatggttattatttattggttcattatcacagtatttcgacagtgcttttaatggtttttcatttccagaaaggcgttgggtgtatatcttagcactatcatcaagcgctctttgcggattgtttattcaacatttatcaacattaaatatgaaatattatttaatcagaacaataccagtaagcatcatcgcattactttatgtattactatcaccgacacacccacttgcacttatagtaggtattatcctgctaatggtgcttgccgttattttaaaatttagtttatggcgttataaaaaattaaccgttgcaatattagtattaatcgttatgattcaacaaatcgtcattttagataacaataaaaatatggcaatcaaaccttatcaacaatcattatcaacgttgaaacaacatgattaccatagtaactactgtctcttatacacatctgagctgccgacgaatagagaggtgtag

SEQ ID NO: 421143 - DNA, 1473 bp, Staphylococcus aureus
atgatgccgatgataaaagaaacaccttttaatgataaaacccaaaataatacaaccttaaaatcatggattgacgacggatttttaccactcatttataaaggtgaaatgatggatttatcacgtggtagagccattagccgtgaaaatgaaacgagtcactcagcatctgcaactgtaatgaaatcattgttgagattaagtgatgccatggatgagtcaacaaaagctaaatataagcaaatcgttaaaacttctgttaaatctgattcaagttataaacaaaacgattatttaagctcttattcagatataagcaaaatgaagtctttaattgaagacagcactatttctactaacggtttaacacaacaacttaaaatatataatgacatggatcgtgtcacctatcacaacaaagaattagactttgcatttggattaagtatgacatcgaaaaatgtcgcacgttacgaaagtatcaatggagagaacttaaaaggttggcacaccggtgcaggcatgtcttatttatataacagcgatgtcaaacactatcgtgataacttctgggcaacagccgatatgactcgtcttccaggtactactactttaaatgatatgccatctacaaatactaagaatgataattcctttgtaggcggaacaaaattcgatgaacaacatgctagcattggtatggattttgaaaatcaggacaaaactttaactgccaaaaaatcatatttcatattaaacgataaaattgtcttcttaggaactggcattaaaagtactggttcatcagaaaatccaattacaacgattgaaaatcgtaaagcaaatgagtataaattatataaagatgatattgaaaatactacttcaaatgataatactcaggaaacccattccgtctttttagagtccagcgatactaaaaagaacattggttaccatttcttagacaagccaaaaatatctgtaaaaaaagaaacacatattggcaagtggaaagatattaacaacagtcaaagcaacactcaaaaaaatgatgattattacgaagtaactcaaacacataatacatcagacagtaaatatgcatatgttttgtatcctggtttaacaaaaagtgattttaaatcgaagaataatattgtaaatattattaaacaagatgaagattttcatgtaataaaagataatgatggcatatttgctggggttaattatagtgatagtactaaaacttttgacattaatggtactaaagtcgaagttaaagccaaaggtatgtttgtaattaaaaagaaagatgataaaacatatgaatgtagcttctataatcctgaaactacaaatacagcttcaaatatagaatcaaaaatttcaattgcaggttacactttaattaataaaagtgtcacaaactctaatgaggccggtgtaaactttgaattaactaaataa

SEQ ID NO: 421144 - DNA, 330 bp, Staphylococcus aureus
atgaaactttctttaaattctaattctaaatatttaagagcaccaagtattcgccaattttcaaatcgtatgaataatttggatgattgtgttaatttaactattggccaaccagacttcccgatgcctgatgttgtgaaaaaggcatatattgatgctattaacaatgacaagacatcatactctcacaataaagggttattagaaactcgcgaagcaattagtcaatacttcaaaaatcgttatcatttttcctatgatcctgaagaaattattgtgacaaatggagcaagtctcttcataccttcttttaaaacatccatttcataa

SEQ ID NO: 421145 - DNA, 393 bp, Staphylococcus aureus
atgattagtaaaaaagaactaaaagaaatgtataaaactgggttatgggaatttgaaacacatacccacgatttgcataacttatctaaaaataataagtcaaaattaatgaaagcttctgaagctacaatcataaaagatttaaacaaaagtgaaaaatatctaactaaaaactttaaaaagtcgcagaaaactatagcctatccttatggcttgatgaatgacgataaattaccggtaatcaaaaaagctgggttaaaatacaatttttcattagaggaaaaagcagtcactccgaactccaatgattattacatccctagaatattaattagtgatgatgcttttgagcatttaattaagagatgggacggattccatgaaaaagattag

SEQ ID NO: 421146 - DNA, 1008 bp, Staphylococcus aureus
atggtggttgtagctagaaatattacaagaaaaaaacaaggcaaagcctttggttttataggatcaattgtagctttaggtgaagggttaggtcccgcaatagggggaataatagcacattatattcattggtcttacctacttatacttcctatgattacaatagtaactataccttttcttattaaagtaatggtacctggtaaatcaacaaaaaatacattagatatcgtaggtattgttttaatgtctataagtattatatgttttatgttatttacgacaaattataattggacttttttaatactcttcacaatcttttttgtgatttttattaaacatatttcaagagtttctaacccttttattaatcctaaactagggaaaaacattccgtttatgcttggtttgttttctggtgggctaatattttctatagtagctggttttatatcaatggtgccttatatgatgaaaactatttatcatgtaaatgtagcgacaataggtaatagtgttatttttcctggaaccatgagtgttattgtttttggttattttggtggttttttagtggatagaaaaggatcattatttgtttttattttaggatcattgtctatctctataagttttttaactattgcattttttgttgagtttagtatgtggttgactacttttatgtttatatttgttatgggcggattatcttttactaaaacagttatatcaaaaatagtatcaagtagtctttctgaagaagaagttgcttctggaatgagtttgctaaatttcacaagttttttatcagagggaacaggtatagcaattgtaggaggtttattgtcactacaattgattaatcgtaaactagttctggaatttataaattattcttctggagtgtatagtaatattcttgtagccatggctatccttattattttatgttgtcttttgacgattattgtatttaaacgttctgaaaagcagtttgaatag

SEQ ID NO: 421147 - DNA, 1008 bp, Staphylococcus aureus
atggtggttgtagctagaaatattacaagaaaaaaacaaggcaaagcctttggttttataggatcaattgtagctttaggtgaagggttaggtccttcaatagggggaataatagcacattatattcattggtcttacctacttatacttcctatgattacaatagtaactataccttttcttattaaagtaatggtacctggtaaatcaacaaaaaatacattagatatcgtaggtattgttttaatgtctataagtattatatgttttatgttatttacgacaaattataattggacttttttaatactcttcacaatcttttttgtgatttttattaaacatatttcaagagtttctaacccttttattaatcctaaactagggaaaaacattccgtttatgcttggtttgttttctggtgggctaatattttctatagtagctggttttatatcaatggtgccttatatgatgaaaactatttatcatgtaaatgtagcgacaataggtaatagtgttatttttcctggaaccatgagtgttattgtttttggttattttggtggttttttagtggatagaaaaggatcattatttgtttttattttaggatcattgtctatctctataagttttttaactattgcattttttgttgagtttagtatgtggttgactacttttatgtttatatttgttatgggcggattatcttttactaaaacagttatatcaaaaatagtatcaagtagtctttctgaagaagaagttgcttctggaatgagtttgctaaatttcacaagttttttatcagagggaacaggtatagcaattgtaggaggtttattgtcactacaattgattaatcgtaaactagttctggaatttataaattattcttctggagtgtatagtaatattcttgtagccatggctatccttattattttatgttgtcttttgacgattattgtatttaaacgttctgaaaagcagtttgaatag

SEQ ID NO: 421148 - DNA, 855 bp, Staphylococcus aureus
atgattacaatagtaactataccttttcttattaaagtaatggtacctggtaaatcaacaaaaaatacattagatatcgtaggtattgttttaatgtctataagtattatatgttttatgttatttacgacaaattataattggacttttttaatactcttcacaatcttttttgtgatttttattaaacatatttcaagagtttctaacccttttattaatcctaaactagggaaaaacattccgtttatgcttggtttgttttctggtgggctaatattttctatagtagctggttttatatcaatggtgccttatatgatgaaaactatttatcatgtaaatgtagcgacaataggtaatagtgttatttttcctggaaccatgagtgttattgtttttggttattttggtggttttttagtggatagaaaaggatcattatttgtttttattttaggatcattgtctatctctataagttttttaactattgcattttttgttgagtttagtatgtggttgactacttttatgtttatatttgttatgggcggattatcttttactaaaacagttatatcaaaaatagtatcaagtagtctttctgaagaagaagttgcttctggaatgagtttgctaaatttcacaagttttttatcagagggaacaggtatagcaattgtaggaggtttattgtcactacaattgattaatcgtaaactagttctggaatttataaattattcttctggagtgtatagtaatattcttgtagccatggctatccttattattttatgttgtcttttgacgattattgtatttaaacgttctgaaaagcagtttgaatag

SEQ ID NO: 421149 - DNA, 855 bp, Staphylococcus aureus; identical to SEQ ID NO: 421148

SEQ ID NO: 421150 - DNA, 297 bp, Staphylococcus aureus
gtgcaatatggaaagtttaaaaatttcgaaaaatacaaaaatggtgagttttcatataatcctgaagcaccaatctattcggctaaatatcaattacacaacgatgattacaatgtaaggcaactacgtaaaagatatgacatttcaacaaaagaaacaccgaagttacttttgaaaggtggaggagatttaaaaaattcctcagttggtcaaaacgatattgaatttacttttgttgaaagaaaaggtgagaatatttattttaacgatagtgttgaattcataccaagtaagtaa

SEQ ID NO: 421151 - DNA, 786 bp, Staphylococcus aureus
ttgatcttaccttatttatgggtacttgtcgttttagtatttttagaaggcttattagcagcagataacgcgattgttatggctgtaatggttaagcacttaccacccgaacaacgtaaaaaagctttgttttacggtttgttaggtgcatttgtatttagatttttagcattattcttaattagtattatcgcgaacttttggtttattcaagctgcaggagcggtttacttaatttatatgtcaatcaaaaatctgtggcagttctttaaacacccagaaattgaaagtcctgaagctggagatgatcatcattatgatgaatctggtgaagagattaaagcaagtaacaaatcattctggggaactgtgttgaaaatagaatttgcagatatcgcatttgccattgattctatgcttgctgctttagctattgctgtaacacttcctaaagttggtattcactttggtggtatggacttaggtcagttcgtagtcatgttcctaggtggaatgattggtgttattctaatgcgttatgcagcaacatggtttgtagagctattaaacaaatatccaggacttgaaggtgcagccttcgcgatcgttggttgggtaggtgttaaattagttgtcatggtattagcgcacccagacatcgctgtattgcctgagcacttcccacatggcgtattatggcaatctattttctggacagtactaattggattagtaattatcggttggttaggttcagttgttaaaaataaaaaatcgcataaataa

SEQ ID NO: 421152 - DNA, 378 bp, Staphylococcus aureus
gtgacgcttaagaaagaaaaagaaactgagattatcacgccacaaatctcacaaatgccagttgaagctgcggcaatgcctatgcctcaagtacaatcaactgatagcaataaaactgaagctccaaagccaacttcagataatcacaaaacaattaatgcacctatggtaggtacattttacaaatcgccatctccagatgaagaagcatatgtgcaagttggggacactgtttcaaatgaaacaacagtgtgtattttagaggcaatgaaactatttaatgaaattcaagcagaaatttcaggtgaaattgttgaaatcttagtagaagacggacaaatggtagagtatggccaaccgttatttaaggtgaaataa

SEQ ID NO: 421153 - DNA, 189 bp, Staphylococcus aureus
atgttattgagtgatgaagaagaatggggaaagcttcacagaaattctagaacaaaatataagaatttgataaaagaaatttcgccagtcgatttaacggacttaatgaaatcgactttaaaagcgaacgaaaaacaattgcaaaaacaaatcgatttttggcaacatgaatttaaattttggaaatag

SEQ ID NO: 421154 - DNA, 396 bp, Staphylococcus aureus
ttgtttagtttatataaaaaatttaaaggtttgttttatagcgttttattttggctttgtattctttcattttttagtgtattaaatgaaatggttttaaatgtttctttacctgatattgcaaatcattttaatactactcctggaattacaaactgggtaaacactgcatatatgttaactttttcgataggaacagcagtatatggaaaattatctgattatataaatataaaaaaattgttaattataggtattagtttgagctgtcttggttcattgattgcttttattggtcacaatcacttttttattttgatttttggtaggttagtacaaggagtaggatctgtctcttatacacatctgacgctgccgacgaatagagaggtgtag

SEQ ID NO: 421155 - DNA, 189 bp, Staphylococcus aureus; identical to SEQ ID NO: 421153

SEQ ID NO: 421156 - DNA, 534 bp, Staphylococcus aureus
atgaaaactatttatcatgtaaatgtagcgacaataggtaatagtgttatttttcctggaaccatgagtgttattgtttttggttattttggtggttttttagtggatagaaaaggatcattatttgtttttattttaggatcattgtctatctctataagttttttaactattgcattttttgttgagtttagtatgtggttgactacttttatgtttatatttgttatgggcggattatcttttactaaaacagttatatcaaaaatagtatcaagtagtctttctgaagaagaagttgcttctggaatgagtttgctaaatttcacaagttttttatcagagggaacaggtatagcaattgtaggaggtttattgtcactacaattgattaatcgtaaactagttctggaatttataaattattcttctggagtgtatagtaatattcttgtagccatggctatccttattattttatgttgtcttttgacgattattgtatttaaacgttctgaaaagcagtttgaatag

SEQ ID NO: 421157 - DNA, 141 bp, Staphylococcus aureus
atgtcatattccattattagaattgctaaagtgaaatcaaaaacgaatacaagaggtattcaaaaacacgtccaaagacaaaataaaaattacgaaaatctggatattgatttggaaaattcatatttaaattatgattga

SEQ ID NO: 421158 - DNA, 132 bp, Staphylococcus aureus
atgaaaattgcaattgctggatcgggtgcattaggtagtggctttggtgcaaactatttcaagcaggatatgatgtcacacttattgacggatatacatctcatgttgaagcggttaagcaacatggattaa

SEQ ID NO: 421159 - DNA, 762 bp, Staphylococcus aureus
atgtatcattttaatgatcaacgggacgaaagcatttacgatgttgtctttctatttccaaagtctatgcaattaaaagaagtgatggaagatatgaagccacatattgataatgaaacgatcgtcgtatgtacgatgaatggtctgaagcatgaagaagtcattgcgcagtatgttgctcaatcacaaattgtcagaggtgttacgacttggacggcaggtcttgaaagccctggacacagtcatttacttggtagtggaccagttgaaataggtgaactagtggatgaaggtaaagaaaatgttataaaagttgctgatttacttaacgaagcggaattgaatggtgtcattagtaaagatttataccaatcgatttggaaaaagatttgtgttaatggtacggcaaatgcattaagcacagtgttggagtgtaatatggcatcactgaatgaaagtagttatgcgaagtgtttgatttataaattaacgcaagaaatagtgcatgtagcgacgattgataatgttcatttaaatgttgatgaagtatttgaatatttagttgatttaaatgaaaaagttggtgcgcattatccatccatgtatcaagatttaattgttaataatagaaaaactgaaattgattatattaatggcgcagttgcaacattgggtaaacaacgtcatattgaagcgccagtcaatcgctttattactgatttaattcatactaaagaaagtcagcgacacgcacaggattaa

SEQ ID NO: 421160 - DNA, 444 bp, Staphylococcus aureus
atgagtaaaaaatttagcgatattgaaagaaatgatattaatgctaaatggttcgatgaaattgaaaaacttgaagaaaagttaaacgaagatttaactaaaagagaaaagaaaaaaatagaaaaagaaattacaaaaaataagaaatatatagaaaaatcagccttttggcaaaacttagctgataaagctgaaactaccggtaacaaattacaaaatgtaggtggtaaaatgcaaaaagttggcttaaaaacaacagcagccgtatggacgccggcgttatacggcgcttataaagttggtaaatcattaaagaataaacctaaagaagatgatttgataaaatttataaaagaatgtcaaacagcttataaagatggaaaaataactgagaatgaaatgaaagagcatattttaacttttacaaataattactataaataa

SEQ ID NO: 421161 - DNA, 456 bp, Staphylococcus aureus
ttgaaaaaattatgttcattaattgtagtagcattaatttgtatcattgcattatcagcttgtggtaaagaacaaaccaaaacatatgaaggtggtgttagtggtaaacatgtactaacttctatcacatataaagatgataaggttttaaaacagtctacaatcaacacaattaaatatgacgatctaggtatggataaagacgaagccaaaaagttattcgccaaatctgaaagtattttcaaagaccttaaaggcgtaaaatacaaagtagactataaagataaaaaagcaattgaacacttagacatagattacacagaagttgacatgaaaaaattaaataaacgtcttggtgtttcaactaaagaaaataaagatattagttttgaaaaacttgaaaagcaattaaagcacagaggtttaaaagaaaaagataaaatggacgacaaatag

SEQ ID NO: 421162 - DNA, 456 bp, Staphylococcus aureus; identical to SEQ ID NO: 421161

SEQ ID NO: 421163 - DNA, 768 bp, Staphylococcus aureus; identical to SEQ ID NO: 408060

SEQ ID NO: 421164 - DNA, 1539 bp, Staphylococcus aureus; identical to SEQ ID NO: 408058

SEQ ID NO: 421165 - DNA, 423 bp, Staphylococcus aureus; identical to SEQ ID NO: 408057

SEQ ID NO: 421166 - DNA, 420 bp, Staphylococcus aureus; identical to SEQ ID NO: 408056

SEQ ID NO: 421167 - DNA, 282 bp, Staphylococcus aureus; identical to SEQ ID NO: 404922

SEQ ID NO: 421168 - DNA, 192 bp, Staphylococcus aureus; identical to SEQ ID NO: 404921

SEQ ID NO: 421169 - DNA, 1305 bp, Staphylococcus aureus; identical to SEQ ID NO: 420305

SEQ ID NO: 421170 - DNA, 291 bp, Staphylococcus aureus
ttgtttaaaagcaataaactcgattctgaggcccaaattaaacctatcagtcgtgtacaggcttatcgaattcttaatcattcagcaaaatcaatcggtttaagtgaaattggtacacacccgatgcgtaaaacctttggttaccattactacaagaaaacaaaggatgtggctttgttgatggatttatttaatcattcttctcaggttgttaaattgaggtatgttggaatcagtcaagaagttataaattcttcaataagtgaaacaatgcaaaatgtctattattaa

SEQ ID NO: 421171 - DNA, 204 bp, Staphylococcus aureus
atgacaaatttctatccacatcaatttgcttccgcatatattcaaacgctcccacatgctaaaaagttggaagaattcaataatagatctgattatcaggagtatttgaataaacgtcgtcaagtttatttccgtcaatatattgaagcaatagaattcgctgaaagttcaggtgaatcacttaatgaaactgataacggataa

SEQ ID NO: 421172 - DNA, 393 bp, Staphylococcus aureus
ttgaaagaggctaatattatcgataaaacagataatgaaaatgtcaaagtgacttataaattaccaaatggcggtgaaaacagtattgaaggtaccgccaatttaaatgaacttagcaattctaataacaaaccgattaataccgatagtgttaaaagaattgatttgtcaagaataaatccaaacggaaataggtttgacgcaaatgatgcatggaaaaaattaactgacaaattaaaagagaaacaaatcgttaaaaacggcgacacagtaactatccatagtaaagataaaaatgatcccccaatttcagctaaagttggtgatgactataatgatcataaacaattgatgttatttaaaaaggatatagataacatcacgataaactaa

SEQ ID NO: 421173 - DNA, 636 bp, Staphylococcus aureus
gtgtgcttacctgcatctgagtctgaatcactgtctgaatctgagtcgctatctgagtctgaatcgctgtccgaatctgagtcactatctgagtctgaatcgctgtctgaatctgagtcgctatctgagtctgagtcgctatctgaatctgaatcactgtctgagtctgagtcgctgtccgaatctgagtcgctgtctgaatctgaatcgctatctgagtctgagtctgaatcgctatctgaatctgagtcgctgtctgaatctgaatcactgtctgaatctgaatcgctgtctgaatctgaatcgctatctgagtctgagtcgctatctgagtctgaatcgctgtctgagtctgagtcgctatctgagtctgaatcgctgtccgaatctgagtcgctatctgagtctgagtcgctgtctgaatctgaatcgctgtctgagtctgaatcgctatctgaatctgaatcgctatctgagtctgagtcactatctgagtctgagtcgctgtctgaatctgaatcactatctgaatctgaatcactatctgaatctgaatcactatctgagtctgaatcgctgtctgagtctgaatcgctgtccgaatctgagtcgctatctgatgtttcttcttcgtag

SEQ ID NO: 421174 - DNA, 552 bp, Staphylococcus aureus
atgaaatatataaataaattcaatgaagaaaatcctaatgcatttatagatgaaaacaataataagctttatatgatagagttattagaacctttaccatttcttgaaaagattagtaagttaacaacagtcaaaagtattaaaattaatccttcaaaaacaataattgaagatgaaaaagataataatatttttgatgatttgaaacaaaatttagataaaaataatgttggagaatatcagacagagattaaacttactaaatttaaaaataagaaacttactaatgaattaaaaaattttattgaatatttagcaaaaagtaaaaaatatgaagatatcgctgtggaaggaaatgtaagtaataattatcctaaaaaaattactgaagattcaacaactagagacttttatgtaaaaaacgaagttgatgtaaaaggttttccgaaagaacaacaattatttcaaaatattcaaagagttattgaagaagaggatcaattgaatgttgacaactctcaatataaagagattaaaggggtaaaattatag

SEQ ID NO: 421175 - DNA, 213 bp, Staphylococcus aureus; identical to SEQ ID NO: 408503

SEQ ID NO: 421176 - DNA, 219 bp, Staphylococcus aureus
gtgaacaaattgtataaaacaaccctcctcatcacaatggcagttgtgacgtggaaggtttggaagattgagaagcacactagaaaacctgtgattagtagcagggcgttgagtgactatctaaacaacaaatctttaaccataccgaaagatgctgaaaattctactgaatctgctcgttgccttttgaagtttgccgaacaaactattagcaaataa

SEQ ID NO: 421177 - DNA, 609 bp, Staphylococcus aureus
gtgcaaaattatcgaaaagtaagtgatcgtaataaggctgatgcattaaaagctataactgctttaaaattacaaatggatgaagaattaaaaacagcacgcactaatgctgatgttgatgcagttttaaaacgatttaatgttgcattaggcgatatagaagcagtaattactgaaaaagaaaatagcttactgcgcattgataacattgctcaacaaacatatgcgaaatttaaagcgatcgcaacaccagaacaattagctaaagtaaaagcattaattgatcaatatgttgcagatggcaatagaatgattgatgaagatgcgacattaaatgatatcaaacaacatacgcaattcattgttgatgaaattttagcaattaaattaccagctgaagcgacgaaagtatcaccaaaagtaattcagtcagctccaaaagtttgtacgcctattaaaaaagaagagacacatgaatcgcgcaaagttgaaaaagaacttccaaatacaggttctgaaggaatggatttaccattgaaagaatttgcactgattacaggtgcagctttgttagctagaagacgtactaaaaacgaaaaagaatcataa

SEQ ID NO: 421178 - DNA, 339 bp, Staphylococcus aureus
atgaaatggttcaaattaatacttgatgttacaatcttcattctgattgctatattgttatttgtttatacatataaagaaaaccaagaaatattgcctgatactaaataccctatagcggtaactgactggaataaaaaatatagtaaaaatgagatttataaacgtataaatcagttcgctaaaaaagagaacgtagcaatctataaatcaacttcaaattatacaaacaaaaatgtagataaagatatatatgtatttaataaatcaaaagcaacaactatcactccttttaatgctaaatataacattcattatttaagtgatgacgaattataa

SEQ ID NO: 421179 - DNA, 303 bp, Staphylococcus aureus
atggctacaataaaccaaagtattgcagatacaaagttgtataataacgcagcaataatcgcatatacaactaatatgataccttttaaaattcttcttttagataagtcaaatgctagtacagtaacaggtaagactgaaaatataattagacatgtagcaaatatcataaatgaagtgggtgtttttaataaatctccaatttcattacctgttaacaaaaataaaaatccaaaaaatgatccaaaaaataatgtaaatatatatatgagcaaagctataatagccatgtatgctatttga

SEQ ID NO: 421180 - DNA, 555 bp, Staphylococcus aureus
ttggctttaaaagatttatttagtggattttttgtaatagatgatgaagaggaagtagaagtacctgacaaacaacaacaggtaaatgaagcgccagcaaaagagcagtcacaacaaacaacaaaacaaaacgcaatcaaatcagtccctcaaaaatctgcatcaagatatacaacaacgtcagaagaaaggaataaccgtatgtctaattattcaaaaaataattcacgtaatgttgtaactatgaacaatgctacaccaaacaatgcatcacaagaaagttcaaaaatgtgtttattcgaaccacgtgttttttcagatacacaagatattgctgatgagcttaaaaaccgccgagcgacacttgtcaatttacaacgtattgataaagtatcagcgaaaagaattattgattttttaagcggtactgtttatgcaatcggtggagatatccaacgtgtaggtactgatattttcttatgtacgcctgataatgtggaagtagctggaagcattacagaccatattgaaaatatggaacattcattcgactaa

SEQ ID NO: 421181 - DNA, 201 bp, Staphylococcus aureus
atgattatgactgtggttctggattttttatattattcactatctaaccaacaacttgtatcaaacaaaaccattttgaaccaaaaacataatcaacatcataacccagcaggagttgactatggggccccaacatggagaatttcgaaaagaaattctacagacaatgcaagttgggctgggccccaacatagaagctga

SEQ ID NO: 421182 - DNA, 225 bp, Staphylococcus aureus
atgactaaaacacttgaattaagttttaaatcttcactagacaagcctgtaaaactgcaattaccacaattaaacaacgtagtgaccgagcaagttgcacgtgatagtatgaatgcgttagtagatttaaatattataaagtcaaatagtggtactatcaccaaagtacattctgctcaaattattgataaaacaacaactgttttatttgaagataagaaatag

SEQ ID NO: 421183 - DNA, 612 bp, Staphylococcus aureus
atggctaaagaaattgcaaaatcattattagatattgaagctgtaacattatcaccaaatgatttatatacatggagttcaggtattaaatcaccgatttactgtgataaccgtgttacgttaggttatcctttagttcgaggcgcaatccgcgatggtttaattaacttaattaaagaacactttcctgaagtagaagttatttctggtactgcaacagctggtattccacatgcagcttttattgctgaaaaattaaaattaccaatgaattatgttcgttcatcaaataagagtcatggtaagcaaaatcaaattgaaggtgctaaaagtgaaggtaaaaaagtagttgtgatagaagatttaatttcgacagggggatcttcagtcacagcagttgaagccttaaaacaagcaggtgcagaagtattaggtgttgtagctatctttacttacggtttgaaaaaagcagatgatacatttagcaatattcaactacctttttacactttaagtgattataatgaattaattgaagtggctgaaaatgaaggtaaaatttctagtgaagatatccaaacattagttgaatggagagacaacttagcataa

SEQ ID NO: 421184 - DNA, 672 bp, Staphylococcus aureus
atggataataatgaaaaagaaaaaagtaaaagtgaactattagttgtcacaggtttatctggtgcaggtaaatctttggttattcaatgtttagaagacatgggatatttttgtgtagataatctaccaccagtgttattgcctaaatttgtagagttgatggaacaaggaaatccatccttaagaaaagtggcaattgcaattgatttaagaggtaaggaactatttaattcattagttgcagtagtggataaagtcaaaagtgaaagtgacgtcatcattgatgttatgtttttagaagctagtactgaaaaattaatttcaagatataaggaaacgcgtcgtgcacatcctttgatggaacaaggtaagagatcgttaatcaatgcaattaatgaagagcgagagcatttgtctcaaattagaagtatagctaattttgttatagatactacaaagttatcacctaaagaattaaaagaacgcattcgtcgatactatgaagatgaagagtttgaaacttttacaattaatgtcacaagtttcggttttaaacatgggattcagatggatgcagatttagtatttgatgtacgatttttaccaaatccatattatgtagtagatttaagacctttaacaggattagatctgtctcttatacacatctga

SEQ ID NO: 421185 - DNA, 240 bp, Staphylococcus aureus
atgaaatggaaagagacagagattttctttgaaaaattaactgatttgttagattttatgatacccgggtataaaaaagaagggaaatctcaattagtaattgccatcggttgtacgggtggacaacatagatctgtagcattagcagaacgactaggtaattatctaaatgaagtatttgaatataatgtttatgtgcatcatagggacgcacatattgaaagtggcgagaaaaaatga

SEQ ID NO: 421186 - DNA, 207 bp, Staphylococcus aureus
ttgaaaaataatttaagcatgttgatggggaaagaaagaattaatgcgtcgaaattaagcaaagaaactggaatttcaagaacaacaatttatggtttatatcatgaaaaaactgaaagtccagacacgaaaacagtactaacgttatgtgactactttggaataactcttaatgagttttttggtattgaaaaaaaggaggtataa

SEQ ID NO: 421187 - DNA, 261 bp, Staphylococcus aureus
atgtattacgaaataggcgatatcatacgcaaaaatattcatgttaacggattcgattttaagctattcattttaaaaggtcatatgggcatatcaatacaagttaaagatatgaacaacgtaccaattaaacatgcttatgtcgtagatgagaatgacttagatatggcatcagacttattcaaccaagcgatagatgaatggattgaagagaacacagatgaacaggacagactaattaacttagtcatgaaatggtag

SEQ ID NO: 421188 - DNA, 348 bp, Staphylococcus aureus
atgaataaaaatatagtcattaaaagcatggcagcattagccattctaacctcagtaactggaataaatgctgcagtcgttgatgagacacaacaaatagcaaatgcagagaagaatgttacgcaagttaaagatacaaatgtttttccatataatggcgtcgtttcatttaaagatgcgacaggttttgtaattggaaaaatacaattatcaccaataaacatgtatcaaaagactataaagttggcgatagaattactgcccacccaaatggcgacaaaggcaacggtggcatttataaaattaaaaatatttctgattatccaggtaatgaggatatatcagtaa

SEQ ID NO: 421189 - DNA, 1416 bp, Staphylococcus aureus
ttgccactcattttttgcgttagcaaaaacaggtttaagcctcgcagagcacacgtattaacgacttattgtaaaataagtctagtgtgttattatactttaataaataaagctacgcaaaatcatgtgcagtggaggtcatttattatgtcatattccattattagaattgctaaagtgaaatcaaaaacgaatacaagaggtattcaaaaacacgtccaaagacaaaataaaaattacgaaaatctggatattgatttggaaaattcatatttaaattatgatttagtgaatgataacttgatcgatttcaatcaaaaaattgatgagaaaattgaacagaattataaaggtgaacgtaaaatcagaaaagatgctgtaaaacatattgatggtttgattacatcagacaatagcttttttgaacaattaacaccagaagaaacaaagatgttttttgagcacgccaagtcatttttagaacaagaatacggaaaagataatttactttatgcaacggtgcatatggacgaattaacgcctcatatgcattatggtgttgtaccgataacaaaagatggacgattgagtgcgaaagaagtggtaggtaataaaaaagcgctgacggaatttcaagatagatttaatgaatatatcaatagctgtggttatgaattgagtagaggtatatcaagaaaattaatgccgagacaacatgagcaagtgagtcgatataaacagttaacagattatcacaaagaagaatacgagcgtcagagccaaaaattggaccatataaagcaagaaagcaaggaagtaatggaaaagtaccaaaacgctttaaacgttcttaaaacccctttaaatatcccgtataagatcgaaacggaaaaagtaggtggattattcagcaaagaaacacaagaaacaggcaacgtcgttatagataaaaacgagtttgaatcattgcaggagcaagttacagcgtcacagctgattattaaagattatgaatatatcaaagaaggattagcattaaaagaggcgaaacaaagatgtaaacagttagatagtgagctgagagaagagcatctgaaaaatgaggaattagtcgatgactataataatttagctgatagctataatgatttgttagagcagaataaagaaaaagataaagcattgaatcaatcatataatttattcaacaatgtatttagattgattaaaggtgtgatgaaagaagaagcatatcataggttgatcgattatattgataatcacttagagagttcaaaaatgcgagaaacaatgattgtagatgacaacgatgaacagttctttaagaaaaagtatcagagacaagaaccagaaattatttttgaagatgaacgagatgatggctactctttataa

SEQ ID NO: 421190 - DNA, 1380 bp, Staphylococcus aureus; identical to SEQ ID NO: 412597

SEQ ID NO: 421191 - DNA, 1380 bp, Staphylococcus aureus; identical to SEQ ID NO: 412597

SEQ ID NO: 421192 - DNA, 1416 bp, Staphylococcus aureus; identical to SEQ ID NO: 421189

SEQ ID NO: 421193 - DNA, 1380 bp, Staphylococcus aureus
ttgtttagtttatataaaaaatttaaaggtttgttttatagcgttttattttggctttgtattctttcattttttagtgtattaaatgaaatggttttaaatgtttctttacctgatattgcaaatcattttaatactactcctggaattacaaactgggtaaacactgcatatatgttaactttttcgataggaacagcagtatatggaaaattatctgattatataaatataaaaaaattgttaattattggtattagtttgagctgtcttggttcattgattgcttttattggtcacaatcacttttttattttgatttttggtaggttagtacaaggagtaggatctgctgcattcccttcactggttatggtggttgtagctagaaatattacaagaaaaaaacaaggcaaagcctttggttttataggatcaattgtagctttaggtgaagggttaggtccttcaatagggggaataatagcacattatattcattggtcttacctacttatacttcctatgattacaatagtaactataccttttcttattaaagtaatggtacctggtaaatcaacaaaaaatacattagatatcgtaggtattgttttaatgtctataagtattatatgttttatgttatttacgacaaattataattggacttttttaatactcttcacaatcttttttgtgatttttattaaacatatttcaagagtttctaacccttttattaatcctaaactagggaaaaacattccgtttatgcttggtttgttttctggtgggctaatattttctatagtagctggttttatatcaatggtgccttatatgatgaaaactatttatcatgtaaatgtagcgacaataggtaatagtgttatttttcctggaaccatgagtgttattgtttttggttattttggtggttttttagtggatagaaaaggatcattatttgtttttattttaggatcattgtctatctctataagttttttaactattgcattttttgttgagtttagtatgtggttgactacttttatgtttatatttgttatgggcggattatcttttactaaaacagttatatcaaaaatagtatcaagtagtctttctgaagaagaagttgcttctggaatgagtttgctaaatttcacaagttttttatcagagggaacaggtatagcaattgtaggaggtttattgtcactacaattgattaatcgtaaactagttctggaatttataaattattcttctggagtgtatagtaatattcttgtagccatggctatccttattattttatgttgtcttttgacgattattgtatttaaacgttctgaaaagcagtttgaatag

SEQ ID NO: 421194 - DNA, 1416 bp, Staphylococcus aureus; identical to SEQ ID NO: 421189

SEQ ID NO: 421195 - DNA, 1380 bp, Staphylococcus aureus; identical to SEQ ID NO: 412597

SEQ ID NO: 421196 - DNA, 1416 bp, Staphylococcus aureus
ttgccactcattttttgcgttagcaaaaacaggtttaagcctcgcagagcacacgtattaacgacttattgtaaaataagtctagtgtgttattatactttaataaataaagctacgcaaaatcatgtgcagtggaggtcatttattatgtcatattccattattagaattgctaaagtgaaatcaaaaacgaatacaagaggtattcaaaaacacgtccaaagacaaaataaaaattacgaaaatctggatattgatttggaaaattcatatttaaattatgatttagtgaatgataacttgatcgatttcaatcaaaaaattgatgagaaaattgaacagaattataaaggtgaacgtaaaatcagaaaagatgctgtaaaacatattgatggtttgattacatcagacaatagcttttttgaacaattaacaccagaagaaacaaagatgttttttgagcacgccaagtcatttttagaacaagaatacggaaaagataatttactttatgcaacggtgcatatggacgaattaacgcctcatatgcgttatggtgttgtaccgataacaaaagatggacgattgagtgcgaaagaagtggtaggtaataaaaaagcgctgacggaatttcaagatagatttaatgaatatatcaatagctgtggttatgaattgagtagaggtatatcaagaaaattaatgccgagacaacatgagcaagtgagtcgatataaacagttaacagattatcacaaagaagaatacgagcgtcagagccaaaaattggaccatataaagcaagaaagcaaggaagtaatggaaaagtaccaaaacgctttaaacgttcttaaaacccctttaaatatcccgtataagatcgaaacggaaaaagtaggtggattattcagcaaagaaacacaagaaacaggcaacgtcgttatagataaaaacgagtttgactcattgcaggagcaagtttcagcgtcacagcttattattaaagattatgaatatatcaaagaaggagtagcattaaaagaggcgaaacaaagatgtaaacagttagatagtgagctgagagaagagcatctgaaaaatgaggaattagtcgatgactataataatttagctgatagctataatgatttgttagagcagaataaagaaaaagataaagcattgaatcaatcatataatttattcaacaatgtatttagattgattaaaggtgtgatgaaagaagaagcatatcataggttgatcgattatattgataatcacttagagagttcaaaaatgcgagaaacaatgattgtagatgacaacgatgaacagttctttaagaaaaagtatcagagacaagaaccagaaattatttttgaagatgaacgagatgatggctactctttataa

SEQ ID NO: 421197 - DNA, 1380 bp, Staphylococcus aureus; identical to SEQ ID NO: 412597

SEQ ID NO: 421198 - DNA, 1416 bp, Staphylococcus aureus
ttgccactcattttttgcgttagcaaaaacaggtttaagcctcgcagagcacacgtattaacgacttattgtaaaataagtctagtgtgttattatactttaataaataaagctacgcaaaatcatgtgcagtggaggtcatttattatgtcatattccattattagaattgctaaagtgaaatcaaaaacgaatacaagaggtattcaaaaacacgtccaaagacaaaataaaaattacgaaaatctggatattgatttggaaaattcatatttaaattatgatttagtgaatgataacttgatcgatttcaatcaaaaaattgatgagaaaattgaacagaattataaaggtgaacgtaaaatcagaaaagatgctgtaaaacatattgatggtttgattacatcagacaatagcttttttgaacaattaacaccagaagaaacaaagatgttttttgagcacgccaagtcatttttagaacaagaatacggaaaagataatttactttatgcaacggtgcatatggacgaattaacgcctcatatgcattatggtgttgtaccgataacaaaagatggacgattgagtgcgaaagaagtggtaggtaataaaaaagcgctgacggaatttcaagatagatttaatgaatatatcaatagctgtggttatgaattgagtagaggtatatcaagaaaattaatgccgagacaacatgagcaagtgagtcgatataaacagttaacagattatcacaaagaagaatacgagcgtcagagccaaaaattggaccatataaagcaagaaagcaaggaagtaatggaaaagtaccaaaacgctttaaacgttcttaaaacgcctttaaatatcccgtataagatcgaaacggaaaaagtaggtggattattcagcaaagaaacacaagaaacaggcaacgtcgttatagataaaaacgagtttgaatcattgcaggagcaagttacagcgtcacagctgattattaaagattatgaatatatcaaagaaggattagcattaaaagaggcgaaacaaagatgtaaacagttagatagtgagctgagagaagagcatctgaaaaatgaggaattagtcgatgactataataatttagctgatagctataatgatttgttagagcagaataaagaaaaagataaagcattgaatcaatcatataatttattcaacaatgtatttagattgattaaaggtgtgatgaaagaagaagcatatcataggttgatcgattatattgataatcacttagagagttcaaaaatgcgagaaacaatgattgtagatgacaacgatgaacagttctttaagaaaaagtatcagagacaagaaccagaaattatttttgaagatgaacgagatgatggctactctttataa

SEQ ID NO: 421199 - DNA, 1416 bp, Staphylococcus aureus
ttgccactcattttttgcgttagcaaaaacaggtttaagcctcgcagagcacacgtattaacgacttattgtaaaataagtctagtgtgttattatactttaataaataaagctacgcaaaatcatgtgcagtggaggtcatttattatgtcatattccattattagaattgctaaagtgaaatcaaaaacgaatacaagaggtattcaaaaacacgtccaaagacaaaataaaaattacgaaaatctggatattgatttggaaaattcatatttaaattatgatttagtgaatgataacttgatcgatttcaatcaaaaaattgatgagaaaattgaacagaattataaaggtgaacgtaaaatcagaaaagatgctgtaaaacatattgatggtttgattacatcagacaatagcttttttgaacaattaacaccagaagaaacaaagatgttttttgagcacgccaagtcatttttagaacaagaatacggaaaagataatttactttatgcaacggtgcatatggacgaattaacgcctcatatgcattatggtgttgtaccgataacaaaagatggacgattgagtgcgaaagaagtggtaggtaataaaaaagcgctgacggaatttcaagatagatttaatgaatatatcaatagctgtggttatgaattgagtagaggtatatcaagaaaattaatgccgagacaacatgagcaagtgagtcgatataaacagttaacagattatcacaaagaagaatacgagcgtcagagccaaaaattggaccatataaagcaagaaagcaaggaagtaatggaaaagtaccaaaaagctttaaacgttcttaaaacccctttaaatatcccgtataagatcgaaacggaaaaagtaggtggattattcagcaaagaaacacaagaaacaggcaacgtcgttatagataaaaacgagtttgaatcattgcaggagcaagttacagcgtcacagctgattattaaagattatgaatatatcaaagaaggattagcattaaaagaggcgaaacaaagatgtaaacagttagatagtgagctgagagaagagcatctgaaaaatgaggaattagtcgatgactataataatttagctgatagctataatgatttgttagagcagaataaagaaaaagataaagcattgaatcaatcatataatttattcaacaatgtatttagattgattaaaggtgtgatgaaagaagaagcatatcataggttgatcgattatattgataatcacttagagagttcaaaaatgcgagaaacaatgattgtagatgacaacgatgaacagttctttaagaaaaagtatcagagacaagaaccagaaattatttttgaagatgaacgagatgatggctactctttataa

SEQ ID NO: 421200 - DNA, 1380 bp, Staphylococcus aureus; identical to SEQ ID NO: 412597

SEQ ID NO: 421201 - DNA, 1416 bp, Staphylococcus aureus
ttgccactcattttttgcgttagcaaaaacaggtttaagcctcgcagagcacacgtattaacgacttattgtaaaataagtctagtgtgttattatactttaataaataaagctacgcaaaatcatgtgcagtggaggtcatttattatgtcatattccattattagaattgctaaagtgaaatcaaaaacgaatacaagaggtattcaaaaacacgtccaaagacaaaataaaaattacgaaaatctggatattgatttggaaaattcatatttaaattatgatttagtgaatgataacttgatcgatttcaatcaaaaaattgatgagaaaattgaacagaattataaaggtgaacgtaaaatcagaaaagatgctgtaaaacatattgatggtttgattacatcagacaatagcttttttgaacaattaacaccagaagaaacaaagatgttttttgagcacgccaagtcatttttagaacaagaatacggaaaagataatttactttatgcaacggtgcatatggacgaattaacgcctcatatgcatgatggtgttgtaccgataacaaaagatggacgattgagtgcgaaagaagtggtaggtaataaaaaagcgctgacggaatttcaagatagatttaatgaatatatcaatagctgtggttatgaattgagtagaggtatatcaagaaaattaatgccgagacaacatgagcaagtgagtcgatataaacagttaacagattatcacaaagaagaatacgagcgtcagagccaaaaattggaccatataaagcaagaaagcaaggaagtaatggaaaagtaccaaaacgctttaaacgttcttaaaacccctttaaatatcccgtataagatcgaaacggaaaaagtaggtggattattcagcaaagaaacacaagaaacaggcaacgtcgttatagataaaaacgagtttgaatcattgcaggagcaagttacagcgtcacagctgattattaaagattatgaatatatcaaagaaggattagcattaaaagaggcgaaacaaagatgtaaacagttagatagtgagctgagagaagagcatctgaaaaatgaggaattagtcgatgactataataatttagctgatagctataatgatttgttagagcagaataaagaaaaagataaagcattgaatcaatcatataatttattcaacaatgtatttagattgattaaaggtgtgatgaaagaagaagcatatcataggttgatcgattatattgataatcacttagagagttcaaaaatgcgagaaacaatgattgtagatgacaacgatgaacagttctttaagaaaaagtatcagagacaagaaccagaaattatttttgaagatgaacgagatgatggctactctttataa

SEQ ID NO: 421202 - DNA, 1380 bp, Staphylococcus aureus; identical to SEQ ID NO: 412597

SEQ ID NO: 421203 - DNA, 135 bp, Staphylococcus aureus
atgaccccacacaaaaacattttcgaagccttgaaatatctggctttgccagattccccattcattgatggggataaatttcccttatgctcttacggagattttagagttaaattaaaatttctaagtttttga

SEQ ID NO: 421204 - DNA, 222 bp, Staphylococcus aureus
atgactatcaaacagattgtgaatgatttattgaataaaaaatggtctttagaagatttgttttggttaattttcatgtgtgtaatatttagtacttttactacaccatttttaggtattccgattggagttattgcttattttttctttttttataaagatgatgatgatgttgatgagatagcagaaaaatatgattatcaagacgagaataagaaatag

SEQ ID NO: 421205 - DNA, 618 bp, Staphylococcus aureus; identical to SEQ ID NO: 407393

SEQ ID NO: 421206 - DNA, 348 bp, Staphylococcus aureus; identical to SEQ ID NO: 407392

SEQ ID NO: 421207 - DNA, 135 bp, Staphylococcus aureus; identical to SEQ ID NO: 421203

SEQ ID NO: 421208 - DNA, 135 bp, Staphylococcus aureus; identical to SEQ ID NO: 421203

SEQ ID NO: 421209 - DNA, 348 bp, Staphylococcus aureus; identical to SEQ ID NO: 407392

SEQ ID NO: 421210 - DNA, 618 bp, Staphylococcus aureus; identical to SEQ ID NO: 407393

SEQ ID NO: 421211 - DNA, 1416 bp, Staphylococcus aureus; identical to SEQ ID NO: 421189

SEQ ID NO: 421212 - DNA, 1380 bp, Staphylococcus aureus; identical to SEQ ID NO: 412597

SEQ ID NO: 421213 - DNA, 1380 bp, Staphylococcus aureus; identical to SEQ ID NO: 412597

SEQ ID NO: 421214 - DNA, 1416 bp, Staphylococcus aureus; identical to SEQ ID NO: 421189

SEQ ID NO: 421215 - DNA, 1380 bp, Staphylococcus aureus; identical to SEQ ID NO: 412597

SEQ ID NO: 421216 - DNA, 1416 bp, Staphylococcus aureus; identical to SEQ ID NO: 421189

SEQ ID NO: 421217 - DNA, 1380 bp, Staphylococcus aureus; identical to SEQ ID NO: 412597

SEQ ID NO: 421218 - DNA, 1416 bp, Staphylococcus aureus
ttgccactcattttttgcgttagcaaaaacaggtttaagcctcgcagagcacacgtattaacgacttattgtaaaatcagtctagtgtgttattatactttaataaataaagctacgcaaaatcatgtgcagtggaggtcatttattatgtcatattccattattagaattgctaaagtgaaatcaaaaacgaatacaagaggtattcaaaaacacgtccaaagacaaaataaaaattacgaaaatctggatattgatttggaaaattcatatttaaattatgatttagtgaatgataacttgatcgatttcaatcaaaaaattgatgagaaaattgaacagaattataaaggtgaacgtaaaatcagaaaagatgctgtaaaacatattgatggtttgattacatcagacaatagcttttttgaacaattaacaccagaagaaacaaagatgttttttgagcacgccaagtcatttttagaacaagaatacggaaaagataatttactttatgcaacggtgcatatggacgaattaacgcctcatatgcattatggtgttgtaccgataacaaaagatggacgattgagtgcgaaagaagtggtaggtaataaaaaagcgctgacggaatttcaagatagatttaatgaatatatcaatagctgtggttatgaattgagtagaggtatatcaagaaaattaatgccgagacaacatgagcaagtgagtcgatataaacagttaacagattatcacaaagaagaatacgagcgtcagagccaaaaattggaccatataaagcaagaaagcaaggaagtaatggaaaagtaccaaaacgctttaaacgttcttaaaacccctttaaatatcccgtataagatcgaaacggaaaaagtaggtggattattcagcaaagaaacacaagaaacaggcaacgtcgttatagataaaaacgagtttgaatcattgcaggagcaagttacagcgtcacagctgattattaaagattatgaatatatcaaagaaggattagcattaaaagaggcgaaacaaagatgtaaacagttagatagtgagctgagagaagagcatctgaaaaatgaggaattagtcgatgactataataatttagctgatagctataatgatttgttagagcagaataaagaaaaagataaagcattgaatcaatcatataatttattcaacaatgtatttagattgattaaaggtgtgatgaaagaagaagcatatcataggttgatcgattatattgataatcacttagagagttcaaaaatgcgagaaacaatgattgtagatgacaacgatgaacagttctttaagaaaaagtatcagagacaagaaccagaaattatttttgaagatgaacgagatgatggctactctttataa

SEQ ID NO: 421219 - DNA, 1380 bp, Staphylococcus aureus; identical to SEQ ID NO: 412597

SEQ ID NO: 421220 - DNA, 1416 bp, Staphylococcus aureus
ttgccactcattttttgcgttagcaaaaacaggtttaagcctcgcagagcacacgtattaccgacttattgtaaaataagtctagtgtgttattatactttaataaataaagctacgcaaaatcatgtgcagtggaggtcatttattatgtcatattccattattagaattgctaaagtgaaatcaaaaacgaatacaagaggtattcaaaaacacgtccaaagacaaaataaaaattacgaaaatctggatattgatttggaaaattcatatttaaattatgatttagtgaatgataacttgatcgatttcaatcaaaaaattgatgagaaaattgaacagaattataaaggtgaacgtaaaatcagaaaagatgctgtaaaacatattgatggtttgattacatcagacaatagcttttttgaacaattaacaccagaagaaacaaagatgttttttgagcacgccaagtcatttttagaacaagaatacggaaaagataatttactttatgcaacggtgcatatggacgaattaacgcctcatatgcattatggtgttgtaccgataacaaaagatggacgattgagtgcgaaagaagtggtaggtaataaaaaagcgctgacggaatttcaagatagatttaatgaatatatcaatagctgtggttatgaattgagtagaggtatatcaagaaaattaatgccgagacaacatgagcaagtgagtcgatataaacagttaacagattatcacaaagaagaatacgagcgtcagagccaaaaattggaccatataaagcaagaaagcaaggaagtaatggaaaagtaccaaaacgctttaaacgttcttaaaacccctttaaatatcccgtataagatcgaaacggaaaaagtaggtggattattcagcaaagaaacacaagaaacaggcaacgtcgttatagataaaaacgagtttgaatcattgcaggagcaagttacagcgtcacagctgattattaaagattatgaatatatcaaagaaggattagcattaaaagaggcgaaacaaagatgtaaacagttagatagtgagctgagagaagagcatctgaaaaatgaggaattagtcgatgactataataatttagctgatagctataatgatttgttagagcagaataaagaaaaagataaagcattgaatcaatcatataatttattcaacaatgtatttagattgattaaaggtgtgatgaaagaagaagcatatcataggttgatcgattatattgataatcacttagagagttcaaaaatgcgagaaacaatgattgtagatgacaacgatgaacagttctttaagaaaaagtatcagagacaagaaccagaaattatttttgaagatgaacgagatgatggctactctttataa

SEQ ID NO: 421221 - DNA, 1380 bp, Staphylococcus aureus; identical to SEQ ID NO: 412597

SEQ ID NO: 421222 - DNA, 1416 bp, Staphylococcus aureus
ttgccactcattttttgcgttagcaaaaacaggtttaagcctcgcagagcacacgtattaacgacttattgtaaaataagtctagtgtgttattatactttaataaataaagctacgcaaaatcatgtgcagtggaggtcatttattatgtcatattccattattagaattgctaaagtgaaatcaaaaacgaatacaagaggtattcaaaaacacgtccaaagacaaaataaaaattacgaaaatctggatattgatttggaaaattcatatttaaattatgatttagtgaatgataacttgatcgatttcaatcaaaaaattgatgagaaaattgaacagaattataaaggtgaacgtaaaatcagaaaagatgctgtaaaacatattgatggtttgattacatcagacaatagcttttttgaacaattaacaccagaagaaacaaagatgttttttgagcacgccaagtcatttttagaacaagaatacggaaaagataatttactttatgcaacggtgcatatggacgaattaacgcctcatatgcattatggtgttgtaccgataacaaaagatggacgattgagtgcgaaagaagtggtaggtaataaaaaagcgctgacggaatttcaagatagatttaatgaatatatcaatagctgtggttatgaattgagtagaggtatatcaagaaaattaatgccgagacaacatgagcaagtgagtcgatataaacagttaacagattatcacaaagaagaatacgagcgtcagagccaaaaattggaccatataaagcaagaaagcaaggaagtaatggaaaagtaccaaaacgctttaaacgttcttaaaacctctttaaatatcccgtataagatcgaaacggaaaaagtaggtggattattcagcaaagaaacacaagaaacaggcaacgtcgttatagataaaaacgagtttgaatcattgcaggagcaagttacagcgtcacagctgattattaaagattatgaatatatcaaagaaggattagcattaaaacaggcgaaacaaagatgtaaacagttagatagtgagctgagagaagagcatctgaaaaatgaggaattagtcgatgactataataatttagctgatagctataatgatttgttagagcagaataaagaaaaagataaagcattgaatcaatcatataatttattcaacaatgtatttagattgattaaaggtgtgatgaaagaagaagcatatcataggttgatcgattatattgataatcacttagagagttcaaaaatgcgagaaacaatgattgtagatgacaacgatgaacagttctttaagaaaaagtatcagagacaagaaccagaaattatttttgaagatgaacgagatgatggctactctttataa

SEQ ID NO: 421223 - DNA, 1380 bp, Staphylococcus aureus
ttgtttagtttatataaaaaatttaaaggtttgttttatagcgttttattttggctttgtattctttcattttttagtgtattaaatgaaatggttttaaatgtttctttacctgatattgcaaatcattttaatactactcctggaattacaaactgggtaaacactgcatatatgttaactttttcgataggaacagcagtatatggaaaattatctgattatataaatataaaaaaattgttaattattggtattagtttgagctgtcttggttcattgattgcttttattggtcacaatcacttttttattttgatttttggtaggttagtacaaggagtaggatctgctgcattcccttcactgattatggtggttgtagctagaaatattacaagaaaaaaacaaggcaaagcctttggttttataggatcaattgtagctttaggtgaagggttaggtccttcaatagggggaataatagcacattatattcattggtcttacctacttatacttcctatgattacaatagtaactataccttttcttattaaagtaatggtacctggtaaatcaacaaaaaatacattagatatcgtaggtattgttttaatgtctataagtattatatgttttatgttatttacgacaaattataattggacttttttaatactcttcacaatcttttttgtgatttttattaaacatatttcaagagtttctaacccttttattaatcctaaactagggaaaaacattccgtttatgcttggtttgttttctggtgggctaatattttctatagtagctggttttatatcaatggtgccttatatgatgaaaactatttatcatgtaaatgtagcgacaataggtaatagtgttatttttcctggaaccatgagtgttattgtttttggttattttggtggttttttagtggatagaaaaggatcattatttgtttttattttaggatcattgtctatctctataagttttttaactattgcattttttgttgagtttagtatgtggttgactacttttatgtttatatttgttatgggcggattatcttttactaaaacagttatatcaaaaatagtatcaagtagtctttctgaagaagaagttgcttctggaatgagtttgctaaatttcacaagttttttatcagagggaacaggtacagcaattgtaggaggtttattgtcactacaattgattaatcgtaaactagttctggaatttataaattattcttctggagtgtatagtaatattcttgtagccatggctatccttattattttatgttgtcttttgacgattattgtatttaaacgttctgaaaagcagtttgaatag

SEQ ID NO: 421224 - DNA, 1416 bp, Staphylococcus aureus; identical to SEQ ID NO: 421189

SEQ ID NO: 421225 - DNA, 1380 bp, Staphylococcus aureus; identical to SEQ ID NO: 412597

SEQ ID NO: 421226 - DNA, 1416 bp, Staphylococcus aureus
ttgccactcattttttgcgttagcaaaaacaggtttaagcctcgcagagcacacgtattaacgacttattgtaaaataagtctagtgtgttattatactttaataaataaagctacgcaaaatcatgtgcagtggaggtcatttattatgtcatattccattattagaattgctaaagtgaaatcaaaaacgaatacaagaggtattcaaaaacacgtccaaagacaaaataaaaattacgaaaatctggatattgatttggaaaattcatatttaaattatgatttagtgaatgataacttgatcgatttcaatcaaaaaattgatgagaaaattgaacagaattataaaggtgaacgtaaaatcagaaaagatgctgtaaaacatattgatggtttgattacatcagacaatagcttttttgaacaattaacaccagaagaaacaaagatgttttttgagcacgccaagtcatttttagaacaagaatacggaaaagataatttactttatgcaacggtgcatatggacgaattaacgcctcatatgcattatggtgttgtaccgataacaaaagatggacgattgagtgcgaaagaagtggtaggtaataaaaaagcgctgacggaatttcaagatagatttaatgaatatatcaatagctgtggttatgaattgagtagaggtatatcaagaaaattaatgccgagacaacatgagcaagtgagtcgatataaacagttaacagattatcacaaagaagaatacgagcgtcagagccaaaaattggaccatataaagcaagaaagcaaggaagtaatggaaaagtaccaaaacgctttaaacgttcttaaaacccctttaaatatcccgtataagatcgaaacggaaaaagtaggtggattattcagcaaagaaacacaagaaacaggcaacgtcgttatagataaaaacgagtttgaatcattgcaggagcaagttacagcgtcacagctgattattaaagattatgaatatatcaaagaaggattagcattaaaagaggcgaaacaaagatgtaaacagttagatagtgagctgagagaagagcatctgaaaaatgaggaattagtcgatgactataataatttagctgatagctataatgatttgttagagcagaataaagaaaaagataaagcattgaatcaatcatataatttattcaacaatgtatttagattgattaaaggtgtgatgaaagaagaagcatatcataggttgatcgattatattgataatcacttagagagttcaaaaatgcgagaaacaatgattgcagatgacaacgatgaacagttctttaagaaaaagtatcagagacaagaaccagaaattatttttgaagatgaacgagatgatggctactctttataa

SEQ ID NO: 421227 - DNA, 1380 bp, Staphylococcus aureus; identical to SEQ ID NO: 412597

SEQ ID NO: 421228 - DNA, 1416 bp, Staphylococcus aureus
ttgccactcattttttgcgttagcaaaaacaggtttaagcctcgcagagcacacgtattaacgacttattgtaaaataagtctagtgtgttattatactttaataaataaagctacgcaaaatcatgtgcagtggaggtcatttattatgtcatattccattattagaattgctaaagtgaaatcaaaaacgaatacaagaggtattcaaaaacacgtccaaagacaaaataaaaattacgaaaatctggatattgatttggaaaattcatatttaaattatgatttagtgaatgataacttgatcgatttcaatcaaaaaattgatgagaaaattgaacagaattataaaggtgaacgtaaaatcagaaaagatgctgtaaaacatattgatggtttgattacatcagacaatagcttttttgaacaattaacaccagaagaaacaaagatgttttttgagcacgccaagtcatttttagaacaagaatacggaaaagataatttactttatgcaacggtgcatatggacgaattaacgcctcatatgcattatggtgttgtaccgataacaaaagatggacgattgagtgcgaaagaagtggtaggtaataaaaacgcgctgacggaatttcaagatagatttaatgaatatatcaatagctgtggttatgaattgagtagaggtatatcaagaaaattaatgccgagacaacatgagcaagtgagtcgatataaacagttaacagattatcacaaagaagaatacgagcgtcagagccaaaaattggaccatataaagcaagaaagcaaggaagtaatggaaaagtaccaaaacgctttaaacgttcttaaaacccctttaaatatcccgtataagatcgaaacggaaaaagtaggtggattattcagcaaagaaacacaagaaacaggcaacgtcgttatagataaaaacgagtttgaatcattgcaggagcaagttacagcgtcacagctgattattaaagattatgaatatatcaaagaaggattagcattaaaagaggcgaaacaaagatgtaaacagttagatagtgagctgagagaagagcatctgaaaaatgaggaattagtcgatgactataataatttagctgatagctataatgatttgttagagcagaataaagaaaaagataaagcattgaatcaatcatataatttattcaacaatgtatttagattgattaaaggtgtgatgaaagaagaagcatatcataggttgatcgattatattgataatcacttagagagttcaaaaatgcgagaaacaatgattgtagatgacaacgatgaacagttctttaagaaaaagtatcagagacaagaaccagaaattatttttgaagatgaacgagatgatggctactctttataa

SEQ ID NO: 421229 - DNA, 1380 bp, Staphylococcus aureus
ttgtttagtttatataaaaaatttaaaggtttgttttatagcgttttattttggctttgtattctttcattttttagtgtattaaatgaaatggttttaaatgtttctttacctgatattgcaaatcattttaatactactcctggaattacaaactgggtaaacactgcatatatgttaactttttcgataggaacagcagtatatggaaaattatctgattatataaatataaaaaaattgttaattattggtattagtttgagctgtcttggttcattgattgcttttattggtcacaatcacttttttattttgatttttggtaggttagtacaaggagtaggatctgctgcattcccttcactgattatggtggttgtagctagaaatattacaagaaaaaaacaaggcaaagcctttggttttataggatcaattgtagctttaggtgaagggttaggtccttcaatagggggaataatagcacattatattcattggtcttacctacttatacttcctatgattacaatagtaactataccttttcttattaaagtaatggtacctggtaaatcaacaaaaaatacattagatatcgtaggtattgttttaatgtctataagtattatatgttttatgttatttacgacaaattataattggacttttttaatactcttcacaatcttttttgtgatttttattaaacatatttcaagagtttctaacccttctattaatcctaaactagggaaaaacattccgtttatgcttggtttgttttctggtgggctaatattttctatagtagctggttttatatcaatggtgccttatatcatgaaaactatttatcatgtaaatgtagcgacaataggtaatagtgttatttttcctggaaccatgagtgttattgtttttggttattttggtggttttttagtggatagaaaaggatcattatttgtttttattttaggatcattgtctatctctataagttttttaactattgcattttttgttgagtttagtatgtggttgactacttttatgtttatatttgttatgggcggattatcttttactaaaacagttatatcaaaaatagtatcaagtagtctttctgaagaagaagttgcttctggaatgagtttgctaaatttcacaagttttttatcagagggaacaggtatagcaattgtaggaggtttattgtcactacaattgattaatcgtaaactagttctggaatttataaattattcttctggagtgtatagtaatattcttgtagccatggctatccttattattttatgttgtcttttgacgattattgtatttaaacgttctgaaaagcagtttgaatag

SEQ ID NO: 421230 - DNA, 1416 bp, Staphylococcus aureus; identical to SEQ ID NO: 421189

SEQ ID NO: 421231 - DNA, 1380 bp, Staphylococcus aureus
ttgtttagtttatataaaaaatttaaaggtttgttttatagcgttttattttggctttgtattctttcattttttagtgtattaaatgaaatggttttaaatgtttctttacctgatattgcaaatcattttaatactactcctggaattacaaactgggtaaacactgcatatatgttaactttttcgataggaacagcagtatatggaaaattatctgattatataaatataaaaaaattgttaattattggtattagtttgagctgtcttggttcattgattgcttttattggtcacaatcacttttttattttgatttttggtaggttagtacaaggagcaggatctgctgcattcccttcactgattatggtggttgtagctagaaatattacaagaaaaaaacaaggcaaagcctttggttttataggatcaattgtagctttaggtgaagggttaggtccttcaatagggggaataatagcacattatattcattggtcttacctacttatacttcctatgattacaatagtaactataccttttcttattaaagtaatggtacctggtaaatcaacaaaaaatacattagatatcgtaggtattgttttaatgtctataagtattatatgttttatgttatttacgacaaattataattggacttttttaatactcttcacaatcttttttgtgatttttattaaacatatttcaagagtttctaacccttttattaatcctaaactagggaaaaacattccgtttatgcttggtttgttttctggtgggctaatattttctatagtagctggttttatatcaatggtgccttatatgatgaaaactatttatcatgtaaatgtagcgacaataggtaatagtgttatttttcctggaaccatgagtgttattgtttttggttattttggtggttttttagtggatagaaaaggatcattatttgtttttattttaggatcattgtctatctctataagttttttaactattgcattttttgttgagtttagtatgtggttgactacttttatgtttatatttgttatgggcggattatcttttactaaaacagttatatcaaaaatagtatcaagtagtctttctgaagaagaagttgcttctggaatgagtttgctaaatttcacaagttttttatcagagggaacaggtatagcaattgtaggaggtttattgtcactacaattgattaatcgtaaactagttctggaatttataaattattcttctggagtgtatagtaatattcttgtagccatggctatccttattattttatgttgtcttttgacgattattgtatttaaacgttctgaaaagcagtttgaatag

SEQ ID NO: 421232 - DNA, 1416 bp, Staphylococcus aureus; identical to SEQ ID NO: 421189

SEQ ID NO: 421233 - DNA, 1380 bp, Staphylococcus aureus; identical to SEQ ID NO: 412597

SEQ ID NO: 421234 - DNA, 1416 bp, Staphylococcus aureus
ttgccactcattttttgcgttagcaaaaacaggtttaagcctcgcagagcacacgtattaacgacttattgtaaaataagtctagtgtgttattatactttaataaataaagctacgcaaaatcatgtgcagtggaggtcatttattatgtcatattccattattagaattgctaaagtgaaatcaaaaacgaatacaagaggtattcaaaaacacgtccaaagacaaaataaaaattacgaaaatctggatattgatttggaaaattcatatttaaattatgatttagtgaatgataacttgatcgatttcaatcaaaaaattgatgagaaaattgaacagaattataaaggtgaacgtaaaatcagaaaagatgctgtaaaacatattgatggtttgattacatcagacaatagcttttttgaacaattaacaccagaagaaacaaagatgttttttgagcacgccaagtcatttttagaacaagaatacggaaaagataatttactttatgcaacggtgcatatggacgaattaacgcctcatatgcattatggtgttgtaccgataacaaaagatggacgattgagtgcgaaagaagtggtaggtaataaaaaagcgctgacggaatttcaagatagatttaatgaatatatcaatagctgtggttatgaattgagtagaggtatatcaagaaaattaatgccgagacaacatgagcaagtgagtcgatataaacagttaacagattatcacaaagaagaatacgagcgtcagagccaaaaattggaccatataaagcaagaaagcaaggaagtaatggaaaagtaccaaaacgctttaaacgttcttaaaacccctttaaatatcccgtataagatcgaaacggaaaaagtaggtggattattcagcaaagaaacacaagaaacaggcaacgtcgttatagataaaaacgagtttgaatcattgcaggagcaagttacagcgtcacagctgattattaaagattatgaatatatcaaagaaggattagcattaaaagaggcgaaacaaagatgtaaacagttagatagtgagcggagagaagagcatctgaaaaatgaggaattagtcgatgactataataatttagctgatagctataatgatttgttagagcagaataaagaaaaagataaagcattgaatcaatcatataatttattcaacaatgtatttagattgattaaaggtgtgatgaaagaagaagcatatcataggttgatcgattatattgataatcacttagagagttcaaaaatgcgagaaacaatgattgtagatgacaacgatgaacagttctttaagaaaaagtatcagagacaagaaccagaaattatttttgaagatgaacgagatgatggctactctttataa

SEQ ID NO: 421235 - DNA, 1380 bp, Staphylococcus aureus; identical to SEQ ID NO: 412597

SEQ ID NO: 421236 - DNA, 1416 bp, Staphylococcus aureus
ttgccactcattttttgcgttagcaaaaacaggtttaagcctcgcagagcacacgtattaacgacttattgtaaaataagtctagtgtgttattatactttaataaataaagctacgcaaaatcatgtgcagtggaggtcatttattatgtcatattccattattagaattgctaaagtgaaatcaaaaacgaatacaagaggtattcaaaaacacgtccaaagacaaaataaaaattacgaaaatctggatattgatttggaaaattcatatttaaattatgatttagtgaatgataacttgatcgatttcaatcaaaaaattgatgagaaaattgaacagaattataaaggtgaacgtaaaatcagaaaagatgctgtaaaacatattgatggtttgattacatcagacaatagcttttttgaacaattaacaccagaagaaacaaagatgttttttgagcacgccaagtcatttttagaacaagaatacggaaaagataatttactttatgcaacggtgcatatggacgaattaacgcctcatatgcattatggtgttgtaccgataacaaaagatggacgattgagtgcgaaagaagtggtaggtaataaaaaagcgctgacggaatttcaagatagatttaatgaatatatcaatagctgtggttatgaattgagtagaggtatatcaagaaaattaatgccgagacaacatgagcaagtgagtcgatataaacagttaacagattatcaccaagaagaatacgagcgtcagagccaaaaattggaccatataaagcaagaaagcaaggaagtaatggaaaagtaccaaaacgctttaaacgttcttaaaacccctttaaatatcccgtataagatcgaaacggaaaaagtaggtggattattcagcaaagaaacacaagaaacaggcaacgtcgttatagataaaaacgagtttgaatcattgcaggagcaagttacagcgtcacagctgattattaaagattatgaatatatcaaagaaggattagcattaaaagaggcgaaacaaagatgtaaacagttagatagtgagctgagagaagagcatctgaaaaatgaggaattagtcgatgactataataatttagctgatagctataatgatttgttagagcagaataaagaaaaagataaagcattgaatcaatcatataatttattcaacaatgtatttagattgattaaaggtgtgatgaaagaagaagcatatcataggttgatcgattatattgataatcacttagagagttcaaaaatgcgagaaacaatgattgtagatgacaacgatgaacagttctttaagaaaaagtatcagagacaagaaccagaaattatttttgaagatgaacgagatgatggctactctttataa

SEQ ID NO: 421237 - DNA, 1380 bp, Staphylococcus aureus
ttgtttagtttatataaaaaatttaaaggtttgttttatagcgttttattttggctttgtattctttcattttttagtgtattaaatgaaatggttttaaatgtttctttacctgatattgcaaatcattttaatactactcctggaattacaaactgggtaaacactgcatatatgttaactttttcgataggaacagcagtatatggaaaattatctgattatataaatataaaaaaattgttaattattggtattagtttgagctgtcttggttcattgattgcttttattggtcacaatcacttttttattttgatttttggtaggttagtacaaggagtaggatctgctgcattcccttcactgattatggtggttgtagctagaaatattacaagaaaaaaacaaggcaaagccttgggttttataggatcaattgtagctttaggtgaagggttaggtccttcaatagggggaataatagcacattatattcattggtcttacctactgatacttcctatgattataatagtaactataccttttcttattaaagtaatggtacctggtaaatcaacaaaaaatacattagatatcgtaggtattgttttaatgtctataagtattatatgttttatgttatttacgacaaattataattggacttttttaatactcttcacaatcttttttgtgatttttattaaacatatttcaagagtttctaacccttttattaatcctaaactagggaaaaacattccgtttatgcttggtttgttttctggtgggctaatattttctatagtagctggttttatatcaatggtgccttatatgatgaaaactatttatcatgtaaatgtagcgacaataggtaatagtgttatttttcctggaaccatgagtgttattgtttttggttattttggtggttttttagtggatagaaaaggatcattatttgtttttattttaggatcattgtctatctctataagttttttaactattgcattttttgttgagtttagtatgtggttgactacttttatgtttatatttgttatgggcggattatcttttactaaaacagttatatcaaaaatagtatcaagtagtctttctgaagaagaagttgcttctggaatgagtttgctaaatttcacaagttttttatcagagggaacaggtatagcaattgtaggaggtttattgtcactacaattgattaatcgtaaactagttctggaatttataaattattcttctggagtgtatagtaatattcttgtagccatggctatccttattattttatgttgtcttttgacgattattgtatttaaacgttctgaaaagcagtttgaatag

SEQ ID NO: 421238 - DNA, 1416 bp, Staphylococcus aureus; identical to SEQ ID NO: 421189

SEQ ID NO: 421239 - DNA, 1380 bp, Staphylococcus aureus; identical to SEQ ID NO: 412597

SEQ ID NO: 421240 - DNA, 1416 bp, Staphylococcus aureus
ttgccactcattttttgcgttagcaaaaacaggtttaagcctcgcagagcacacgtattaacgacttattgtaaaataagtctagtgtgttattatactttaataaataaagctacgcaaaatcatgtgcagtggaggtcatttattatgtcatattccattattagaattgctaaagtgaaatcaaaaacgaatacaagaggtattcaaaaacacgtccaaagacaaaataaaaattacgaaaatctggatattgatttggaaaattcatatttaaattatgatttagtgaatgataacttgatcgatttcaatcaaaaaattgatgagaaaattgaacagaattataaaggtgaacgtaaaatcagaaaagatgctgtaaaacatattgatggttggattacatcagacaatagcttttttgaacaattaacaccagaagaaacaaagatgttttttgagcacgccaagtcatttttagaacaagaatacggaaaagataatttactttatgcaacggtgcatatggacgaattaacgcctcatatgcattatggtgttgtaccgataacaaaagatggacgattgagtgcgaaagaagtggtaggtaataaaaaagcgctgacggaatttcaagatagatttaatgaatatatcaatagctgtggttatgaattgagtagaggtatatcaagaaaattaatgccgagacaacatgagcaagtgagtcgatataaacagttaacagattatcacaaagaagaatacgagcgtcagagccaaaaattggaccatataaagcaagaaagcaaggaagtaatggaaaagtaccaaaacgctttaaacgttcttaaaacccctttaaatatcccgtataagatcgaaacggaaaaagtaggtggattattcagcaaagaaacacaagaaacaggcaacgtcgttatagataaaaacgagtttgaatcattgcaggagcaagttacagcgtcacagctgattattaaagattatgaatatatcaaagaaggattagcattaaaagaggcgaaacaaagatgtaaacagttagatagtgagctgagagaagagcatctgaaaaatgaggaattagtcgatgactataataatttagctgatagctataatgatttgttagagcagaataaagaaaaagataaagcattgaatcaatcatataatttattcaacaatgtatttagattgattaaaggtgtgatgaaagaagaagcatatcataggttgatcgattatattgataatcacttagagagttcaaaaatgcgagaaacaatgattgtagatgacaacgatgaacagttctttaagaaaaagtatcagagacaagaaccagaaattatttttgaagatgaacgagatgatggctactctttataa

SEQ ID NO: 421241 - DNA, 1380 bp, Staphylococcus aureus
ttgtttagtttatataaaaaatttaaaggtttgttttatagcgttttattttggctttgtattctttcattttttagtgtattaaatgaaatggttttaaatgtttctttacctgatattgcaaatcattttaatactactcctggaattacaaactgggtaaacactgcatatatgttaactttttcgataggaacagcagtatatggaaaattatctgattatataaatataaaaaaattgttaattattggtattagtttgagctgtcttggttcattgattgcttttattggtcacaatcacttttttattttgatttttggtaggttagtacaaggagtaggatctgctgcattcccttcactgattatggtcgttgtagctagaaatattacaagaaaaaaacaaggcaaagcctttggttttataggatcaattgtagctttaggtgaagggttaggtccttcaatagggggaataatagcacattatattcatttgtcttacctacttatacttcctatgattacaatagtaactataccttttcttattaaagtaatggtacctggtaaatcaacaaaaaatacattagatatcgtaggtattgttttaatgtctataagtattatatgttttatgttatttacgacaaattataattggacttttttaatactcttcacaatcttttttgtgatttttattaaacatatttcaagagtttctaacccttttattaatcctaaactagggaaaaacattccgtttatgcttggtttgttttctggtgggctaatattttctatagtagctggttttatatcaatggtgccttatatgatgaaaactatttatcatgtaaatgtagcgacaataggtaatagtgttatttttcctggaaccatgagtgttattgtttttggttattttggtggttttttagtggatagaaaaggatcattatttgtttttattttaggatcattgtctatctctataagttttttaactattgcattttttgttgagtttagtatgtggttgactacttttatgtttatatttgttatgggcggattatcttttactaaaacagttatatcaaaaatagtatcaagtagtctttctgaagaagaagttgcttctggaatgagtttgctaaatttcacaagttttttatcagagggaacaggtatagcaattgtaggaggtttattgtcactacaattgattaatcgtaaactagttctggaatttataaattattcttctggagtgtatagtaatattcttgtagccatggctatccttattattttatgttgtcttttgacgattattgtatttaaacgttctgaaaagcagtttgaatag

SEQ ID NO: 421242 - DNA, 1416 bp, Staphylococcus aureus; identical to SEQ ID NO: 421189

SEQ ID NO: 421243 - DNA, 1380 bp, Staphylococcus aureus; identical to SEQ ID NO: 412597

SEQ ID NO: 421244 - DNA, 1416 bp, Staphylococcus aureus
ttgccactcattttttgcgttagcaaaaacaggtttaagcctcgcagagcacacgtattaacgacttattgtaaaataagtctagtgtgttattatactttaataaataaagctacgcaaaatcatgtgcagtggaggtcatttattatgtcatattccattattagaattgctaaagtgaaatcaaaaacgaatacaagaggtattcaaaaacacgtccaaagacaaaataaaaattacgaaaatctggatattgatttggaaaattcatatttaaattatgatttagtgaatgataacttgatcgatttcaatcaaaaaattgatgagaaaattgaacagaattataaaggtgaacgtaaaatcagaaaagatgctgtaaaacatattgatggtttgattacatcagacaatagcttttttgaacaattaacaccagaagaaacaaagatgttttttgagcacgccaagtcatttttagaacaagaatacggaaaagataatttactttatgcaacggtgcatatggacgaattaacgcctcatatgcattatggtgttgtaccgataacaaaagatggacgatcgagtgcgaaagaagtggtaggtaataaaaaagcgctgacggaatttcaagatagatttaatgaatatatcaatagctgtggttatgaattgagtagaggtatatcaagaaaattaatgccgagacaacatgagcaagtgagtcgatataaacagttaacagattatcacaaagaagaatacgagcgtcagagccaaaaattggaccatataaagcaagaaagcaaggaagtaatggaaaagtaccaaaacgctttaaacgttcttaaaacccctttaaatatcccgtataagatcgaaacggaaaaagtaggtggattattcagcaaagaaacacaagaaacaggcaacgtcgttatagataaaaacgagtttgaatcattgcaggagcaagttacagcgtcacagctgattattaaagattatgaatatatcaaagaaggattagcattaaaagaggcgaaacaaagatgtaaacagttagatagtgagctgagagaagagcatctgaaaaatgaggaattagtcgatgactataataatttagctgatagctataatgatttgttagagcagaataaagaaaaagataaagcattgaatcaatcatataatttattcaacaatgtatttagattgattaaaggtgtgatgaaagaagaagcatatcataggttgatcgattatattgataatcacttagagagttcaaaaatgcgagaaacaatgattgtagatgacaacgatgaacagttctttaagaaaaagtatcagagacaagaaccagaaattatttttgaagatgaacgagatgatggctactctttataa

SEQ ID NO: 421245 - DNA, 333 bp, Staphylococcus aureus
ttgtttagtttatataaaaaatttaaaggtttgttttatagcgttttattttggctttgtattctttcattttttagtgtattaaatgaaatggttttaaatgtttctttacctgatattgcaaatcattttaatactactcctggaattacaaactgggtaaacactgcatatatgttaactttttcgataggaacagcagtatatggaaaattatctgattatataaatataaaaaaattgttaattattggtattagtttgagctgtcttggttcattgattgcttttattggtcacaatcacttttttattttgatttttggtaggtga

SEQ ID NO: 421246 - DNA, 1008 bp, Staphylococcus aureus; identical to SEQ ID NO: 421147

SEQ ID NO: 421247 - DNA, 1416 bp, Staphylococcus aureus; identical to SEQ ID NO: 421189

SEQ ID NO: 421248 - DNA, 1380 bp, Staphylococcus aureus; identical to SEQ ID NO: 412597

SEQ ID NO: 421249 - DNA, 1416 bp, Staphylococcus aureus
ttgccactcattttttgcgttagcaaaaacaggtttaagcctcgcagagcacacgtattaacgacttattgtaaaataagtctagtgtgttattatactttaataaataaagctacgcaaaatcatgtgcagtggaggtcatttattatgtcatattccattattagaattgctaaagtgaaatcaaaaacgaatacaagaggtattcaaaaacacgtccaaagacaaaataaaaattacgaaaatctggatattgatttggaaaattcatatttaaattatgatttagtgaatgataacttgatcgatttcaatcaaaaaattgatgagaaaattgaacagaattataaaggtgaacgtaaaatcagaaaagatgctgtaaaacatattgatggtttgattacatcagacaatagcttttttgaacaattaacaccagaagaaacaaagatgttttttgagcacgccaagtcatttttagaacaaaaatacggaaaagataatttactttatgcaacggtgcatatggacgaattaacgcctcatatgcattatggtgttgtaccgataacaaaagatggacgattgagtgcgaaagaagtggtaggtaataaaaaagcgctgacggaatttcaagatagatttaatgaatatatcaatagctgtggttatgaattgagtagaggtatatcaagaaaattaatgccgagacaacatgagcaagtgagtcgatataaacagttaacagattatcacaaagaagaatacgagcgtcagagccaaaaattggaccatataaagcaagaaagcaaggaagtaatggaaaagtaccaaaacgctttaaacgttcttaaaacccctttaaatatcccgtataagatcgaaacggaaaaagtaggtggattattcagcaaagaaacacaagaaacaggcaacgtcgttatcgataaaaacgagtttgaatcattgcaggagcaagttacagcgtcacagctgattattaaagattatgaatatatcaaagaaggattagcattaaaagaggcgaaacaaagatgtaaacagttagatagtgagctgagagaagagcatctgaaaaatgaggaattagtcgatgactataataatttagctgatagctataatgatttgttagagcagaataaagaaaaagataaagcattgaatcaatcatataatttattcaacaatgtatttagattgattaaaggtgtgatgaaagaagaagcatatcataggttgatcgattatattgataatcacttagagagttcaaaaatgcgagaaacaatgattgtagatgacaacgatgaacagttctttaagaaaaagtatcagagacaagaaccagaaattatttttgaagatgaacgagatgatggctactctttataa

SEQ ID NO: 421250 - DNA, 1380 bp, Staphylococcus aureus; identical to SEQ ID NO: 412597

SEQ ID NO: 421251 - DNA, 1416 bp, Staphylococcus aureus
ttgccactcattttttgcgttagcaaaaacaggtttaagcctcgcagagcacacgtattaacgacttattgtaaaataagtctagtgtgttattatactttaataaataaagctacgcaaaatcatgtgcagtggaggtcatttattatgtcatattccattattagaattgctaaagtgaaatcaaaaacgaatacaagaggtattcaaaaacacgtccaaagacaaaataaaaattacgaaaatctggatattgatttggaaaattcatatttaaattatgatttagtgaatgataacttgatcgatttcaatcaaaaaattgatgagaaaattgaacagaattataaaggtgaacgtaaaatcagaaaagatgctgtaaaacatattgatggtttgattacatcagacaatagcttttttgaacaattaacaccagaagaaacaaagatgttttttgagcacgccaagtcatttttagaacaagaatacggaaaagataatttactttatgcaacggtgcatatggacgaattaacgcctcatatgcattatggtgttgtaccgataacaaaagatggacgattgagtgcgaaagaagtggtaggtaataaaaaagcgctgacggaatttcaagatagatttaatgaatatatcaatagctgtggttatgaattgagtagaggtatatcaagaaaattaatgccgagacaacatgagcaagtgagtcgatataaacagttaacagattatcacaaagaagaatacgagcgtcagagccaaaaattggaccatataaagcaagaaagcaaggaagtaatggaaaagtaccaaaacgctttaaacgttcttaaaacccctttaaatatcccgtataagatcgaaacggaaaaagtaggtggattattcagcaaagaaacacaagaaacaggcaacgtcgttatagataaaaacgagtttgaatcattgcaggagcaagttacagcgtcacagctgattattaaagattatgaatatatcaaagaaggattagcattaaaagaggcgaaacaaagatgtaaacagttagatagtgagctgagagaagagcatctgaaaaatgaggaattagtcgatgactataataatttagctgatagctataatgatttgttagagcagaataaagaaaaagataaagcattgaatcaatcatataatttattcaacaatgtatttagattgattaaaggtgtgatgaaagaagaagcatatcataggttgatcgattatattgataatcacttagagagttcaaaaatgcgagaaacaatgattgtagatgacaacgatgaaccgttctttaagaaaaagtatcagagacaagaaccagaaattatttttgaagatgaacgagatgatggctactctttataa

SEQ ID NO: 421252 - DNA, 1380 bp, Staphylococcus aureus; identical to SEQ ID NO: 412597

SEQ ID NO: 421253 - DNA, 1416 bp, Staphylococcus aureus
ttgccactcattttttgcgttagcaaaaacaggtttaagcctcgcagagcacacgtattaacgacttattgtaaaataagtctagtgtgttattatactttaataaataaagctacgcaaaatcatgtgcagtggaggtcatttattatgtcatattccattattagaattgctaaagtgaaatcaaaaacgaatacaagaggtattcaaaaacacgtccaaagacaaaataaaaattacgaaaatctggatattgatttggaaaattcatatttaaattatgatttagtgaatgataacttgatcgatttcaatcaaaaaattgatgagaaaattgaacagaattataaaggtgaacgtaaaatcagaaaagatgctgtaaaacatattgatggtttgattacatcagacaatagcttttttgaacaattaacaccagaagaaacaaagatgttttttgagcacgccaagtcatttttagaacaagaatacggaaaagataatttactttatgcaacggtgcatatggacgaattaacgcctcatatgcattatggtgttgtacctataacaaaagatggacgattgagtgcgaaagaagtggtaggtaataaaaaagcgctgacggaatttcaagatagatttaatgaatatatcaatagctgtggttatgaattgagtagaggtatatcaagaaaattaatgccgagacaacatgagcaagtgagtcgatataaacagttaacagattatcacaaagaagaatacgagcgtcagagccaaaaattggaccatataaagcaagaaagcaaggaagtaatggaaaagtaccaaaacgctttaaacgttcttaaaacccctttaaatatcccgtataagatcgaaacggaaaaagtaggtggattattcagcaaagaaacacaagaaacaggcaacgtcgttatagataaaaacgagtttgaatcattgcaggagcaagttacagcgtcacagctgattattaaagattatgaatatatcaaagaaggattagcattaaaagaggcgaaacaaagatgtaaacagttagatagtgagctgagagaagagcatctgaaaaatgaggaattagtcgatgactataataatttagctgatagctataatgatttgttagagcagaataaagaaaaagataaagcattgaatcaatcatataatttattcaacaatgtatttagattgattaaaggtgtgatgaaagaagaagcatatcataggttgatcgattatattgataatcacttagagagttcaaaaatgcgagaaacaatgattgtagatgacaacgatgaacagttctttaagaaaaagtatcagagacaagaaccagaaattatttttgaagatgaacgagatgatggctactctttataa

SEQ ID NO: 421254 - DNA, 1380 bp, Staphylococcus aureus; identical to SEQ ID NO: 412597

SEQ ID NO: 421255 - DNA, 1416 bp, Staphylococcus aureus
ttgccactcattttttgcgttagcaaaaacaggtttaagcctcgcagagcacacgtattaacgacttattgtaaaataagtctagtgtgttattatactttaataaataaagctacgcaaaatcatgtgcagtggaggtcatttattatgtcatattccattattagaattgctaaagtgaaatcaaaaacgaatacaagaggtattcaaaaacacgtccaaagacaaaataaaaattacgaaaatctggatattgatttggaaaattcatatttaaattatgatttagtgaatgataacttgatcgatttcaatcaaaaaattgatgagaaaattgaacagaattataaaggtgaacgtaaaatcagaaaagatgctgtaaaacatattgatggtttgattacatcagacaatagcttttttgaacaattaacaccagaagaaacaaagatgttttttgagcacgccaagtcatttttagaacaagaatacggaaaagataatttactttatgcaacggtgcatatggacgaattaacgcctcatatgcattatggtgttgtaccgataacaaaagatggacgattgagtgcgaaagaagtggtaggtaataaaaaagcgctgacggaatttcaagatagatttaatgaatatatccatagctgtggttatgaattgagtagaggtatatcaagaaaattaatgccgagacaacatgagcaagtgagtcgatataaacagttaacagattatcacaaagaagaatacgagcgtcagagccaaaaattggaccatataaagcaagaaagcaaggaagtaatggaaaagtaccaaaacgctttaaacgttcttaaaacccctttaaatatcccgtataacatcgaaacggaaaaagtaggtggattattcagcaaagaaacacaagaaacaggcaacgtcgttatagataaaaacgagtttgaatcattgcaggagcaagttacagcgtcacagctgattattaaagattatgaatatatcaaagaaggattagcattaaaagaggcgaaacaaagatgtaaacagttagatagtgagctgagagaagagcatctgaaaaatgaggaattagtcgatgactataataatttagctgatagctataatgatttgttagagcagaataaagaaaaagataaagcattgaatcaatcatataatttattcaacaatgtatttagattgattaaaggtgtgatgaaagaagaagcatatcataggttgatcgattatattgataatcacttagagagttcaaaaatgcgagaaacaatgattgtagatgacaacgatgaacagttctttaagaaaaagtatcagagacaagaaccagaaattatttttgaagatgaacgagatgatggctactctttataa

SEQ ID NO: 421256 - DNA, 1380 bp, Staphylococcus aureus; identical to SEQ ID NO: 412597

SEQ ID NO: 421257 - DNA, 1416 bp, Staphylococcus aureus
ttgccactcattttttgcgttagcaaaaacaggtttaagcctcgcagagcacacgtattaacgacttattgtaaaataagtctagtgtgttattatactttaataaataaagctacgcaaaatcatgtgcagtggaggtcatttattatgtcatattccattattagaattgctaaagtgaaatcaaaaacgaatacaagaggtattcaaaaacacgtccaaagacaaaataaaaattacgaaaatctggatattgatttggaaaattcatatttaaattatgatttagtgaatgataacttgatcgatttcaatcaaaaaattgatgagaaaattgaacagaattataaaggtgaacgtaaaatcagaaaagatgctgtaaaacatattgatggtttgattacatcagacaatagcttttttgaacaattaacaccagaagaaacaaagatgttttttgagcacgccaagtcatttttagaacaagaatacggaaaagataatttactttatgcaacggtgcatatggacgaattaacgcctcatatgcattatggtgttgtaccgataacaaaagatggacgattgagtgcgaaagaagtggtaggtaataaaaaagcgctgacggaatttcaagatagatttaatgaatatatcaatagctgtggttatgaattgagtagaggtatatcaagaaaattaatgccgagacaacatgagcaagtgagtggatataaacagttaacagattatcacaaagaagaatacgagcgtcagagccaaaaattggaccatataaagcaagaaagcaaggaagtaatggaaaagtaccaaaacgctttaaacgttcttaaaacccctttaaatatcccgtataagatcgaaacggaaaaagtaggtggattattcagcaaagaaacacaagaaacaggcaacgtcgttatagataaaaacgagtttgaatcattgcaggagcaagttacagcgtcacagctgattattaaagattatgaatatatcaaagaaggattagcattaaaagaggcgaaacaaagatgtaaacagttagatagtgagctgagagaagagcatctgaaaaatgaggaattagtcgatgactataataatttagctgatagctataatgatttgttagagcagaataaagaaaaagataaagcattgaatcaatcatataatttattcaacaatgtatttagattgattaaaggtgtgatgaaagaagaagcatatcataggttgatcgattatattgataatcacttagagagttcaaaaatgcgagaaacaatgattgtagatgacaacgatgaacagttctttaagaaaaagtatcagagacaagaaccagaaattatttttgaagatgaacgagatgatggctactctttataa

SEQ ID NO: 421258 - DNA, 1380 bp, Staphylococcus aureus; identical to SEQ ID NO: 412597

SEQ ID NO: 421259 - DNA, 1416 bp, Staphylococcus aureus
ttgccactcattttttgcgttagcaaaaacaggtttaagcctcgcagagcacacgtattaacgacttattgtaaaataagtctagtgtgttattatactttaataaataaagctacgcaaaatcatgtgcagtggaggtcatttattatgtcatattccattattagaattgctaaagtgaaatcaaaaacgaatacaagaggtattcaaaaacacgtccaaagacaaaataaaaattacgaaaatctggatattgatttggaaaattcatatttaaattatgatttagtgaatgataacttgatcgatttcaatcaaaaaattgatgagaaaattgaacagaattataaaggtgaacgtaaaatcagaaaagatgctgtaaaacatattgatggtttgattacatcagacaatagcttttttgaacaattaacaccagaagaaacaaagatgttttttgagcacgccaagtcatttttagaacaagaatacggaaaagataatttactttatgcaacggtgcatatggacgaattaacgcctcatatgcattatggtgttgtaccgataacaaaagatggacgattgagtgcgaaagaagtggtaggtaataaaaaagcgctgacggaatttcaagatagatttaatgaatatatcaatagctgtggttatgaattgagtagaggtatatcaagaaaattaatgccgagacaacatgagcaagtgagtcgatataaacagttaacagattatcacaaagaagaatacgagcgtcagagccaaaaattggaccatataaagcaagaaagcaaggaagtaatggaaaagtaccaaaacgctttaaacgttcttaaaacccctttaaatatcccgtataagatcgaaacggaaaaagtaggtggattattcagcaaagaaacacaagaaacaggcaacgtcgttatagataaaaacgagtttgaatcattgcaggagcaagttacagcgtcacagctgattattaaagattatgaatatatcaaagaaggattagcattaaaagaggcgaaacaaagatgtaaacagttagatagtgagctgagagaagagcatctgaaaaatgaggaattagtcgatgactataataatttagctgatagctataatgatttgttagagcagaataaagaaaaagataaagcattgaatcaatcatataatttattcaacaatgtatttagattgattaaaggtgtgatgaaagaagaagcatatcataggttgatcgattatattgataatcgcttagagagttcaaaaatgcgagaaacaatgattgtagatgacaacgatgaacagttctttaagaaaaagtatcagagacaagaaccagaaattatttttgaagatgaacgagatgatggctactctttataa

SEQ ID NO: 421260 - DNA, 1380 bp, Staphylococcus aureus
ttgtttagtttatataaaaaatttaaaggtttgttttatagcgttttattttggctttgtattctttcattttttagtgtattaaatgaaatggttttaaatgtttctttacctgatattgcaaatcattttaatactactcctggaattacaaactgggtaaacactgcatatatgttaactttttcgataggaacagcagtatatggaaaattatctgattatataaatataaaaaaattgttaattattggtattagtttgagctgtcttggttcattgattgcttttattggtcacaatcacttttttattttgatttttggtaggttagtacaaggagtaggatctgctgcattcccttcactgattatggtggttgtagctagaaatattacaagaaaaaaacaaggcaaagccttaggttttataggatcaattgtagctttaggtgaagggttaggtccttcaatagggggaataatagcacattatattcattggtcttacctacttatacttcctatgattacaatagtaactataccttttcttattaaagtaatggtacctggtaaatcaacaaaaaatacattagatatcgtaggtattgttttaatgtctataagtattatatgttttatgttatttacgacaaattataattggacttttttaatactcttcacaatcttttttgtgatttttattaaacatatttcaagagtttctaacccttttattaatcctaaactagggaaaaacattccgtttatgcttggtttgttttctggtgggctaatattttctatagtagctggttttatatcaatggtgccttatatgatgaaaactatttatcatgtaaatgtagcgacaataggtaatagtgttatttttcctggaaccatgagtgttattgtttttggttattttggtggttttttagtggatagaaaaggatcattatttgtttttattttaggatcattgtctatctctataagttttttaactattgcattttttgttgagtttagtatgtggttgactacttttatgtttatatttgttatgggcggattatcttttactaaaacagttatatcaaaaatagtatcaagtagtctttctgaagaagaagttgcttctggaatgagtttgctaaatttcacaagttttttatcagagggaacaggtatagcaattgtaggaggtttattgtcactacaattgattaatcgtaaactagttctggaatttataaattattcttctggagtgtatagtaatattcttgtagccatggctatccttattattttatgttgtcttttgacgattattgtatttaaacgttctgaaaagcagtttgaatag

SEQ ID NO: 421261 - DNA, 1416 bp, Staphylococcus aureus; identical to SEQ ID NO: 421189

SEQ ID NO: 421262 - DNA, 1380 bp, Staphylococcus aureus
ttgtttagtttatataaaaaatttaaaggtttgttttatagcgttttattttggctttgtattctttcattttttagtgtattaaatgaaatggttttaaatgtttctttacctgatattgcaaatcattttaatactactcctggaattacaaactgggtaaacactgcatatatgttaactttttcgataggaacagcagtatatggaaaattatctgattatataaatataaaaaaattgttaattattggtattagtttgagctgtcttggttcattgattgcttttattggtcacaatcacttttttattttgatttttggtaggttagtacaaggagtaggatccgctgcattcccttcactgattatggtggttgtagctagaaatattacaagaaaaaaacaaggcaaagcctttggttttataggatcaattgtagctttaggtgaagggttaggtccttcaatagggggaataatagcacattatattcattggtcttacctacttatacttcctatgattacaatagtaactataccttttcttattaaagtaatggtacctggtaaatcaacaaaaaatacattagatatcgtaggtattgttttaatgtctataagtattatatgttttatgttatttacgacaaattataattggacttttttaatactcttcacaatcttttttgtgatttttattaaacatatttcaagagtttctaacccttttattaatcctaaactagggaaaaacattccgtttatgcttggtttgttttctggtgggctaatattttctatagtagctggttttatatcaatggtgccttatatgatgaaaactatttatcatgtaaatgtagcgacaataggtaatagtgttatttttcctggaaccatgagtgttattgtttttggttattttggtggttttttagtggatagaaaaggatcattatttgtttttattttaggatcattgtctatctctataagttttttaactattgcattttttgttgagtttagtatgtggttgactacttttatgtttatatttgttatgggcggattatcttttactaaaacagttatatcaaaaatagtatcaagtagtctttctgaagaagaagttgcttctggaatgagtttgctaaatttcacaagttttttatcagagggaacaggtatagcaattgtaggaggtttattgtcactacaattgattaatcgtaaactagttctggaatttataaattattcttctggagtgtatagtaatattcttgtagccatggctatccttattattttatgttgtcttttgacgattattgtatttaaacgttctgaaaagcagtttgaatag

SEQ ID NO: 421263 - DNA, 1416 bp, Staphylococcus aureus; identical to SEQ ID NO: 421189

SEQ ID NO: 421264 - DNA, 1380 bp, Staphylococcus aureus; identical to SEQ ID NO: 412597

SEQ ID NO: 421265 - DNA, 1416 bp, Staphylococcus aureus
ttgccactcattttttgcgttagcaaaaacaggtttaagcctcgcagagcacacgtattaacgacttattgtaaaataagtctagtgtgttattatactttaataaataaagctacgcaaaatcatgtgcagtggaggtcatttattatgtcatattccattattagaattgctaaagtgaaatcaaaaacgaatacaagaggtattcaaaaacacgtccaaagacaaaataaaaattacgaaaatctggatattgatttggaaaattcatatttaaattatgatttagtgaatgataacttgatcgatttcaatcaaaaaattgatgagaaaattgaacagaattataaaggtgaacgtaaaatcagaaaagatgctgtaaaacatattgatggtttgattacatcagacaatagcttttttgaacaattaacaccagaagaaacaaagatgttttttgagcacgccaagtcatttttagaacaagaatacggaaaagataatttactttatgcaacggtgcatatggacgaattaacgcctcatatgcattatggtgttgtaccgataacaaaagatggacgattgagtgcgaaagaagtggtaggtaataaaaaagagctgacggaatttcaagatagatttaatgaatatatcaatagctgtggttatgaattgagtagaggtatatcaagaaaattaatgccgagacaacatgagcaagtgagtcgatataaaccgttaacagattatcacaaagaagaatacgagcgtcagagccaaaaattggaccatataaagcaagaaagcaaggaagtaatggaaaagtaccaaaacgctttaaacgttcttaaaacccctttaaatatcccgtataagatcgaaacggaaaaagtaggtggattattcagcaaagaaacacaagaaacaggcaacgtcgttatagataaaaacgagtttgaatcattgcaggagcaagttacagcgtcacagctgattattaaagattatgaatatatcaaagaaggattagcattaaaagaggcgaaacaaagatgtaaacagttagatagtgagctgagagaagagcatctgaaaaatgaggaattagtcgatgactataataatttagctgatagctataatgatttgttagagcagaataaagaaaaagataaagcattgaatcaatcatataatttattcaacaatgtatttagattgattaaaggtgtgatgaaagaagaagcatatcataggttgatcgattatattgataatcacttagagagttcaaaaatgcgagaaacaatgattgtagatgacaacgatgaacagttctttaagaaaaagtatcagagacaagaaccagaaattatttttgaagatgaacgagatgatggctactctttataa

SEQ ID NO: 421266 - DNA, 1380 bp, Staphylococcus aureus
ttgtttagtttatataaaaaatttaaaggtttgttttatagcgttttattttggctttgtattctttcattttttagtgtattaaatgaaatggttttaaatgtttctttacctgatattgcaaatcattttaatactactcctggaattacaaactgggtaaacactgcatatatgttaactttttcgataggaacagcagtatatggaaaattatctgattatataaatataaaaaaattgttaattattggtattagtttgagctgtcttggttcattgattgcttttattggtcacaatcacttttttattttgatttttggtaggttagtacaaggagtaggatctgctgcattcccttcactgattatggtggttgtagctagaaatattacaagaaaaaaacaaggcaaagcctttggttttataggatcaattgtagctttgggtgaagggttaggtccttcaatagggggaataatagcacattatattcattggtcttacctacttatacttcctatgattacaatagtaactataccttttcttattaaagtaatggtacctggtaaatcaacaaaaaatacattagatatcgtaggtattgttttaatgtctataagtattatatgttttatgttatttacgacaaattataattggacttttttaatactcttcacaatcttttttgtgatttttattaaacatatttcaagagtttctaacccttttattaatcctaaactagggaaaaacattccgtttatgcttggtttgttttctggtgggctaatattttctatagtagctggttttatatcaatggtgccttatatgatgaaaactatttatcatgtaaatgtagcgacaataggtaatagtgttatttttcctggaaccatgagtgttattgtttttggttattttggtggttttttagtggatagaaaaggatcattatttgtttttattttaggatcattgtctatctctataagttttttaactattgcattttttgttgagtttagtatgtggttgactacttttatgtttatatttgttatgggcggattatcttttactaaaacagttatatcaaaaatagtatcaagtagtctttctgaagaagaagttgcttctggaatgagtttgctaaatttcacaagttttttatcagagggaacaggtatagcaattgtaggaggtttattgtcactacaattgattaatcgtaaactagttctggaatttataaattattcttctggagtgtatagtaatattcttgtagccatggctatccttattattttatgttgtcttttgacgattattgtatttaaacgttctgaaaagcagtttgaatag

SEQ ID NO: 421267 - DNA, 1416 bp, Staphylococcus aureus; identical to SEQ ID NO: 421189

SEQ ID NO: 421268 - DNA, 1380 bp, Staphylococcus aureus; identical to SEQ ID NO: 412597

SEQ ID NO: 421269 - DNA, 1416 bp, Staphylococcus aureus
ttgccactcattttttgcgttagcaaaaacaggtttaagcctcgcagagcacacgtattaacgacttattgtaaaataagtctagtgtgttattatactttaataaataaagctacgcaaaatcatgtgcagtggaggtcatttattatgtcatattccattattagaattgctaaagtgaaatcaaaaacgaatacaagaggtattcaaaaacacgtccaaagacaaaataaaaattacgaaaatctggatattgatttggaaaattcatatttaaattatgatttagtgaatgataacttgatcgatttcaatcaaaaaattgatgagaaaattgaacagaattataaaggtgaacgtaaaatcagaaaagatgctgtaaaacatattgatggtttgattacatcagacaatagcttttttgaacaattaacaccagaagaaacaaagatgttttttgagcacgccaagtcatttttagaacaagaatacggaaaagataatttactttatgcaacggtgcatatggacgaattaacgcctcatatgcattatggtgttgtaccgataacaaaagatggacgattgagtgcgaaagaagtggtaggtaataaaaaagcgctgacggaatttcaagatagatttaatgaatatatcaatagctgtggttatgaattgagtagaggtatatcaagaaaattaatgccgagacaacatgagcaagtgagtcgatataaacagttaacagactatcacaaagaagaatacgagcgtcagagccaaaaattggaccatataaagcaagaaagcaaggaagtaatggaaaagtaccaaaacgctttaaacgttcttaaaacccctttaaatatcccgtataagatcgaaacggaaaaagtaggtggattattcagcaaagaaacacaagaaacaggcaacgtcgttatagataaaaacgagtttgaatcattgcaggagcaagttacagcgtcacagctgattattaaagattatgaatatatcaaagaaggattagcattaaaagaggcgaaacaaagatgtaaacagttagatagtgagctgagagaagagcatctgaaaaatgaggaattagtcgatgactataataatttagctgatagctataatgatttgttagagcagaataaagaaaaagataaagcattgaatcaatcatataatttattcaacaatgtatttagattgattaaaggtgtgatgaaagaagaagcatatcataggttgatcgattatattgataatcacttagagagttcaaaaatgcgagaaacaatgattgtagatgacaacgatgaacagttctttaagaaaaagtatcagagacaagaaccagaaattatttttgaagatgaacgagatgatggctactctttataa

SEQ ID NO: 421270 - DNA, 1380 bp, Staphylococcus aureus
ttgtttagtttatataaaaaatttaaaggtttgttttatagcgttttattttggctttgtattctttcattttttagtgtattaaatgaaatggttttaaatgtttctttacctgatattgcaaatcattttaatactactcctggaattacaaactgggtaaacactgcatatatgttaactttttcgataggaacagcagtatatggaaaattatctgattatataaatataaaaaaattgttaattattggtattagtttgagctgtcttggttcattgattgcttttattggtcacaatcacttttttattttgatttttggtaggttagtacaaggagtaggatctgctgcattcccttcactgattatggtggttgtagctagaaatattacaagaaaaaaacaaggcaaagcctttggttttataggatcaattgtagctttaggtgaagggttaggtccttcaatagggggaataatagcacattatattcattggtcttacctacttatacttcctatgattacaatagtaactataccttttcttattaaagtaatggtacctggtaaatcaacaaaaaatacattagatatcgtaggtattgttttaatgtctataagtattatatgttttatgttatttacgacaaattataattggacttttttaatactcttcacaatcttttttgtgatttttattaaacatatttcaagagtttctaacccttttattaatcctaaactagggaaaaacattccgtttatgcttggtttgttttctggtgggctaatattttctatagtagctggttttatatcaatggtgccttatatgatgaaaactatttatcatgtaagtgtagcgacaataggtaatagtgttatttttcctggaaccatgagtgttattgtttttggttattttggtggttttttagtggatagaaaaggaccattatttgtttttattttaggatcattgtctatctctataagttttttaactattgcattttttgttgagtttagtatgtggttgactacttttatgtttatatttgttatgggcggattatcttttactaaaacagttatatcaaaaatagtatcaagtagtctttctgaagaagaagttgcttctggaatgagtttgctaaatttcacaagttttttatcagagggaacaggtatagcaattgtaggaggtttattgtcactacaattgattaatcgtaaactagttctggaatttataaattattcttctggagtgtatagtaatattcttgtagccatggctatccttattattttatgttgtcttttgacgattattgtatttaaacgttctgaaaagcagtttgaatag

SEQ ID NO: 421271 - DNA, 1416 bp, Staphylococcus aureus; identical to SEQ ID NO: 421189

SEQ ID NO: 421272 - DNA, 1380 bp, Staphylococcus aureus; identical to SEQ ID NO: 412597

SEQ ID NO: 421273 - DNA, 1416 bp, Staphylococcus aureus
ttgccactcattttttgcgttagcaaaaacaggtttaagcctcgcagagcacacgtattaacgacttattgtaaaataagtctagtgtgttattatactttaataaataaagctacgcaaaatcatgtgcagtggaggtcatttattatgtcatattccattattagaattgctaaagtgaaatcaaaaacgaatacaagaggtattcaaaaacacgtccaaagacaaaataaaaattacgaaaatctggatattgatttggaaaattcatatttaaattatgatttagtgaatgataacttgatcgatttcaatcaaaaaattgatgagaaaattgaacagaattataaaggtgaacgtaaaatcagaaaagatgctgtaaaacatattgatggtttgattacatcagacaatagcttttttgaacaattaacaccagaagaaacaaagatgttttttgagcacgccaagtcatttttagaacaagaatacggaaaagataatttactttatgcaacggtgcatatggacgaattaacgcctcatatgcattatggtgttgtaccgataacaaaagatggacgattgagtgcgaaagaagtggtaggtaataaaaaagcgctgacggaatttcaagatagatttaatgaatatatcaatagctgtggttatgaattgagtagaggtatatcaagaaaattaatgccgagacaacatgagcaagtgagtcgatataaacagctaacagattatcacaaagaagaatacgagcgtcagagccaaaaattggaccatataaagcaagaaagcaaggaagtaatggaaaagtaccaaaacgctttaaacgttcttaaaacccctttaaatatcccgtataagatcgaaacggaaaaagtaggtggattattcagcaaagaaacacaagaaacaggcaacgtcgttatagataaaaacgagtttgaatcattgcaggagcaagttacagcgtcacagctgattattaaagattatgaatatatcaaagaaggattagcattaaaagaggcgaaacaaagatgtaaacagttagatagtgagctgagagaagagcatctgaaaaatgaggaattagtcgatgactataataatttagctgatagctataatgatttgttagagcagaataaagaaaaagataaagcattgaatcaatcatataatttattcaacaatgtatttagattgattaaaggtgtgatgaaagaagaagcatatcataggttgatcgattatattgataatcacttagagagttcaaaaatgcgagaaacaatgattgtagatgacaacgatgaacagttctttaagaaaaagtatcagagacaagaaccagaaattatttttgaagatgaacgagatgatggctactctttataa

SEQ ID NO: 421274 - DNA, 1380 bp, Staphylococcus aureus
ttgtttagtttatataaaaaatttaaaggtttgttttatagcgttttattttggctttgtattctttcattttttagtgtattaaatgaaatggttttaaatgtttctttacctgatattgcaaatcattttaatactactcctggaattacaaactgggtaaacactgcatatatgttaactttttcgataggaacagcagtatatggaaaattatctgattatataaatataaaaaaattgttaattattggtattagtttgagctgtcttggttcattgattgcttttattggtcacaatcacttttttattttgatttttggtaggttagtacaaggagtaggatctgctgcattcccttcactgcttatggtggttgtagctagaaatattacaagaaaaaaacaaggcaaagcctttggttttataggatcaattgtagctttaggtgaagggttaggtccttcaatagggggaataatagcacattatattcattggtcttacctacttatacttcctatgattacaatagtaactataccttttcttattaaagtaatggtacctggtaaatcaacaaaaaatacattagatatcgtaggtattgttttaatgtctataagtattatatgttttatgttatttacgacaaattataattggacttttttaatactcttcacaatcttttttgtgatttttattaaacatatttcaagagtttctaacccttttattaatcctaaactagggaaaaacattccgtttatgcttggtttgttttctggtgggctaatattttctatagtagctggttttatatcaatggtgccttatatgatgaaaactatttatcatgtaaatgtagcgacaataggtaatagtgttatttttcctggaaccatgagtgttattgtttttggttattttggtggttttttagtggatagaaaaggatcattatttgtttttattttaggatcattgtctatctctataagttttttaactattgcattttttgttgagtttagtatgtggttgactacttttatgtttatatttgttatgggcggattatcttttactaaaacagttatatcaaaaatagtatcaagtagtctttctgaagaagaagttgcttctggaatgagtttgctaaatttcacaagttttttatcagagggaacaggtatagcaattgtaggaggtttattgtcactacaattgattaatcgtaaactagttctggaatttataaattattcttctggagtgtatagtaatattcttgtagccatggctatccttattattttatgttgtcttttgacgattattgtatttaaacgttctgaaaagcagtttgaatag

SEQ ID NO: 421275 - DNA, 1416 bp, Staphylococcus aureus; identical to SEQ ID NO: 421189

SEQ ID NO: 421276 - DNA, 1380 bp, Staphylococcus aureus; identical to SEQ ID NO: 412597

SEQ ID NO: 421277 - DNA, 1416 bp, Staphylococcus aureus
ttgccactcattttttgcgttagcaaaaacaggtttaagcctcgcagagcacacgtattaacgacttattgtaaaataagtctagtgtgttattatactttaataaataaagctacgcaaaatcatgtgcagtggaggtcatttattatgtcatattccattattagaattgctaaagtgaaatcaaaaacgaatacaagaggtattcaaaaacacgtccaaagacaaaataaaaattacgaaaatctggatattgatttggaaaattcatatttaaattatgatttagtgaatgataacttgatcgatttcaatcaaaaaattgatgagaaaattgaacagaattataaaggtgaacgtaaaatcagaaaagatgctgtaaaacatattgatggtttgattacatcagacaatagcttttttgaacaattaacaccagaagaaacaaagatgttttttgagcacgccaagtcatttttagaacaagaatacggaaaagataatttactttatgcaacggtgcatatggacgaattaacgcctcatatgcattatggtgttgtaccgataacaaaagatggacgattgagtgcgaaagaagtggtaggtaataaaaaagcgctgacggaatttcaagatagatttaatgaatatatcaatagctgtggttatgaattgagtagaggtatatcaagaaaattaatgccgagacaacatgagcaagtgagtcgatataaacagttaacagattatcacaaagaagaatacgagcgtcagagccaaaaattggaccatataaagcaagaaagcaaggaagtaatggaaaagtaccaaaacgctttaaacgttcttaaaacccctttaaatatcccgtataagatcgaaacggaaaaagtaggtggattattcagcaaagaaacacaagaaacaggcaacgtcgttatagataaaaacgagtttgaatcattgcaggagcaagttacagcgtcacagctgattattaaagcttatgaatatatcaaagaaggattagcattaaaagaggcgaaacaaagatgtaaacagttagatagtgagctgagagaagagcatctgaaaaatgaggaattagtcgatgactataataatttagctgatagctataatgatttgttagagcagaataaagaaaaagataaagcattgaatcaatcatataatttattcaacaatgtatttagattgattaaaggtgtgatgaaagaagaagcatatcataggttgatcgattatattgataatcacttagagagttcaaaaatgcgagaaacaatgattgtagatgacaacgatgaacagttctttaagaaaaagtatcagagacaagaaccagaaattatttttgaagatgaacgagatgatggctactctttataa

SEQ ID NO: 421278 - DNA, 1380 bp, Staphylococcus aureus; identical to SEQ ID NO: 412597

SEQ ID NO: 421279 - DNA, 1416 bp, Staphylococcus aureus
ttgccactcattttttgcgttagcaaaaacaggtttaagcctcgcagagcacacgtattaacgacttattgtaaaataagtctagtgtgttattatactttaataaataaagctacgcaaaatcatgtgcagtggaggtcatttattatgtcatattccattattagaattgctaaagtgaaatcaaaaacgaatacaagaggtattcaaaaacacgtccaaagacaaaataaaaattacgaaaatctggatattgatttggaaaattcatatttaaattatgatttagtgaatgataacttgatcgatttcaatcaaaaaattgatgagaaaattgaacagaattataaaggtgaacgtaaaatcagaaaagatgctgtaaaacatattgatggtttgattacatcagacaatagcttttttgaacaattaacaccagaagaaacaaagatgttttttgagcacgccaagtcatttttagaacaagaatacggaaaagataatttactttatgcaacggtgcatatggacgaattaacgcctcatatgcattatggtgttgtaccgataacaaaagatggacgattgagtgcgaaagaagtggtaggtaataaaaaagcgctgacggaatttcaagatagatttaatgaatatatcaatagctgtggttatgaattgagtagaggtatatcaagaaaattaatgccgagacaacatgagcaagtgagtcgatataaacagttaacagattatcacaaagaagaatacgagcgtcagagccagaaattggaccatataaagcaagaaagcaaggaagtaatggaaaagtaccaaaacgctttaaacgttcttaaaacccctttaaatatcccgtataagatcgaaacggaaaaagtaggtggattattcagcaaagaaacacaagaaacaggcaacgtcgttatagataaaaacgagtttgaatcattgcaggagcaagttacagcgtcacagctgattattaaagattatgaatatatcaaagaaggattagcattaaaagaggcgaaacaaagatgtaaacagttagatagtgagctgagagaagagcatctgaaaaatgaggaattagtcgatgactataataatttagctgatagctataatgatttgttagagcagaataaagaaaaagataaagcattgaatcaatcatataatttattcaacaatgtatttagattgattaaaggtgtgatgaaagaagaagcatatcataggttgatcgattatattgataatcacttagagagttcaaaaatgcgagaaacaatgattgtagatgacaacgatgaacagttctttaagaaaaagtatcagagacaagaaccagaaattatttttgaagatgaacgagatgatggctactctttataa

SEQ ID NO: 421280 - DNA, 1380 bp, Staphylococcus aureus; identical to SEQ ID NO: 412597

SEQ ID NO: 421281 - DNA, 1416 bp, Staphylococcus aureus; identical to SEQ ID NO: 421189

SEQ ID NO: 421282 - DNA, 1380 bp, Staphylococcus aureus; identical to SEQ ID NO: 412597

SEQ ID NO: 421283 - DNA, 1416 bp, Staphylococcus aureus
ttgccactcattttttgcgttagcaaaaacaggtttaagcctcgcagagcacacgtattaacgacttattgtaaaataagtctagtgtgttattatactttaataaataaagctacgcaaaatcatgtgcagtggaggtcatttattatgtcatattccattattagaattgctaaagtgaaatcaaaaacgaatacaagaggtattcaaaaacacgtccaaagacaaaataaaaattacgaaaatctggatattgatttggaaaattcatatttaaattatgatttagtgaatgataacttgatcgatttcaatcaaaaaattgatgagaaaattgaacagaattataaaggtgaacgtaaaatcagaaaagatgctgtaaaacatattgatggtttgattacatcagacaatagcttttttgaacaattaacaccagaagaaacaaagatgttttttgagcacgccaggtcatttttagaacaagaatacggaaaagataatttactttatgcaacggtgcatatggacgaattaacgcctcatatgcattatggtgttgtaccgataacaaaagatggacgattgagtgcgaaagaagtggtaggtaataaaaaagcgctgacggaatttcaagatagatttaatgaatatatcaatagctgtggttatgaattgagtagaggtatatcaagaaaattaatgccgagacaacatgagcaagtgagtcgatataaacagttaacagattatcacaaagaagaatacgagcgtcagatccaaaaattggaccatataaagcaagaaagcaaggaagtaatggaaaagtaccaaaacgctttaaacgttcttaaaacccctttaaatatcccgtataagatcgaaacggaaaaagtaggtggattattcagcaaagaaacacaagaaacaggcaacgtcgttatagataaaaacgagtttgaatcattgcaggagcaagttacagcgtcacagctgattattaaagattatgaatatatcaaagaaggattagcattaaaagaggcgaaacaaagatgtaaacagttagatagtgagctgagagaagagcatctgaaaaatgaggaattagtcgatgactataataatttagctgatagctataatgatttgttagagcagaataaagaaaaagataaagcattgaatcaatcatataatttattcaacaatgtatttagattgattaaaggtgtgatgaaagaagaagcatatcataggttgatcgattatattgataatcacttagagagttcaaaaatgcgagaaacaatgattgtagatgacaacgatgaacagttctttaagaaaaagtatcagagacaagaaccagaaattatttttgaagatgaacgagatgatggctactctttataa

SEQ ID NO: 421284 - DNA, 1380 bp, Staphylococcus aureus
ttgtttagtttatataaaaaatttaaaggtttgttttatagcgttttattttggctttgtattctttcattttttagtgtattaaatgaaatggttttaaatgtttctttacctgatattgcaaatcattttaatactactcctggaattacaaactgggtaaacactgcatatatgttaactttttcgataggaacagcagtatatggaaaattatctgattatataaatataaaaaaattgttaattattggtattagtttgagctgtcttggttcattgattgcttttattggtcacaatcacttttttattttgatttttggtaggttagtacagggagtaggatctgctgcattcccttcactgattatggtggttgtagctagaaatattacaagaaaaaaacaaggcaaagcctttggttttataggatcaattgtagctttaggtgaagggttaggtccttcaatagggggaataatagcacattatattcattggtcttacctacttatacttcctatgattacaatagtaactataccttttcttattaaagtaatggtacctggtaaatcaacaaaaaatacattagatatcgtaggtattgttttaatgtctataagtattatatgttttatgttatttacgacaaattataattggacttttttaatactcttcacaatcttttttgtgatttttattaaacatatttcaagagtttctaacccttttattaatcctaaactagggaaaaacattccgtttatgcttggtttgttttctggtgggctaatattttctatagtagctggttttatatcaatggtgccttatatgatgaaaactatttatcatgtaaatgtagcgacaataggtaatagtgttatttttcctggaaccatgagtgttattgtttttggttattttggtggttttttagtggatagaaaaggatcattatttgtttttattttaggatcattgtctatctctataagttttttaactattgcattttttgttgagtttagtatgtggttgactacttttatgtttatatttgttatgggcggattatcttttactaaaacagttatatcaaaaatagtatcaagtagtctttctgaagaagaagttgcttctggaatgagtttgctaaatttcacaagttttttatcagagggaacaggtatagcaattgtaggaggtttattgtcactacaattgattaatcgtaaactagttctggaatttataaattattcttctggagtgtatagtaatattcttgtagccatggctatccttattattttatgttgtcttttgacgattattgtatttaaacgttctgaaaagcagtttgaatag

SEQ ID NO: 421285 - DNA, 1416 bp, Staphylococcus aureus; identical to SEQ ID NO: 421189

SEQ ID NO: 421286 - DNA, 1380 bp, Staphylococcus aureus; identical to SEQ ID NO: 412597

SEQ ID NO: 421287 - DNA, 1416 bp, Staphylococcus aureus
ttgccactcattttttgcgttagcaaaaacaggtttaagcctcgcagagcacacgtattaacgacttattgtaaaataagtctagtgtgttattatactttaataaataaagctacgcaaaatcatgtgcagtggaggtcatttattatgtcatattccattattagaattgctaaagtgaaatcaaaaacgaatacaagaggtattcaaaaacacgtccaaagacaaaataaaaattacgaaaatctggatattgatttggaaaattcatatttaaattatgatttagtgaatgataacttgatcgatttcaatcaaaaaattgatgagaaaattgaacagaattataaaggtgaacgtaaaatcagaaaagatgctgtaaaacatattgatggtttgattacatcagacaatagcttttttgaacaattaacaccagaagaaacaaagatgttttttgagcacgccaagtcatttttagaacaagaatacggaaaagataatttactttatgcaacggtgcatatggacgaattaacgcctcatatgcattatggtgttgtaccgataacaaaagatggacgattgagtgcgaaagaagtggtaggtaataaaaaagcgctgacggaatttcaagatagatttaatgaatatatcaatagctgtggttatgaattgagtagaggtatatcaagaaaattaatgccgagacaacatgagcaagtgagtcgatataaacagttaacagattatcacaaagaagaatacgagcgtcagagccaaaaattggaccatataaagcaagaaagcaaggaagtaatggaaaagtaccaaaacgctttaaacgttcttaaaacccctttaaatatcccgtataagatcgaaacggaaaaagtaggtggattattcagcaaagaaacacaagaaacaggcaacgtcgttatagataaaaacgagtttgaaccattgcaggagcaagttacagcgtcacagctgattattaaagattatgaatatatcaaagaaggattagcattaaaagaggcgaaacaaagatgtaaacagttagatagtgagctgagagaagagcatctgaaaaatgaggaattagtcgatgactataataatttagctgatagctataatgatttgttagagcagaataaagaaaaagataaagcattgaatcaatcatataatttattcaacaatgtatttagattgattaaaggtgtgatgaaagaagaagcatatcataggttgatcgattatattgataatcacttagagagttcaaaaatgcgagaaacaatgattgtagatgacaacgatgaacagttctttaagaaaaagtatcagagacaagaaccagaaattatttttgaagatgaacgagatgatggctactctttataa

SEQ ID NO: 421288 - DNA, 1380 bp, Staphylococcus aureus
ttgtttagtttatataaaaaatttaaaggtttgttttatagcgttttattttggctttgtattctttcattttttagtgtattaaatgaaatggttttaaatgtttctttacctgatattgcaaatcattttaatactactcctggaattacaaactgggtaaacactgcatatatgttaactttttcgataggaacagcagtatatggaaaattatctgattatataaatataaaaaaattgttaattattggtattagtttgagctgtcttggttcattgattgcttttattggtcacaatcacttttttattttgatttttggtaggttagtacaaggagtaggatctgctgcattcccttcactgattatggtggttgtagctagaaatattaccagaaaaaaacaaggcaaagcctttggttttataggatcaattgtagctttaggtgaagggttaggtccttcaatagggggaataatagcacattatattcattggtcttacctacttatacttcctatgattacaatagtaactataccttttcttattaaagtaatggtacctggtaaatcaacaaaaaatacattagatatcgtaggtattgttttaatgtctataagtattatatgttttatgttatttacgacaaattataattggacttttttaatactcttcacaatcttttttgtgatttttattaaacatatttcaagagtttctaacccttttattaatcctaaactagggaaaaacattccgtttatgcttggtttgttttctggtgggctaatattttctatagtagctggttttatatcaatggtgccttatatgatgaaaactatttatcatgtaaatgtagcgacaataggtaatagtgttatttttcctggaaccatgagtgttattgtttttggttattttggtggttttttagtggatagaaaaggatcattatttgtttttattttaggatcattgtctatctctataagttttttaactattgcattttttgttgagtttagtatgtggttgactacttttatgtttatatttgttatgggcggattatcttttactaaaacagttatatcaaaaatagtatcaagtagtctttctgaagaagaagttgcttctggaatgagtttgctaaatttcacaagttttttatcagagggaacaggtatagcaattgtaggaggtttattgtcactacaattgattaatcgtaaactagttctggaatttataaattattcttctggagtgtatagtaatattcttgtagccatggctatccttattattttatgttgtcttttgacgattattgtatttaaacgttctgaaaagcagtttgaatag

SEQ ID NO: 421289 - DNA, 1416 bp, Staphylococcus aureus; identical to SEQ ID NO: 421189

SEQ ID NO: 421290 - DNA, 1380 bp, Staphylococcus aureus; identical to SEQ ID NO: 412597

SEQ ID NO: 421291 - DNA, 1416 bp, Staphylococcus aureus
ttgccactcattttttgcgttagcaaaaacaggtttaagcctcgcagagcacacgtattaacgacttattgtaaaataagtctagtgtgttattatactttaataaataaagctacgcaaaatcatgtgcagtggaggtcatttattatgtcatattccattattagaattgctaaagtgaaatcaaaaacgaatacaagaggtattcaaaaacacgtccaaagacaaaataaaaattacgaaaatctggatattgatttggaaaattcatatttaaattatgatttagtgaatgataacttgatcgatttcaatcaaaaaattgatgagaaaattgaacagaattataaaggtgaacgtaaaatcagaaaagatgctgtaaaacatattgatggtttgattacatcagacaatagcttttttgaacaattaacaccagaagaaacaaagatgttttttgagcacgccaagtcatttttagaacaagaatacggaaaagataatttactttatgcaacggtgcatatggacgaattaacgcctcatatgcattatggtgttgtaccgataacaaaagatggacgattgagtgcgaaagaagtggtaggtaataaaaaagcgctgacggaatttcaagatagatttaatgaatatatcaatagctgtggttatgaattgagtagaggtatatcaagaaaattaatgccgagacaacatgagcaagtgagtcgatataaacagttaacagattatcacaaagaagaatacgagcgtcagagccaaaaattggaccatataaagcaagaaagcaaggaagtaatggaaaagtaccaaaacgctttaaacgttcttaaaacccctttaaatatcccttataagatcgaaacggaaaaagtaggtggattattcagcaaagaaacacaagaaacaggcaacgtcgttatagataaaaacgagtttgaatcattgcaggagcaagttacagcgtcacagctgattattaaagattatgaatatatcaaagaaggattagcattaaaagaggcgaaacaaagatgtaaacagttagatagtgagctgagagaagagcatctgaaaaatgaggaattagtcgatgactataataatttagctgatagctataatgatttgttagagcagaataaagaaaaagataaagcattgaatcaatcatataatttattcaacaatgtatttagattgattaaaggtgtgatgaaagaagaagcatatcataggttgatcgattatattgataatcacttagagagttcaaaaatgcgagaaacaatgattgtagatgacaacgatgaacagttctttaagaaaaagtatcagagacaagaaccagaaattatttttgaagatgaacgagatgatggctactctttataa

SEQ ID NO: 421292 - DNA, 1380 bp, Staphylococcus aureus; identical to SEQ ID NO: 412597

SEQ ID NO: 421293 - DNA, 1416 bp, Staphylococcus aureus
ttgccactcattttttgcgttagcaaaaacaggtttaagcctcgcagagcacacgtattaacgacttattgtaaaataagtctagtgtgttattatactttaataaataaagctacgcaaaatcatgtgcagtggaggtcatttattatgtcatattccattattagaattgctaaagtgaaatcaaaaacgaatacaagaggtattcaaaaacacgtccaaagacaaaataaaaattacgaaaatctggatattgatttggaaaattcatatttaaattatgatttagtgaatgataacttgatcgatttcaatcaaaaaattgatgagaaaattgaacagaattataaaggtgaacgtaaaatcagaaaagatgctgtaaaacatattgatggtttgattacatcagacaatagcttttttgaacaattaacaccagaagaaacaaagatgttttttgagcacgccaagtcatttttagaacaagaatacggaaaagataatttactttatgcaacggtgcatatggacgaattaacgccgcatatgcattatggtgttgtaccgataacaaaagatggacgattgagtgcgaaagaagtggtaggtaataaaaaagcgctgacggaatttcaagatagatttaatgaatatatcaatagctgtggttacgaattgagtagaggtatatcaagaaaattaatgccgagacaacatgagcaagtgagtcgatataaacagttaacagattatcacaaagaagaatacgagcgtcagagccaaaaattggaccatataaagcaagaaagcaaggaagtaatggaaaagtaccaaaacgctttaaacgttcttaaaacccctttaaatatcccgtataagatcgaaacggaaaaagtaggtggattattcagcaaagaaacacaagaaacaggcaacgtcgttatagataaaaacgagtttgaatcattgcaggagcaagttacagcgtcacagcttattattaaagattatgaatatatcaaagaaggattagcattaaaagaggcgaaacaaagatgtaaacagttagatagtgagctgagagaagagcatctgaaaaatgaggaattagtcgatgactataataatttagctgatagctataatgatttgttagagcagaataaagaaaaagataaagcattgaatcaatcatataatttattcaacaatgtatttagattgattaaaggtgtgatgaaagaagaagcatatcataggttgatcgattatattgataatcacttagagagttcaaaaatgcgagaaacaatgattgtagatgacaacgatgaacagttctttaagaaaaagtatcagagacaagaaccagaaattatttttgaagatgaacgagatgatggctactctttataa

SEQ ID NO: 421294 - DNA, 1380 bp, Staphylococcus aureus; identical to SEQ ID NO: 412597

SEQ ID NO: 421295 - DNA, 1416 bp, Staphylococcus aureus; identical to SEQ ID NO: 421189

SEQ ID NO: 421296 - DNA, 1416 bp, Staphylococcus aureus
ttgccactcattttttgcgttagcaaaaacaggtttaagcctcgcagagcacacgtattaacgacttattgtaaaataagtctagtgtgttattatactttaataaataaagctacgcaaaatcatgtgcagtggaggtcatttattatgtcatattccattattagaattgctaaagtgaaatcaaaaacgaatacaagaggtattcaaaaacacgtccaaagacaaaataaaaattacgaaaatctggatattgatttggaaaattcatatttaaattatgatttagtgaatgataacttgatcgatttcaatcaaaaaattgatgagaaaattgaacagaattataaaggtgaacgtaaaatcagaaaagatgctgtaaaacatattgatggtttgattacatcagacaatagcttttttgaacaattaacaccagaagaaacaaagatgttttttgagcacgccaagtcatttttagaacaagaatacggaaaagataatttactttatgcaacggtgcatatggacgaattaacgcctcatatgcattatggtgttgtaccgataacaaaagatggacgattgagtgcgaaagaagtggtaggtaataaaaaagcgctgacggaatttcaagatagatttaatgagtatatcaatagctgtggttatgaattgagtagaggtatatcaagaaaattaatgccgagacaacatgagcaagtgagtcgatataaacagttaacagattatcacaaagaagaatacgagcgtcagagccaaaaattggaccatataaagcaagaaagcaaggaagtaatggaaaagtaccaaaaccctttaaacgttcttaaaacccctttaaatatcccgtataagatcgaaacggaaaaagtaggtggattattcagcaaagaaacacaagaaacaggcaacgtcgttatacataaaaacgagtttgaatcattgcaggagcaagttacagcgtcacagctgattattaaagattatgaatatatcaaagaaggattagcattaaaagaggcgaaacaaagatgtaaacagttagatagtgagctgagagaagagcatctgaaaaatgaggaattagtcgatgactataataatttagctgatagctataatgatttgttagagcagaataaagaaaaagataaagcattgaatcaatcatataatttattcaacaatgtatttagattgattaaaggtgtgatgaaagaagaagcatatcataggttgatcgattatattgataatcacttagagagttcaaaaatgcgagaaacaatgattgtagatgacaacgatgaacagttctttaagaaaaagtatcagagacaagaaccagaaattatttttgaagatgaacgagatgatggctactctttataa

SEQ ID NO: 421297 - DNA, 1380 bp, Staphylococcus aureus; identical to SEQ ID NO: 412597

SEQ ID NO: 421298 - DNA, 1416 bp, Staphylococcus aureus
ttgccactcattttttgcgttagcaaaaacaggtttaagcctcgcagagcacacgtattaacgacttattgtaaaataagtctagtgtgttattatactttaataaataaagctacgcaaaatcatgtgcagtggaggtcatttattatgtcatattccattattagaattgctaaagtgaaatcaaaaacgaatacaagaggtattcaaaaacacgtccaaagacaaaataaaaattacgaaaatctggatattgatttggaaaattcatatttaaattatgatttagtgaatgataacttgatcgatttcaatcaaaaaattgatgagaaaattgaacagaattataaaggtgaacgtaaaatcagaaaagatgctgtaaaacatattgatggtttgattacatcagacaatagcttttttgaacaattaacaccagaagaaacaaagatgttttttgagcacgccaagtcatttttagaacaagaatacggaaaagataatttactttatgcaacggtgcatatggacgaattaacgcctcatatgcattattgtgttgtaccgataacaaaagatggacgattgagtgcgaaagaagtggtaggtaataaaaaagcgctgacggaatttcaagatagatttaatgaatatatcaatagctgtggttatgaattgagtagaggtatatcaagaaaattaatgccgagacaacatgagcaagtgagtcgatataaacagttaacagattatcacaaagaagaatacgagcgtcagagccaaaaattggacgatataaagcaagaaagcaaggaagtaatggaaaagtaccaaaacgctttaaacgttcttaaaacccctttaaatatcccgtataagatcgaaacggaaaaagtaggtggattattcagcaaagaaacacaagaaacaggcaacgtcgttatagataaaaacgagtttgaatcattgcaggagcaagttacagcgtcacagctgattattaaagattatgaatatatcaaagaaggattagcattaaaagaggcgaaacaaagatgtaaacagttagatagtgagctgagagaagagcatctgaaaaatgaggaattagtcgatgactataataatttagctgatagctataatgatttgttagagcagaataaagaaaaagataaagcattgaatcaatcatataatttattcaacaatgtatttagattgattaaaggtgtgatgaaagaagaagcatatcataggttgatcgattatattgataatcacttagagagttcaaaaatgcgagaaacaatgattgtagatgacaacgatgaacagttctttaagaaaaagtatcagagacaagaaccagaaattatttttgaagatgaacgagatgatggctactctttataa

SEQ ID NO: 421299 - DNA, 1380 bp, Staphylococcus aureus; identical to SEQ ID NO: 412597

SEQ ID NO: 421300 - DNA, 1416 bp, Staphylococcus aureus
ttgccactcattttttgcgttagcaaaaacaggtttaagcctcgcagagcacacgtattaacgacttattgtaaaataagtctagtgtgttattatactttaataaataaagctacgcaaaatcatgtgcagtggaggtcatttattatgtcatattccattattagaattgctaaagtgaaatcaaaaacgaatacaagaggtattcaaaaacacgtccaaagacaaaataaaaattacgaaaatctggatattgatttggaaaattcatatttaaattatgatttagtgaatgataacttgatcgatttcaatcaaaaaattgatgagaaaattgaacagaattataaaggtgaacgtaaaatcagaaaagatgctgtaaaacatattgatggtttgattacatcagacaatagcttttttgaacaattaacaccagaagaaacaaagatgttttttgagcacgccaagtcatttttagaacaagaatacggaaaagataatttactttatgcaacggtgcatatggacgaattaacgcctcatatgcattatggtgttgtaccgataacaaaagatggacgattgagtgcgaaagaagtggtaggtaataaaaaagcgctgacggaatttcaagatagatttaatgaatatatcaatagctgtggttatgaattgagtagaggtatatcaagaaaattaatgccgagacaacatgagcaagtgagtcgatataaacagttaacagattatcacaaagaagaatacgagcgtcagagccaaaaattggaccatataaagcaagaaagcaaggaagtaatggaaaagtaccaaaacgctttaaacgttcttaaaacccctttaaatatcccgtataagatcgaaacggaaaaagtaggtggattattcagcaaagaaacacaagaaacaggcaacgtcgttatagataaaaacgagtttgaatcattgcaggagcaagttacagcgtcacagctgattattaaagattatgaatatatcaaagaaggattagcattaaaagaggcgaaacaaagatgtaaacagttagatagtgagctgagagaagagcatctgaaaaatgaggaattagtcgatgactataataatttagctgatagctataatgatttgttagagcagaataaagaaaaagataaagcattgaatcaatcatataatttattcaacaatgtatttagattgattaaaggtgtgatgaaagaagaagcatatcataggttgatcgattatattgataatcacttagagagttcaaaaatgcgagaaacaatgattgtagatgaccacgatgaacagttctttaagaaaaagtatcagagacaagaaccagaaattatttttgaagatgaacgagatgatggctactctttataa

SEQ ID NO: 421301 - DNA, 1380 bp, Staphylococcus aureus; identical to SEQ ID NO: 412597

SEQ ID NO: 421302 - DNA, 891 bp, Staphylococcus aureus
atggacgaattaacgcctcatatgcattatggtgttgtaccgataacaaaagatggacgattgagtgcgaaagaagtggtaggtaataaaaaagcgctgacggaatttcaagatagatttaatgaatatatcaatagctgtggttatgaattgagtagaggtatatcaagaaaattaatgccgagacaacatgaccaagagagtcgatataaacagttaacagattatcacaaagaagaatacgagcgtcagagccaaaaattggaccatataaagcaagaaagcaaggaagtaatggaaaagtaccaaaacgctttaaacgttcttaaaacccctttaaatatcccgtataagatcgaaacggaaaaagtaggtggattattcagcaaagaaacacaagaaacaggcaacgtcgttatagataaaaacgagtttgaatcattgcaggagcaagttacagcgtcacagctgattattaaagattatgaatatatcaaagaaggattagcattaaaagaggcgaaacaaagatgtaaacagttagatagtgagctgagagaagagcatctgaaaaatgaggaattagtcgatgactataataatttagctgatagctataatgatttgttagagcagaataaagaaaaagataaagcattgaatcaatcatataatttattcaacaatgtatttagattgattaaaggtgtgatgaaagaagaagcatatcataggttgatcgattatattgataatcacttagagagttcaaaaatgcgagaaacaatgattgtagatgacaacgatgaacagttctttaagaaaaagtatcagagacaagaaccagaaattatttttgaagatgaacgagatgatggctactctttataa

SEQ ID NO: 421303 - DNA, 507 bp, Staphylococcus aureus
ttgccactcattttttgcgttagcaaaaacaggtttaagcctcgcagagcacacgtattaacgacttattgtaaaataagtctagtgtgttattatactttaataaataaagctacgcaaaatcatgtgcagtggaggtcatttattatgtcatattccattattagaattgctaaagtgaaatcaaaaacgaatacaagaggtattcaaaaacacgtccaaagacaaaataaaaattacgaaaatctggatattgatttggaaaattcatatttaaattatgatttagtgaatgataacttgatcgatttcaatcaaaaaattgatgagaaaattgaacagaattataaaggtgaacgtaaaatcagaaaagatgctgtaaaacatattgatggtttgattacatcagacaatagcttttttgaacaattaacaccagaagaaacaaagatgttttttgagcacgccaagtcatttttagaacaagaatacggaaaagataattga

SEQ ID NO: 421304 - DNA, 1380 bp, Staphylococcus aureus; identical to SEQ ID NO: 412597

SEQ ID NO: 421305 - DNA, 1416 bp, Staphylococcus aureus; identical to SEQ ID NO: 421189

SEQ ID NO: 421306 - DNA, 1380 bp, Staphylococcus aureus
ttgtttagtttatataaaaaatttaaaggtttgttttatagcgttttattttggctttgtattctttcattttttagtgtattaaatgaaatggttttaaatgtttctttacctgatattgcaaatcattttaatactactcctggaattacaaactgggtaaacactgcatatatgttaactttttcgataggaacagcagtatatggaaaattatctgattatataaatataaaaaaattgttaattattggtattagtttgagctgtcttggttcattgattgcttttattggtcacaatcacttttttattttgatttttggtaggttagtacaaggagtaggatctgctgcattcccttcactgattatggtggttgtagctagaaatattacaagaaaaaaacaaggcaaagcctttggttttataggatcaattgtagctttaggtgaagggttaggtccttcaatagggggaataatagcacattatattcattggtcttacctacttatacttcctatgattacaatagtaactataccttttcttattaaagtaatggtacctggtaaatcaacaaaaaatacattagatatcgtaggtattgttttaatgtctataagtattatatgttttatgttatttacgacaaattataattggacttttttaatactcttcacaatcttttttgtgatttttattaaacatatttcaagagtttctaacccttttattaatcctaaactagggaaaaacattccgtttatgcttggtttgttttctggtgggctaatattttctatagtagctggttttatatcaatggtgccttatatgatgaaaactatttatcatgtaaatgtagcgacaataggtaatagtgttatttttcctggaaccatgagtgttattgtttttggttattttggtggttttttagtggatagaaaaggatcattatttgtttttattttaggatcattgtctatctctataagttttttaactattgcattttttgttgagtttagtatgtggttgactacttttatgtttatatttgttatgggcggattatcttttactaaaacagttatatcaaaaatagtatcaagtagtctttctgaagaagaagttgcttctggaatgagtttgctaaatttcacaagttttttatcagagggaacaggtatagcaattgtaggaggtttattgccactacaattgattaatcgtaaacgagttctggaatttataaattattcttctggagtgtatagtaatattcttgtagccatggctatccttattattttatgttgtcttttgacgattattgtatttaaacgttctgaaaagcagtttgaatag

SEQ ID NO: 421307 - DNA, 1416 bp, Staphylococcus aureus
ttgccactcattttttgcgttagcaaaaacaggtttaagcctcgcagagcacacgtattaacgacttattgtaaaataagtctagtgtgctattatactttaataaataaagctacgcaaaatcatgtgcagtggaggtcatttattatgtcatattccattattagaattgctaaagtgaaatcaaaaacgaatacaagaggtattcaaaaacacgtccaaagacaaaataaaaattacgaaaatctggatattgatttggaaaattcatatttaaattatgatttagtgaatgataacttgatcgatttcaatcaaaaaattgatgagaaaattgaacagaattataaaggtgaacgtaaaatcagaaaagatgctgtaaaacatattgatggtttgattacatcagacaatagcttttttgaacaattaacaccagaagaaacaaagatgttttttgagcacgccaagtcatttttagaacaagaatacggaaaagataatttactttatgcaacggtgcatatggacgaattaacgcctcatatgcattatggtgttgtaccgataacaaaagatggacgattgagtgcgaaagaagtggtaggtaataaaaaagcgctgacggaatttcaagatagatttaatgaatatatcaatagctgtggttatgaattgagtagaggtatatcaagaaaattaatgccgagacaacatgagcaagtgagtcgatataaacagttaacagattatcacaaagaagaatacgagcgtcagagccaaaaattggaccatataaagcaagaaagcaaggaagtaatggaaaagtaccaaaacgctttaaacgttcttaaaacccctttaaatatcccgtataagatcgaaacggaaaaagtaggtggattattcagcaaagaaacacaagaaacaggcaacgtcgttatagataaaaacgagtttgaatcattgcaggagcaagttacagcgtcacagctgattattaaagattatgaatatatcaaagaaggattagcattaaaagaggcgaaacaaagatgtaaacagttagatagtgagctgagagaagagcatctgaaaaatgaggaattagtcgatgactataataatttagctgatagctataatgatttgttagagcagaataaagaaaaagataaagcattgaatcaatcatataatttattcaacaatgtatttagattgattaaaggtgtgatgaaagaagaagcatatcataggttgatcgattatattgataatcacttagagagttcaaaaatgcgagaaacaatgattgtagatgacaacgatgaacagttctttaagaaaaagtatcagagacaagaaccagaaattatttttgaagatgaacgagatgatggctactctttataa

SEQ ID NO: 421308 - DNA, 1380 bp, Staphylococcus aureus
ttgtttagtttatataaaaaatttaaaggtttgttttatagcgttttattttggctttgtattctttcattttttagtgtattaaatgaaatggttttaaatgtttctttacctgatattgcaaatcattttaatactactcctggaattacaaactgggtaaacactgcatatatgttaactttttcgataggaacagcagtatatggaaaattatctgattatataaatataaaaaaattgttaattattggtattagtttgagctgtcttggttcattgattgcttttattggtcacaatcacttttttattttgatttttggtaggttagtacaaggagtaggatctgctgcattcccttcactgattatggtggttgtagctagaaatattacaagaaaaaaacaaggcaaagcctttggttttataggatcaattgtagctttaggtgaagggttaggtccttcaatagggggaataatagcacattatattcattggtcttacctacttatacttcctatgattacaatagtaactataccttttcttattaaagtaatggtacctggtaaatcaacaaaaaatacattagatatcgtaggtattgttttaatgtctataagtattatatgttttatgttatttacgacaaattataattggacttttttaatactcttcacaatcttttttgtgatttttattaaacatatttcaagagtttctaacccttttattaatcctaaactagggaaaaacattccgtttatgcttggtttgttttctggtgggctaatattttctatagtagctggttttatatcaatggtgccttatatgatgaaaactatttatcatgtaaatgtagcgacaataggtaatagtgttatttttcctggaaccatgagtgttattgtttttggttattttggtggttttttagtggatagaaaaggatcattatttgtttttattttaggatcattgtctatctctataagttttttaactattgcattttttgttgagtttagtatgtggttgactacttttatgtttatatttgttatgggcggattatcttttactaaaacagttatatcaaaaatagtatcaagtagtctttctgaagaagaagttgcttctggaatgagtttgctaaatttcacaagttttttatcagagggaacaggtatagcaattgcaggaggtttattgtcactacaattgattaatcgtaaactagttctggaatttataaattattcttctggagtgtatagtaatattcttgtagccatggctatccttattattttatgttgtcttttgacgattattgtatttaaacgttctgaaaagcagtttgaatag

SEQ ID NO: 421309 - DNA, 1416 bp, Staphylococcus aureus
ttgccactcattttttgcgttagcaaaaacaggtttaagcctcgcagagcacacgtattaacgacttattgtaaaataagtctagtgtgttattatactttaataaataaagctacgcaaaatcatgtgcagtggaggtcatttattatgtcatattccattattagaattgctaaagtgaaatcaaaaacgaatacaagaggtattcaaaaacacgtccaaagacaaaataaaaattacgaaaatctggatattgatttggaaaattcatatttaaattatgatttagtgaatgataacttgatcgatttcaatcaaaaaattgatgagaaaattgaacagaattataaaggtgaacgtaaaatcagaaaagatgctgtaaaacatattgatggtttgattacatcagacaatagcttttttgaacaattaacaccagaagaaacaaagatgttttttgagcacgccaagtcatttttagaacaagaatacggaaaagataatttactttatgcaacggtgcatatggacgaattaacgcctcatatgcattatggtgttgtaccgataacaaaagatggacgattgagtgcgaaagaagtggtaggtaataaaaaagcgctgacggaatttcaagatagatttaatgaatatatcaaaagctgtggttatgaattgagtagaggtatatcaagaaaattaatgccgagacaacatgagcaagtgagtcgatataaacagttaacagattatcacaaagaagaatacgagcgtcagagccaaaaattggaccatataaagcaagaaagcaaggaagtaatggaacagtaccaaaacgctttaaacgttcttaaaacccctttaaatatcccgtataagatcgaaacggaaaaagtaggtggattattcagcaaagaaacacaagaaacaggcaacgtcgttatagataaaaacgagtttgaatcattgcaggagcaagttacagcgtcacagctgattattaaagattatgaatatatcaaagaaggattagcattaaaagaggcgaaacaaagatgtaaacagttagatagtgagctgagagaagagcatctgaaaaatgaggaattagtcgatgactataataatttagctgatagctataatgatttgttagagcagaataaagaaaaagataaagcattgaatcaatcatataatttattcaccaatgtatttaaattgattaaaagtgtgatgaaagaagaagcatatcataggttgatcgattatattgataatcacttagagagttcaaaaatgcgagaaacaatgattgtagatgacaacgatgaacagttctttaagaaaaagtatcagagacaagaaccagaaattatttttgaagatgaacgagatgatggctactctttataa

SEQ ID NO: 421310 - DNA, 1380 bp, Staphylococcus aureus; identical to SEQ ID NO: 412597

SEQ ID NO: 421311 - DNA, 1416 bp, Staphylococcus aureus; identical to SEQ ID NO: 421189

SEQ ID NO: 421312 - DNA, 1380 bp, Staphylococcus aureus
ttgtttagtttatataaaaaatttaaaggtttgttttatagcgttttattttggctttgtattctttcattttttagtgtattaaatgaaatggttttaaatgtttctttacctgatattgcaaatcattttaatactactcctggaattacaaactgggtaaacactgcatatatgttaactttttcgataggaacagcagtatatggaaaattatctgattatataaatataaaaaaattgttaattattggtattagtttgagctgtcttggttcattgattgcttttattggtcacaatcacttttttattttgatttttggtaggttagtacaaggagtaggatctgctgcattcccttcactgattatggtggttgtagctagaaatattacaagaaaaaaacaaggcaaagcctttggttttataggatcaattgtagctttaggtgaagggttaggtccttcaatagggggaataatagcacattatattcattggtcttacctacttatacttcctatgattacaatagtaattataccttttcttattaaagtaatggtacctggtaaatcaacaaaaaatacattagatatcgtaggtattgttttaatgtctataagtattatatgttttatgttatttacgacaaattataattggacttttttaatactcttcacaatcttttttgtgatttttattaaacatatttcaagagtttctaacccttttattaatcctaaactagggaaaaacattccgtttatgcttggtttgttttctggtgggctaatattttctatagtagctggttttatatcaatggtgccttatatgatgaaaactatttatcatgtaaatgtagcgacaataggtaatagtgttatttttcctggaaccatgagcgttattgtttttggttattttggtggttttttagtggatagaaaaggatcattatttgtttttattttaggatcattgtctatctctataagttttttaactattgcattttttgttgagtttagtatgtggttgactacttttatgtttatatttgttatgggcggattatcttttactaaaacagttatatcaaaaatagtatcaagtagtctttctgaagaagaagttgcttctggaatgagtttgctaaatttcacaagttttttatcagagggaacaggtatagcaattgtaggaggtttattgtcactacaattgattaatcgtaaactagttctggaatttataaattattcttctggagtgtatagtaatattcttgtagccatggctatccttattattttatgttgtcttttgacgattattgtatttaaacgttctgaaaagcagtttgaatag

SEQ ID NO: 421313 - DNA, 1416 bp, Staphylococcus aureus; identical to SEQ ID NO: 421189

SEQ ID NO: 421314 - DNA, 1380 bp, Staphylococcus aureus
ttgtttagtttatataaaaaatttaaaggtttgttttatagcgttttattttggctttgtattctttcattttttagtgtattaaatgaaatggttttaaatgtttctttacctgatattgcaaatcattttaatactactcctggaattacaaactgggtaaacactgcatatatgttaactttttcgataggaacagcagtatatggaaaattatctgattatataaatataaaaaaattgttaattattggtattagtttgagctgtcttggttcattgattgcttttattggtcacaatcacttttttattttgatttttggtaggttagtacaaggagtaggatctgctgcattcccttcacggattatggtggttgtagctagaaatattacaagaaaaaaacaaggcaaagcctttggttttataggatcaattgtagctttaggtgaagggttaggtccttcaatagggggaataatagcacattatattcattggtcttacctacttatacttcctatgattacaatagtaactataccttttcttattaaagtaatggtacctggtaaatcaacaaaaaatacattagatatcgtaggtattgttttaatgtctataagtattatatgttttatgttatttacgacaaattataattggacttttttaatactcttcacaatcttttttgtgatttttattaaacatatttcaagagtttctaacccttttattaatcctaaactagggaaaaacattccgtttatgcttggtttgttttctggtgggctaatattttctatagtagctggttttatatcaatggtgccttatatgatgaaaactatttatcatgtaaatgtagcgacaataggtaatagtgttatttttcctggaaccatgagtgttattgtttttggttattttggtggttttttagtggatagaaaaggatcattatttgtttttattttaggatcattgtctatctctataagttttttaactattgcattttttgttgagtttagtatgtggttgactacttttatgtttatatttgttatgggcggattatcttttactaaaacagttatatcaaaaatagtatcaagtagtctttctgaagaagaagttgcttctggaatgagtttgctaaatttcacaagttttttatcagagggaacaggtatagcaattgtaggaggtttattgtcactacaattgattaatcgtaaactagttctggaatttataaattattcttctggagtgtatagtaatattcttgtagccatggctatccttattattttatgttgtcttttgacgattattgtatttaaacgttctgaaaagcagtttgaatag

SEQ ID NO: 421315 - DNA, 1416 bp, Staphylococcus aureus; identical to SEQ ID NO: 421189

SEQ ID NO: 421316 - DNA, 1380 bp, Staphylococcus aureus
ttgtttagtttatataaaaaatttaaaggtttgttttatagcgttttattttggctttgtattctttcattttttagtgtattaaatgaaatggttttaaatgtttctttacctgatattgcaaatcattttaatactactcctggaattacaaactgggtaaacactgcatatatgttaactttttcgataggaacagcagtatatggaaaattatctgattatataaatataaaaaaattgttaattattggtattagtttgagctgtcttggttcattgattgcttttattggtcacaatcacttttttattttgatttttggtaggttagtacaaggagtaggatctgctgcattcccttcactgattatggtggttgtagctagaaatattacaagaaaaaaacaaggcaaagcctttggttttataggatcaattgtagctttaggtgaagggttaggtccttcaatagggggaataatagcacattatattcattggtcttacctacttatacttcctatgattacaatagtaactataccttttcttattaaagtaatggtacctggtaaatcaacaaaaaatacattagatatcgtaggtattgttttaatgtctataagtattatatgttttatgttatttacgacaaattataattggacttttttaatactcttcacaatcttttttgtgatttttattaaacatatttcaagagtttctaacccttttattaatcctaaactagggaaaaacattccgtttatgcttggtttgttttctggtgggctaatattttctatagtagctggttttatatcaatggtgccttatatgatgaaaactatttatcatgtaaatgtagcgacaataggtaatagtgttatttttcctggaaccatgagtgttattgtttttggtcattttggtggttttttagtggatagaaaaggatcattatttgtttttattttaggatcattgtctatctctataagttttttaactattgcattttttgttgagtttagtatgtggttgactacttttatgtttatatttgttatgggcggattatcttttactaaaacagttatatcaaaaatagtatcaagtagtctttctgaagaagaagttgcttctggaatgagtttgctaaatttcacaagttttttatcagagggaacaggtatagcaattgtaggaggtttattgtcactacaattgattaatcgtaaactagttctggaatttataaattattcttctggagtgtatagtaatattcttgtagccatggctatccttattattttatgttgtcttttgacgattattgtatttaaacgttctgaaaagcagtttgaatag

SEQ ID NO: 421317 - DNA, 1416 bp, Staphylococcus aureus
ttgccactcattttttgcgttagcaaaaacaggtttaagcctcgcagagcacacgtattaacgacttattgtaaaataagtctagtgtgttattatactttaataaataaagctacgcaaaatcatgtgcagtggaggtcatttattatgtcatattccattattagaattgctaaagtgaaatcaaaaacgaatacaagaggtattcaaaaacacgtccaaagacaaaataaaaattacgaaaatctggatattgatttggaaaattcatatttaaattatgatttagtgaatgataacttgatcgatttcaatcaaaaaattgatgagaaaattgaacagaattataaaggtgaacgtaaaatcagaaaagatgctgtaaaacatattgatggtttgattacatcagacaatagcttttttgaacaattaacactagaagaaacaaagatgttttttgagcacgccaagtcatttttagaacaagaatacggaaaagataatttactttatgcaacggtgcatatggacgaattaacgcctcatatgcattatggtgttgtaccgataacaaaagatggacgattgagtgcgaaagaagtggtaggtaataaaaaagcgctgacggaatttcaagatagatttaatgaatatatcaatagctgtggttatgaattgagtagaggtatatcaagaaaattaatgccgagacaacatgagcaagtgagtcgatataaacagttaacagattatcacaaagaagaatacgagcgtcagagccaaaaattggaccatataaagccagaaagcaaggaagtaatggaaaagtaccaaaacgctttaaacgttcttaaaacccctttaaatatcccgtataagatcgaaacggaaaaagtaggtggattattcagcaaagaaacacaagaaacaggcaacgtcgttatagataaaaacgagtttgaatcattgcaggagcaagttacagcgtcacagctgattattaaagattatgaatatatcaaagaaggattagcattaaaagaggcgaaacaaagatgtaaacagttagatagtgagctgagagaagagcatctgaaaaatgaggaattagtcgatgactataataatttagctgatagctataatgatttgttagagcagaataaagaaaaagataaagcattgaatcaatcatataatttattcaacaatgtatttagattgattaaaggtgtgatgaaagaagaagcatatcataggttgatcgattatattgataatcacttagagagttcaaaaatgcgagaaacaatgattgtagatgacaacgatgaacagttctttaagaaaaagtatcagagacaagaaccagaaattatttttgaagatgaacgagatgatggctactctttataa

SEQ ID NO: 421318 - DNA, 1380 bp, Staphylococcus aureus; identical to SEQ ID NO: 412597

SEQ ID NO: 421319 - DNA, 1416 bp, Staphylococcus aureus; identical to SEQ ID NO: 421189

SEQ ID NO: 421320 - DNA, 1380 bp, Staphylococcus aureus
ttgtttagtttatataaaaaatttaaaggtttgttttatagcgttttattttggctttgtattctttcattttttagtgtattaaatgaaatggttttaaatgtttctttacctgatattgcaaatcattttaatactactcctggaattacaaactgggtaaacactgcatatatgttaactttttcgataggaacagcagtatatggaaaattatctgattatataaatataaaaaaattgttaattattggtattagtttgagctgtcttggttcattgattgcttttattggtcacaatcacttttttattttgatttttggtaggttagtacaaggagtaggatctgctgcattcccttcactgattatggtggttgtagctagaaatattacaagaaaaaaacaaggcaaagcctttggttttataggatcaattgtagctttaggtgaagggttaggtccttcaatagggggaataatagcacattatattcattggtcttacctacttatacttcctatgattacaatagtaactataccttttcttattaaagtaatggtacctggtaaatcaacaaaaaatacattagatatcgtaggtattgttttaatgtctataagtattatatgttttatgttatttacgacaaattataattggacttttttaatactcttcacaatcttttttgtgatttttattaaacatatttcaagagtttcgaacccttttatgaatcctaaactagggaaaaacattccgtttatgcttggtttgttttctggtgggctaatattttctatcgtagctggttttatatcaatggtgccttatatgatgaaaactatttatcatgtaaatgtagcgacaataggtaatagtgttatttttcctggaaccatgagtgttattgtttttggttattttggtggttttttagtggatagaaaaggatcattatttgtttttattttaggatcattgtctatctctataagttttttaactattgcattttttgttgagtttagtatgtggttgactacttttatgtttatatttgttatgggcggattatcttttactaaaacagttatatcaaaaatagtatcaagtagtctttctgaagaagaagttgcttctggaatgagtttgctaaatttcacaagttttttatcagagggaacaggtatagcaattgtaggaggtttattgtcactacaattgattaatcgtaaactagttctggaatttataaattattcttctggagtgtatagtaatattcttgtagccatggctatccttattattttatgttgtcttttgacgattattgtatttaaacgttctgaaaagcagtttgaatag

SEQ ID NO: 421321 - DNA, 1416 bp, Staphylococcus aureus
ttgccactcattttttgcgttagcaaaaacaggtttaagcctcgcagagcacacgtattaacgacttattgtaaaataagtctagtgtgttattatactttaataaataaagctacgcaaaatcatgtgcagtggaggtcatttattatgtcatattccattattagaattgctaaagtgaaatcaaaaacgaatacaagaggtattcaaaaacacgtccaaagacaaaataaaaattacgaaaatctggatattgatttggaaaattcatatttaaattatgatttagtgaatgataacttgatcgatttcaatcaaaaaattgatgagaaaattgaacagaattataaaggtgaacgtaaaatcagaaaagatgctgtaaaacatattgatggtttgattacatcagacaatagcttttttgaacaattaacaccagaagaaacaaagatgttttttgagcacgccaagtcatttttagaacaagaatacggaaaagataatttactttatgcaacggtgcatatggacgaattaacgcctcatatgcattatggtgttgtaccgataacaaaagatggacgattgagtgcgaaagaagtggtaggtaataaaaaagcgctgacggaatttcaagatagatttaatgaatatatcaatagctgtggttatgaattgagtagaggtatatcaagaaaattaatgccgagacaacatgagcaagtgagtcgatataaacagttaacagattatcacaaagaagaatacgagcgtcagagccaaaaattggaccatataaagcaagaaagcaaggaagtaatggaaaagtaccaaaacgctttaaacgttcttaaaacccctttaaatatcccgtataagatcgaaacggaaaaagtaggtggattattcagcaaagaaacacaagaaacaggcaacgtcgttatagataaaaacgagtttgaatcattgcaggagcaagttacagcgtcacagctgattattaaagattatgaatatatcaaagaaggattagcattaaaagaggcgaaacaaagatgtaaacagttagatagtgagctgagagaagagcatctgaaaaatgaggaattagtcgatgactataataatttagctgatagctataatgatttgttagagcagaataaagaaaaagataaagcattgaatcaatcatataatttattcaacaatgtatttagattgattaaaggtgtgatgaaagaagaagcatatcataggttgatcgattatattgataatcacttagagcgttcaaaaatgcgagaaacaatgattgtagatgacaacgatgaacagttctttaagaaaaagtatcagagacaagaaccagaaattatttttgaagatgaacgagatgatggctactctttataa

SEQ ID NO: 421322 - DNA, 1380 bp, Staphylococcus aureus; identical to SEQ ID NO: 412597

SEQ ID NO: 421323 - DNA, 1416 bp, Staphylococcus aureus
ttgccactcattttttgcgttagcaaaaacaggtttaagcctcgcagagcacacgtattaacgacttattgtaaaataagtctagtgtgttattatactttaataaataaagctacgcaaaatcatgtgcagtggaggtcatttattatgtcatattccattattagaattgctaaagtgaaatcaaaaacgaatacaagaggtattcaaaaacacgtccaaagacaaaataaaaattacgaaaatctggatattgatttggaaaattcatatttaaattatgatttagtgaatgataacttgatcgatttcaatcaaaaaattgatgagaaaattgaacagaattataaaggtgaacgtaaaatcagaaaagatgctgtaaaacatattgatggtttgattacatcagacaatagcttttttgaacaattaacaccagaagaaacaaagatgttttttgagcacgccaagtcatttttagaacaagaatacggaaaagataatttactttatgcaacggtgcatatggacgaattaacgcctcatatgcattatggtgttgtaccgataacaaaagatggacgattgagtgcgaaagaagtggtaggtaataaaaaagcgctgacggaatttcaagatagatttaatgaatatatcaatagctgtggttatgaattgagtagaggtatatcaagaaaattaatgccgagacaacatgagcaagtgagtcgatataaacagttaacagattatcacaaagaagaatacgagcgtcagagccaaaaattggaccatataaagcaagaaagcaaggaagtaatggaaaagtaccaaaacgctttaaacgttcttaaaacccctttaaatatcccgtataagatcgaaaccgaaaaagtaggtggattattcagcaaagaaacacaagaaacaggcaacgtcgttatagataaaaacgagtttgaatcattgcaggagcaagttacagcgtcacagctgattattaaagattatgaatatatcaaagaaggattagcattaaaagaggcgaaacaaagatgtaaacagttagatagtgagctgagagaagagcatctgaaaaatgaggaattagtcgatgactataataatttagctgatagctataatgatttgttagagcagaataaagaaaaagataaagcattgaatcaatcatataatttattcaacaatgtatttagattgattaaaggtgtgatgaaagaagaagcatatcataggttgatcgattatattgataatcacttagagagttcaaaaatgcgagaaacaatgattgtagatgacaacgatgaacagttctttaagaaaaagtatcagagacaagaaccagaaattatttttgaagatgaacgagatgatggctactctttataa

SEQ ID NO: 421324 - DNA, 1380 bp, Staphylococcus aureus; identical to SEQ ID NO: 412597

SEQ ID NO: 421325 - DNA, 1416 bp, Staphylococcus aureus
ttgccactcattttttgcgttagcaaaaacaggtttaagcctcgcagagcacacgtattaacgacttattgtaaaataagtctagtgtgttattatactttaataaataaagctacgcaaaatcatgtgcagtggaggtcatttattatgtcatattccattattagaattgctaaagtgaaatcaaaaacgaatacaagaggtattcaaaaacacgtccaaagacaaaataaaaattacgaaaatctggatattgatttggaaaattcatatttaaattatgatttagtgaatgataacttgatcgatttcaatcaaaaaattgatgagaaaattgaacagaattataaaggtgaacgtaaaatcagaaaagatgctgtaaaacatattgatggtttgattacatcagacaatagcttttttgaacaattaacaccagaagaaacaaagatgttttttgagcacgccaagtcatttttagaacaagaatacggaaaagataatttactttatgcaacggtgcatatggacgaattaacgcctcatatgcattatggtgttgtaccgataacaaaagatggacgattgagtgcgaaagaagtggtaggtaataaaaaagcgctgacggaatttcaagatagatttaatgaatatatcaatagctgtggttatgaattgagtagaggtatatcaagaaaattaatgccgagacaacatgagcaagtgcgtcgatataaacagttaacagattatcacaaagaagaatacgagcgtcagagccaaaaattggaccatataaagcaagaaagcaaggaagtaatggaaaagtaccaaaacgctttaaacgttcttaaaacccctttaaatatcccgtataagatcgaaacggaaaaagtaggtggattattcagcaaagaaacacaagaaacaggcaacgtcgttatagataaaaacgagtttgaatcattgcaggagcaagttacagcgtcacagctgattattaaagattatgaatatatcaaagaaggattagcattaaaagaggcgaaacaaagatgtaaacagttagatagtgagctgagagaagagcatctgaaaaatgaggaagtagtcgatgactataataatttagctgatagctataatgatttgttagagcagaataaagaaaaagataaagcattgaatcaatcatataatttattcaacaatgtatttagattgattaaaggtgtgatgaaagaagaagcatatcataggttgatcgattatattgataatcacttagagagttcaaaaatgcgagaaacaatgattgtagatgacaacgatgaacagttctttaagaaaaagtatcagagacaagaaccagaaattatttttgaagatgaacgagatgatggctactctttataa

SEQ ID NO: 421326 - DNA, 1380 bp, Staphylococcus aureus; identical to SEQ ID NO: 412597

SEQ ID NO: 421327 - DNA, 1416 bp, Staphylococcus aureus
ttgccactcattttttgcgttagcaaaaacaggtttaagcctcgcagagcacacgtattaacgacttattgtaaaataagtctagtgtgttattatactttaataaataaagctacgcaaaatcatgtgcagtggaggtcatttattatgtcatattccattattagaattgctaaagtgaaatcaaaaacgaatacaagaggtattcaaaaacacgtccaaagacaaaataaaaattacgaaaatctggatattgatttggaaaattcatatttaaattatgatttagtgaatgataacttgatcgatttcaatcaaaaaattgatgagaaaattgaacagaattataaaggtgaacgtaaaatcagaaaagatgctgtaaaacatattgatggtttgattacatcagacaatagcttttttgaacaattaacaccagaagaaacaaagatgttttttgagcacgccaagtcatttttagaacaagaatacggaaaagataatttactttatgcaacggtgcatatggacgaattaacgcctcatatgcattatggtgttgtaccgataacaaaagatggacgattgagtgcgaaagaagtggtaggtaataaaaaagcgctgacggaatttcaagatagatttaatgaatatatcaatagctgtggttatgaattgagtagaggtatatcaagaaaattaatgccgagacaacatgagcaagtgagtcgatataaacagttaacagattatcacaaagaagaatacgagcgtcagagccaaaaattggaccatataaagcaagaaagcaaggaagtaatggaaaagtaccaaaacgctttaaacgttcttaaaacccctttaaatatcccgtataagatcgaaacggaaaaagtaggtggattattcagcaaagaaacacaagaaacaggcaacgtcgttatagataaaaacgagtttgaatcattgcaggagcaagttacagcgtcacagctgattattaaagattatgaatatatcaaagaaggattagcattaaaagaggcgaaacaaagatgtaaacagttagatagtgagctgagagaagagcatctgaaaaatgaggaattagtcgatgactataataatttagctgatagctataatgatttgttagagcagaataaagaaaaagataaagcattgaatcaatcatataatttattcaacaatgtatttagattgattaaaggtgtgatgaaagaagaagcatatcataggttgatcgattatattgataatcacttagagagttcaaaaatgcgagaaacaatgattgtagatgacaacgatgaacagttctttaacaaaaagtatcagagacaagaaccagaaattatttttgaagatgaacgagatgatggctactctttataa

SEQ ID NO: 421328 - DNA, 1380 bp, Staphylococcus aureus; identical to SEQ ID NO: 412597

SEQ ID NO: 421329 - DNA, 1416 bp, Staphylococcus aureus; identical to SEQ ID NO: 421189

SEQ ID NO: 421330 - DNA, 1380 bp, Staphylococcus aureus
ttgtttagtttatataaaaaatttaaaggtttgttttatagcgttttattttggctttgtattctttcattttttagtgtattaaatgaaatggttttaaatgtttctttacctgatattgcaaatcattttaatactactcctggaattacaaactgggtaaacactgcatatatgttaactttttcgataggaacagcagtatatggaaaattatctgattatataaatataaaaaaattgttaattattggtattagtttgagctgtcttggttcattgattgcttttattggtcacaatcacttttttattttgatttttggtaggttagtacaaggcgtaggatctgctgcattcccttcactgattatggtggttgtagctagaaatattacaagaaaaaaacaaggcaaagcctttggttttataggatcaattgtagctttaggtgaagggttaggtccttcaatagggggaataatagcacattatattcattggtctttcctacttatacttcctatgattacaatagtaactataccttttcttattaaagtaatggtacctggtaaatcaacaaaaaatacattagatatcgtaggtattgttttaatgtctataagtattatatgttttatgttatttacgacaaattataattggacttttttaatactcttcacaatcttttttgtgatttttattaaacatatttcaagagtttctaacccttttattaatcctaaactagggaaaaacattccgtttatgcttggtttgttttctggtgggctaatattttctatagtagctggttttatatcaatggtgccttatatgatgaaaactatttatcatgtaaatgtagcgacaataggtaatagtgttatttttcctggaaccatgagtgttattgtttttggttattttggtggttttttagtggatagaaaaggatcattatttgtttttattttaggatcattgtctatctctataagttttttaactattgcattttttgttgagtttagtatgtggttgactacttttatgtttatatttgttatgggcggattatcttttactaaaacagttatatcaaaaatagtatcaagtagtctttctgaagaagaagttgcttctggaatgagtttgctaaatttcacaagttttttatcagagggaacaggtatagcaattgtaggaggtttattgtcactacaattgattaatcgtaaactagttctggaatttataaattattcttctggagtgtatagtaatattcttgtagccatggctatccttattattttatgttgtcttttgacgattattgtatttaaacgttctgaaaagcagtttgaatag

SEQ ID NO: 421331 - DNA, 1416 bp, Staphylococcus aureus; identical to SEQ ID NO: 421189

SEQ ID NO: 421332 - DNA, 1380 bp, Staphylococcus aureus
ttgtttagtttatataaaaaatttaaaggtttgttttatagcgttttattttggctttgtattctttcattttttagtgtattaaatgaaatggttttaaatgtttctttacctgatattgcaaatcattttaatactactcctggaattacaaactgggtaaacactgcatatatgttaactttttcgataggaacagcagtatatggaaaattatctgattatataaatataaaaaaattgttaattattggtattagtttgagctgtcttggttcattgattgcttttattggtcacaatcacttttttattttgatttttggtaggttagtacaaggagtaggatctgctgcattcccttcactgattatggtggttgtagctagaaatattacaagaaaaaaacaaggcaaagcctttggttttataggatcgattgtagctttaggtgaagggttaggtccttcaatagggggaataatagcacattatattcattggtcttacctacttatacttcctatgattaccatagtaactataccttttcttattaaagtaatggtacctggtaaatcaacaaaaaatacattagatatcgtaggtattgttttaatgtctataagtattatatgttttatgttatttacgacaaattataattggacttttttaatactcttcacaatcttttttgtgatttttattaaacatatttcaagagtttctaacccttttattaatcctaaactagggaaaaacattccgtttatgcttggtttgttttctggtgggctaatattttctatagtagctggttttatatcaatggtgccttatatgatgaaaactatttatcatgtaaatgtagcgacaataggtaatagtgttatttttcctggaaccatgagtgttattgtttttggttattttggtggttttttagtggatagaaaaggatcattatttgtttttattttaggatcattgtctatctctataagttttttaactattgcattttttgttgagtttagtatgtggttgactacttttatgtttatatttgttatgggcggattatcttttactaaaacagttatatcaaaaatagtatcaagtagtctttctgaagaagaagttgcttctggaatgagtttgctaaatttcacaagttttttatcagagggaacaggtatagcaattgtaggaggtttattgtcactacaattgattaatcgtaaactagttctggaatttataaattattcttctggagtgtatagtaatattcttgtagccatggctatccttattattttatgttgtcttttgacgattattgtatttaaacgttctgaaaagcagtttgaatag

SEQ ID NO: 421333 - DNA, 1416 bp, Staphylococcus aureus
ttgccactcattttttgcgttagcaaaaacaggtttaagcctcgcagagcacacgtattaacgacttattgtaaaataagtctagtgtgttattatactttaataaataaagctacgcaaaatcatgtgcagtggaggtcatttattatgtcatattccattattagaattgctaaagtgaaatcaaaaacgaatacaagaggtattcaaaaacacgtccaaagacaaaataaaaattacgaaaatctggatattgatttggaaaattcatatttaaattatgatttagtgaatgataacttgatcgatttcaatcaaaaaattgatgagaaaattgaacagaattataaaggtgaacgtaaaatcagaaaagatgctgtaaaacatattgatggtttgattacatcagacaatagcttttttgaacaattaacaccagaagaaacaaagatgttttttgagcacgccaagtcatttttagaacaagaatacggaaaagataatttactttatgcaacggtgcatatggacgaattaacgcctcatatgcattatggtgttgtaccgataacaaaagatggacgattgagtgcgaaagaagtggtaggtaataaaaaagcgctgacggaatttcaagatagatttaatgaatatatcaatagctgtggttatgaattgagtagaggtatatcaagaaaattaatgccgagacaacatgagcaagtgagtcgatataaacagttaacagattatcacaaagaagaatacgagcgtcagagccaaaaattggaccatataaagcaagaaagcaaggaagtaatggaaaagtaccaaaacgctttaaacgttcttaaaacccctttaaatatcccgtataagatcgaaacggaaaaagtaggtggattattcagcaaagaaacacaagaaacaggcaacgtcgttatagataaaaacgagtttgaatcattgcaggagcaagttacagcgtcacagctgattattaaagattatgaatatatcaaagaaggattagcattaaaagaggcgaaacaaagatgtaaacagttagatagtgagctgagagacgagcatctgaaaaatgaggaattagtcgatgactataataatttagctgatagctataatgatttgttagagcagaataaagaaaaagataaagcattgaatcaatcatataatttattcaacaatgtatttagattgattaaaggtgtgatgaaagaagaagcatatcataggttgatcgattatattgataatcacttagagagttcaaaaatgcgagaaacaatgattgtagatgacaacgatgaacagttctttaagaaaaagtatcagagacaagaaccagaaattatttttgaagatgaacgagatgatggctactctttataa

SEQ ID NO: 421334 - DNA, 1380 bp, Staphylococcus aureus; identical to SEQ ID NO: 412597

SEQ ID NO: 421335 - DNA, 1416 bp, Staphylococcus aureus
ttgccactcattttttgcgttagcaaaaacaggtttaagcctcgcagagcacacgtattaacgacttattgtaaaataagtctagtgtgttattatactttaataaataaagctacgcaaaatcatgtgcagtggaggtcatttattatgtcatattccattattagaattgctaaagtgaaatcaaaaacgaatacaagaggtattcaaaaacacgtccaaagacaaaataaaaattacgaaaatctggatattgatttggaaaattcatatttaaattatgatttagtgaatgataacttgatcgatttcaatcaaaaaattgatgagaaaattgaacagaattataaaggtgaacgtaaaatcagaaaagatgctgtaaaacatattgatggtttgattacatcagacaatagcttttttgaacaattaacaccagaagaaacaaagatgttttttgagcacgccaagtcatttttagaacaagaatacggaaaagataatttactttatgcaacggtgcatatggacgaattaacgcctcatatgcattatggtgttgtaccgataacaaaagatggacgattgagtgcgaaagaagtggtaggtaataaaaaagcgctgacggaatttcaagatagatttaatgaatatatcaatagctgtggttatgaattgagtagaggtatatcaagaaaattaatgccgagacaacatgagcaagtgagtcgatataaacagttaacagattatcacaaagaagaatacgagcgtcagagccaaaaattggaccatataaagcaagaaagcaaggaagtaatggaaaagtaccaaaacgctttaaacgttcttaaaacccctttaaatatcccgtataagatcgaaacggaaaaagtaggtggattattcagcaaagaaacacaagaaacaggcaacgtcgttatagataaaaacgagtttgaatcattgcaggagcaagttacagcgtcacagctgattattaaagattatgaatatatcaaagaaggattagcattaaaagaggcgaaacaaagatgtaaacagttagatagtgagctgagagaagagcatctgaaaaatgaggaattagtcgatgactataataatttagctgatagctataatgatttgttagagcagaataaagaaaaagataaagcattgaatcaatcatataatttattcaacaatgtatttagattgattaaaggtgtgatgaaagaagaagcatatcataggttgatcgatgatattgataatcacttagagagttcaaaaatgcgagaaacaatgattgtagatgacaacgatgaacagttctttaagaaaaagtatcagagacaagaaccagaaattatttttgaagatgaacgagatgatggctactctttataa

SEQ ID NO: 421336 - DNA, 1380 bp, Staphylococcus aureus; identical to SEQ ID NO: 412597

SEQ ID NO: 421337 - DNA, 1416 bp, Staphylococcus aureus
ttgccactcattttttgcgttagcaaaaacaggtttaagcctcgcagagcacacgtattaacgacttattgtaaaataagtctagtgtgttattatactttaataaataaagctacgcaaaatcatgtgcagtggaggtcatttattatgtcatattccattattagaattgctaaagtgaaatcaaaaacgaatacaagaggtattcaaaaacacgtccaaagacaaaataaaaattacgaaaatctggatattgatttggaaaattcatatttaaattatgatttagtgaatgataacttgatcgatttcaatcaaaaaattgatgagaaaattgaacagaattataaaggtgaacgtaaaatcagaaaagatgctgtaaaacatattgatggtttgattacatcagacaatagcttttttgaacaattaacaccagaagaaacaaagatgttttttgagcacgccaagtcatttttagaacaagaatacggaaaagataatttactttatgcaacggtgcatatggacgaattaacgcctcatatgcattatggtgttgtaccgataacaaaagatggacgattgagtgcgaaagaagtggtaggtaataaaaaagcgctgacggaatttcaagatagatttaatgaatatatcaatagctgtggttatgaattgagtagaggtatatcaagaaaattaatgccgagacaacatgagcaagtgagtcgatataaacagttaacagattatcacaaagacgaatacgagcgtcagagccaaaaattggaccatataaagcaagaaagcaaggaagtaatggaaaagtaccaaaacgctttaaacgttcttaaaacccctttaaatatcccgtataagatcgaaacggaaaaagtaggtggattattcagcaaagaaacacaagaaacaggcaacgtcgttatagataaaaacgagtttgaatcattgcaggagcaagttacagcgtcacagcttattattaaagattatgaatatatcaaagaaggattagcattaaaagaggcgaaacaaagatgtaaacagttagatagtgagctgagagaagagcatctgaaaaatgaggaattagtcgatgactataataatttagctgatagctataatgatttgttagagcagaataaagaaaaagataaagcattgaatcaatcatataatttattcaacaatgtatttagattgattaaaggtgtgatgaaagaagaagcatatcataggttgatcgattatattgataatcacttagagagttcaaaaatgcgagaaacaatgattgtagatgacaacgatgaacagttctttaagaaaaagtatcagagacaagaaccagaaattatttttgaagatgaacgagatgatggctactctttataa

SEQ ID NO: 421338 - DNA, 1380 bp, Staphylococcus aureus; identical to SEQ ID NO: 412597

SEQ ID NO: 421339 - DNA, 1416 bp, Staphylococcus aureus; identical to SEQ ID NO: 421189

SEQ ID NO: 421340 - DNA, 1380 bp, Staphylococcus aureus
ttgtttagtttatataaaaaatttaaaggtttgttttatagcgttttattttggctttgtattctttcattttttagtgtattaaatgaaatggttttaaatgtttctttacctgatattgcaaatcattttaatactactcctggaattacaaactgggtaaacactgcatatatgttaactttttcgataggaacagcagtatatggaaaattatctgattatataaatataaaaaaattgttaattattggtattagtttgagctgtcttggttcattgattgcttttattggtcacaatcacttttttattttgatttttggtaggttagtacaaggagtaggatctgctgcattcccttcactgattatggtggttgtagctagaaatattacaagaaaaaaacaaggcaaagcctttggttttataggatcaattgtagctttaggtgaagggttaggtctttcaatagggggaataatagcacattatattcattggtcttacctacttatacttcctatgattacaatagtaactataccttttcttattaaagtaatggtacctggtaaatcaacaaaaaatacattagatatcgtaggtattgttttaatgtctataagtattatatgttttatgttatttacgacaaattataattggacttttttaatactcttcacaatcttttttgtgatttttattaaacatatttcaagagtttctaacccttttattaatcctaaactagggaaaaacattccgtttatgcttggtttgttttctggtgggctaatattttctatagtagctggttttatatcaatggtgccttatatgatgaaaactatttatcatgtaaatgtagcgacaataggtaatagtgttatttttcctggaaccatgagtgttattgtttttggttattttggtggttttttagtggatagaaaaggatcattatttgtttttattttaggatcattgtctatctctataagttttttaactattgcattttttgttgagtttagtatgtggttgactacttttatgtttatatttgttatgggcggattatcttttactaaaacagttatatcaaaaatagtatcaagtagtctttctgaagaagaagttgcttctggaatgagtttgctaaatttcacaagttttttatcagagggaacaggtatagcaattgtaggaggtttattgtcactacaattgattaatcgtaaactagttctggaatttataaattattcttctggagtgtatagtaatattcttgtagccatggctatccttattattttatgttgtcttttgacgattattgtatttaaacgttctgaaaagcagtttgaatag

SEQ ID NO: 421341 - DNA, 1416 bp, Staphylococcus aureus
ttgccactcattttttgcgttagcaaaaacaggtttaagcctcgcagagcacacgtattaacgacttattgtaaaataagtctagtgtgttattatactttaataaataaagctacgcaaaatcatgtgcagtggaggtcatttattatgtcatattccattattagaattgctaaagtgaaatcaaaaacgaatacaagaggtattcaaaaacacgtccaaagacaaaataaaaattacgaaaatctggatattgatttggaaaattcatatttaaattatgatttagtgaatgataacttgatcgatttcaatcaaaaaattgatgagaaaattgaacagaattataaaggtgaacgtaaaatcagaaaagatgctgtaaaacatattgatggtttgattacatcagacaatagcttttttgaacaattaacaccagaagaaacaaagatgttttttgagcacgccaagtcatttttagaacaagaatacggaaaagataatttactttatgcaacggtgcatatggacgaattaacgcctcatatgcattatggtgttgtaccgataacaaaagatggacgattgagtgcgaaagaagtggtaggtaataaaaaagcgctgacggaatttcaagatagatttaatgaatatatcaatagctgtggttatgaattgagtagaggtatatcaagaaaattaatgccgaggcaacatgagcaagtgagtcgatataaacagttaacagattatcacaaagaagaatacgagcgtcagagccaaaaattggaccatataaagcaagaaagcaaggaagtaatggaaaagtaccaaaacgctttaaacgttcttaaaacccctttaaatatcccgtataagatcgaaacggaaaaagtaggtggattattcagcaaagaaacacaagaaacaggcaacgtcgttatagataaaaacgagtttgaatcattgcaggagcaagttacagcgtcacagctgattattaaagattatgaatatatcaaagaaggattagcattaaaagaggcgaaacaaagatgtaaacagttagatagtgagctgagagaagagcatctgaaaaatgaggaattagtcgatgactataataatttagctgatagctataatgatttgttagagcagaataaagaaaaagataaagcattgaatcaatcatataatttattcaacaatgtatttagattgattaaaggtgtgatgaaagaagaagcatatcataggttgatcgattatattgataatcacttagagagttcaaaaatgcgagaaacaatgattgtagatgacaacgatgaacagttctttaagaaaaagtatcagagacaagaaccagaaattatttttgaagatgaacgagatgatggctactctttataa

SEQ ID NO: 421342 - DNA, 1380 bp, Staphylococcus aureus; identical to SEQ ID NO: 412597

SEQ ID NO: 421343 - DNA, 1416 bp, Staphylococcus aureus; identical to SEQ ID NO: 421189

SEQ ID NO: 421344 - DNA, 1380 bp, Staphylococcus aureus
ttgtttagtttatataaaaaatttaaaggtttgttttatagcgttttattttggctttgtattctttcattttttagtgtattaaatgaaatggttttaaatgtttctttacctgatattgcaaatcattttaatactactcctggaattacaaactgggtaaacactgcatatatgttaactttttcgataggaacagcagtatatggaaaattatctgattatataaatataaaaaaattgttaattattggtattagtttgagctgtcttggttcattgattgcttttattggtcacaatcacttttttattttgatttttggtaggttagtacaaggagtaggacctgctgcattcccttcactgattatggtggttgtagctagaaatattacaagaaaaaaacaaggcaaagcctttggttttataggatcaattgtagctttaggtgaagggttaggtccttcaatagggggaataatagcacattatattcattggtcttacctacttatacttcctatgattacaatagtaactataccttttcttattaaagtaatggtacctggtaaatcaacaaaaaatacattagatatcgtaggtattgttttaatgtctataagtattatatgttttatgttatttacgacaaattataattggacttttttaatactcttcacaatcttttttgtgatttttattaaacatatttcaagagtttctaacccttttattaatcctaaactagggaaaaacattccgtttatgcttggtttgttttctggtgggctaatattttctatagtagctggttttatatcaatggtgccttatatgatgaaaactatttatcatgtaaatgtagcgacaataggtaatagtgttatttttcctggaaccatgagtgttattgtttttggttattttggtggttttttagtggatagaaaaggatcattatttgtttttattttaggatcattgtctatctctataagttttttaactattgcattttttgttgagtttagtatgtggttgactacttttatgtttatatttgttatgggcggattatcttttactaaaacagttatatcaaaaatagtatcaagtagtctttctgaagaagaagttgcttctggaatgagtttgctaaatttcacaagttttttatcagagggaacaggtatagcaattgtaggaggtttattgtcactacaattgattaatcgtaaactagttctggaatttataaattattcttctggagtgtatagtaatattcttgtagccatggctatccttattattttatgttgtcttttgacgattattgtatttaaacgttctgaaaagcagtttgaatag

SEQ ID NO: 421345 - DNA, 1416 bp, Staphylococcus aureus; identical to SEQ ID NO: 421189

SEQ ID NO: 421346 - DNA, 1380 bp, Staphylococcus aureus
ttgtttagtttatataaaaaatttaaaggtttgttttatagcgttttattttggctttgtattctttcattttttagtgtattaaatgaaatggttttaaatgtttctttacctgatattgcaaatcattttaatactactcctggaattacaaactgggtaaacactgcatatatgttaactttttcgataggaacagcagtatatggaaaattatctgattatataaatataaaaaaattgttaattattggtattagtttgagctgtcttggttcattgattgcttttattggtcacaatcacttttttattttgatttttggtaggttagtacaaggagtaggatctgctgcattcccttcactgattatggtggttgtagctagaaatattacaagaaaaaaacaaggcaaagcctttggttttatagcatcaattgtagctttaggtgaagggttaggtccttcaatagggggaataatagcacattatattcattggtcttacctacttatacttcctatgattacaatagtaactataccttttcttattaaagtaatggtacctggtaaatcaacaaaaaatacattagatatcgtaggtattgttttaatgtctataagtattatatgttttatgttatttacgacaaattataattggacttttttaatactcttcacaatcttttttgtgatttttattaaacatatttcaagagtttctaacccttttattaatcctaaactagggaaaaacattccgtttatgcttggtttgttttctggtgggctaatattttctatagtagctggttttatatcaatggtgccttatatgatgaaaactatttatcatgtaaatgtagcgacaataggtaatagtgttatttttcctggaaccatgagtgttattgtttttggttattttggtggttttttagtggatagaaaaggatcattatttgtttttattttaggatcattgtctatctctataagttttttaactattgcattttttgttgagtttagtatgtggttgactacttttatgtttatatttgttatgggcggattatcttttactaaaacagttatatcaaaaatagtatcaagtagtctttctgaagaagaagttgcttctggaatgagtttgctaaatttcacaagttttttatcagagggaacaggtatagcaattgtaggaggtttattgtcactacaattgattaatcgtaaactagttctggaatttataaattattcttctggagtgtatagtaatattcttgtagccatggctatccttattattttatgttgtcttttgacgattattgtatttaaacgttctgaaaagcagtttgaatag

SEQ ID NO: 421347 - DNA, 1416 bp, Staphylococcus aureus
ttgccactcattttttgcgttagcaaaaacaggtttaagcctcgcagagcacacgtattaacgacttattgtaaaataagtctagtgtgttattatactttaataaataaagctacgcaaaatcatgtgcagtggaggtcatttattatgtcatattccattattagaattgctaaagtgaaatcaaaaacgaatacaagaggtattcaaaaacacgtccaaagacaaaataaaaattacgaaaatctggatattgatttggaaaattcatatttaaattatgatttagtgaatgataacttgatcgatttcaatcaaaaaattgatgagaaaattgaacagaattataaaggtgaacgtaaaatcagaaaagatgctgtaaaacatattgatggtttgattacatcagacaatagcttttttgaacaattaacaccagaagaaacaaagatgttttttgagcacgccaagtcatttttagaacaagaatacggaaaagataatttactttatgcaacggtgcatatggacgaattaacgcctcatatgcattatggtgttgtaccgataacaaaagatggacgattgagtgcgaaagtagtggtaggtaataaaaaagcgctgacggaatttcaagatagatttaatgaatatatcaatagctgtggttatgaattgagtagaggtatatcaagaaaattaatgccgagacaacatgagcaagtgagtcgatataaacagttaacagattatcacaaagaagaatacgagcgtcagagccaaaaattggaccatataaagcaagaaagcaaggaagtaatggaaaagtaccaaaacgctttaaacgttcttaaaacccctttaaatctcccgtataagatcgaaacggaaaaagtaggtggattattcagcaaagaaacacaagaaacaggcaacgtcgttatagataaaaacgagtttgaatcattgcaggagcaagttacagcgtcacagctgattattaaagattatgaatatatcaaagaaggattagcattaaaagaggcgaaacaaagatgtaaacagttagatagtgagctgagagaagagcatctgaaaaatgaggaattagtcgatgactataataatttagctgatagctataatgatttgttagagcagaataaagaaaaagataaagcattgaatcaatcatataatttattcaacaatgtatttagattgattaaaggtgtgatgaaagaagaagcatatcataggttgatcgattatattgataatcacttagagagttcaaaaatgcgagaaacaatgattgtagatgacaacgatgaacagttctttaagaaaaagtatcagagacaagaaccagaaattatttttgaagatgaacgagatgatggctactctttataa

SEQ ID NO: 421348 - DNA, 1380 bp, Staphylococcus aureus; identical to SEQ ID NO: 412597

SEQ ID NO: 421349 - DNA, 1416 bp, Staphylococcus aureus
ttgccactcattttttgcgttagcaaaaacaggtttaagcctcgcagagcacacgtattaacgacttattgtaaaataagtctagtgtgttattatactttaataaataaagctacgcaaaatcatgtgcagtggaggtcatttattatgtcatattccattattagaattgctaaagtgaaatcaaaaacgaatacaagaggtattcaaaaacacgtccaaagacaaaataaaaattacgaaaatctggatattgatttggaaaattcatatttaaattatgatttagtgaatgataacttgatcgatttcaatcaaaaaattgatgagaaaattgaacagaattataaaggtgaacgtaaaatcagaaaagatgctgtaaaacatattgatggtttgattacatcagacaatagcttttttgaacaattaacaccagaagaaacaaagatgttttttgagcacgccaagtcatttttagaacaagaatacggaaaagataatttactttatgcaacggtgcatatggacgaattaacgcctcatatgcattatggtgttgtaccgataacaaaagatggacgattgagtgcgaaagaagtggtaggtaataaaaaagcgctgacggaatttcaagatagatttaatgaatatatcaatagctgtggttatgaattgagtagaggtatatcaagaaaattaatgccgagacaacatgagcaagtgagtcgatataaacagttaacagattatcacaaagaagaatacgagcgtcagagccaaaaattggaccatataaagcaagaaagcaaggaggtaatggaaaagtaccaaaacgctttaaacgttcttaaaacccctttaaatatcccgtataagatcgaaacggaaaaagtaggtggattattcagcaaagaaacacaagaaacaggcaacgtcgttatagataaaaacgagtttgaatcattgcaggagcaagttacagcgtcacagctgattattaaagattatgaatatatcaaagaaggattagcattaaaagaggcgaaacaaagatgtaaacagttagatagtgagctgagagaagagcatctgaaaaatgaggaattagtcgatgactataataatttagctgatagctataatgatttgttagagcagaataaagaaaaagataaagcattgaatcaatcatataatttattcaacaatgtatttagattgattaaaggtgtgatgaaagaagaagcatatcataggttgatcgattatattgataatcacttagagagttcaaaaatgcgagaaacaatgattgtagatgacaacgatgaacagttctttaagaaaaagtatcagagacaagaaccagaaattatttttgaagatgaacgagatgatggctactctttataa

SEQ ID NO: 421350 - DNA, 1380 bp, Staphylococcus aureus; identical to SEQ ID NO: 412597

SEQ ID NO: 421351 - DNA, 1416 bp, Staphylococcus aureus; identical to SEQ ID NO: 421189

SEQ ID NO: 421352 - DNA, 1380 bp, Staphylococcus aureus
ttgtttagtttatataaaaaatttaaaggtttgttttatagcgttttattttggctttgtattctttcattttttagtgtattaaatgaaatggttttaaatgtttctttacctgatattgcaaatcattttaatactactcctggaattacaaactgggtaaacactgcatatatgttaactttttcgataggaacagcagtatatggaaaattatctgattatataaatataaaaaaattgttaattattggtattagtttgagctgtcttggttcattgattgcttttattggtcacaatcacttttttattttgatttttggtaggttagtacaaggactaggatctgctgcattcccttcactgattatggtggttgtagctagaaatattacaagaaaaaaacaaggcaaagcctttggttttataggatcaattgtagctttaggtgaagggttaggtccttcaatagggggaataatagcacattatattcattggtcttacctacttatacttcctatgattacaatagtaactataccttttcttattaaagtaatggtacctggtaaatcaacaaaaaatacattagatatcgtaggtattgttttaatgtctataagtattatatgttttatgttatttacgacaaattataattggacttttttaatactcttcacaatcttttttgtgatttttattaaacatatttcaagagtttctaacccttttattaatcctaaactagggaaaaacattccgtttatgcttggtttgttttctggtgggctaatattttctatagtagctggttttatatcaatggtgccttatatgatgaaaactatttatcatgtaaatgtagcgacaataggtaatagtgttatttttcctggaaccatgagtgttattgtttttggttattttggtggttttttagtggatagaaaaggatcattatttgtttttattttaggatcattgtctatctctataagttttttaactattgcattttttgttgagtttagtatgtggttgactacttttatgtttatatttgttatgggcggattatcttttactaaaacagttatatcaaaaatagtatcaagtagtctttctgaagaagaagttgcttctggaatgagtttgctaaatttcacaagttttttatcagagggaacaggtatagcaattgtaggaggtttattgtcactacaattgattaatcgtaaactagttctggaatttataaattattcttctggagtgtatagtaatattcttgtagccatggctatccttattattttatgttgtcttttgacgattattgtatttaaacgttctgaaaagcagtttgaatag

SEQ ID NO: 421353 - DNA, 1416 bp, Staphylococcus aureus
ttgccactcattttttgcgttagcaaaaacaggtttaagcctcgcagagcacacgtactaacgacttattgtaaaataagtctagtgtgttattatactttaataaataaagctacgcaaaatcatgtgcagtggaggtcatttattatgtcatattccattattagaattgctaaagtgaaatcaaaaacgaatacaagaggtattcaaaaacacgtccaaagacaaaataaaaattacgaaaatctggatattgatttggaaaattcatatttaaattatgatttagtgaatgataacttgatcgatttcaatcaaaaaattgatgagaaaattgaacagaattataaaggtgaacgtaaaatcagaaaagatgctgtaaaacatattgatggtttgattacatcagacaatagcttttttgaacaattaacaccagaagaaacaaagatgttttttgagcacgccaagtcatttttagaacaagaatacggaaaagataatttactttatgcaacggtgcatatggacgaattaacgcctcatatgcattatggtgttgtaccgataacaaaagatggacgattgagtgcgaaagaagtggtaggtaataaaaaagcgctgacggaatttcaagatagatttaatgaatatatcaatagctgtggttatgaattgagtagaggtatatcaagaaaattaatgccgagacaacatgagcaagtgagtcgatataaacagttaacagattatcacaaagaagaatacgagcgtcagagccaaaaattggaccatataaagcaagaaagcaaggaagtaatggaaaagtaccaaaacgctttaaacgttcttaaaacccctttaaatatcccgtataagatcgaaacggaaaaagtaggtggattattcagcaaagaaacacaagaaacaggcaacgtcgttatagataaaaacgagtttgaatcattgcaggagcaagttacagcgtcacagctgattattaaagattatgaatatatcaaagaaggattagcattaaaagaggcgaaacaaagatgtaaacagttagatagtgagctgagagaagagcatctgaaaaatgaggaattagtcgatgactataataatttagctgatagctataatgatttgttagagcagaataaagaaaaagataaagcattgaatcaatcatataatttattcaacaatgtatttagattgattaaaggtgtgatgaaagaagaagcatatcataggttgatcgattatattgataatcacttagagagttcaaaaatgcgagaaacaatgattgtagatgacaacgatgaacagttctttaagaaaaagtatcagagacaagaaccagaaattatttttgaagatgaacgagatgatggctactctttataa

SEQ ID NO: 421354 - DNA, 1380 bp, Staphylococcus aureus; identical to SEQ ID NO: 412597

SEQ ID NO: 421355 - DNA, 1416 bp, Staphylococcus aureus
ttgccactcattttttgcgttagcaaaaacaggtttaagcctcgcagagcacacgtattaacgacttattgtaaaataagtctagtgtgttattatactttaataaataaagctacgcaaaatcatgtgcagtggaggtcatttattatgtcatattccattattagaattgctaaagtgaaatcaaaaacgaatacaagaggtattcaaaaacacgtccaaagacaaaataaaaattacgaaaatctggatattgatttggaaaattcatatttaaattatgatttagtgaatgataacttgatcgatttcaatcaaaaaattgatgagaaaattgaacagaattataaaggtgaacgtaaaatcagaaaagatgctgtaaaacatattgatggtttgattacatcagacaatagcttttttgaacaattaacaccagaagaaacaaagatgttttttgagcacgccaagtcatttttagaacaagaatacggaaaagataatttactttatgcaacggtgcatatggacgaattaacgcctcatatgcattatggtgttgtaccgataacaaaagatggacgattgagtgcgaaagaagtggtaggtaataaaaaagcgctgacggaatttcaagatagatttaatgaatatatcaatagctgtggttatgaattgagtagaggtatatcaagaaaattaatgccgagacaacatgagcaagtgagtcgatataaacagttaacagattatcacaaagaagaatacgagcgtcagagccaaaaattggaccatataaagcaagaaagcaaggaagtaatggaaaagtaccaaaacgctttaaacgctcttaaaacccctttaaatatcccgtataagatcgaaacggaaaaagtaggtggattattcagcaaagaaacacaagaaacaggcaacgtcgttatagataaaaacgagtttgaatcattgcaggagcaagttacagcgtcacagctgattattaaagattatgaatatatcaaagaaggattagcattaaaagaggcgaaacaaagatgtaaacagttagatagtgagctgagagaagagcatctgaaaaatgaggaattagtcgatgactataataatttagctgatagctataatgatttgttagagcagaataaagaaaaagataaagcattgaatcaatcatataatttattcaacaatgtatttagattgattaaaggtgtgatgaaagaagaagcatatcataggttgatcgattatattgataatcacttagagagttcaaaaatgcgagaaacaatgattgtagatgacaacgatgaacagttctttaagaaaaagtatcagagacaagaaccagaaattatttttgaagatgaacgagatgatggctactctttataa

SEQ ID NO: 421356 - DNA, 1380 bp, Staphylococcus aureus; identical to SEQ ID NO: 412597

SEQ ID NO: 421357 - DNA, 1416 bp, Staphylococcus aureus
ttgccactcattttttgcgttagcaaaaacaggtttaagcctcgcagagcacacgtattaacgacttattgtaaaataagtctagtgtgttattatactttaataaataaagctacgcaaaatcatgtgcagtggaggtcatttattatgtcatattccattattagaattgctaaagtgaaatcaaaaacgaatacaagaggtattcaaaaacacgtccaaagacaaaataaaaattacgaaaatctggatattgatttggaaaattcatatttaaattatgatttagtgaatgataacttgatcgatttcaatcaaaaaattgatgagaaaattgaacagaattataaaggtgaacgtaaaatcagaaaagatgctgtaaaacatattgatggtttgattacatcagacaatagcttttttgaacaattaacaccagaagaaacaaagatgttttttgagcacgccaagtcatttttagaacaagaatacggaaaagataatttactttatgcaacggtgcatatggacgaattaacgcctcatatgcattatggtgttgtaccgataacaaaagatggacgattgagtgcgaaagaagtggtaggtaataaaaaagcgctgacggaatttcaagatagatttaatgaatatatcaatagctgtggttatgaattgagtagaggtatatcaagaaaattaatgccgagacaacatgagcaagtgagtcgatataaacagttaacagcttatcacaaagaagaatacgagcgtcagagccaaaaattggaccatataaagcaagaaagcaaggaagtaatggaaaagtaccaaaacgctttaaacgttcttaaaacccctttaaatatcccgtataagatcgaaacggaaaaagtaggtggattattcagcaaagaaacacaagaaacaggcaacgtcgttatagataaaaacgagtttgaatcattgcaggagcaagttacagcgtcacagctgattattaaagattatgaatatatcaaagaaggattagcattaaaagaggcgaaacaaagatgtaaacagttagatagtgagctgagagaagagcatctgaaaaatgaggaattagtcgatgactataataatttagctgatagctataatgatttgttagagcagaataaagaaaaagataaagcattgaatcaatcatataatttattcaacaatgtatttagattgattaaaggtgtgatgaaagaagaagcatatcataggttgatcgattatattgataatcacttagagagttcaaaaatgcgagaaacaatgattgtagatgacaacgatgaacagttctttaagaaaaagtatcagagacaagaaccagaaattatttttgaagatgaacgagatgatggctactctttataa

SEQ ID NO: 421358 - DNA, 1380 bp, Staphylococcus aureus; identical to SEQ ID NO: 412597

SEQ ID NO: 421359 - DNA, 1416 bp, Staphylococcus aureus; identical to SEQ ID NO: 421189

SEQ ID NO: 421360 - DNA, 1380 bp, Staphylococcus aureus
ttgtttagtttatataaaaaatttaaaggtttgttttatagcgttttattttggctttgtattctttcattttttagtgtattaaatgaaatggttttaaatgtttctttacctgatattgcaaatcattttaatactactcctggaattacaaactgggtaaacactgcatatatgttaactttttcgataggaacagcagtatatggaaaattatctgattatataaatataaaaaaattgttaattattggtattagtttgagctgtcttggttcattgattgcttttattggtcacaatcacttttttattttgatttttggtaggttagtacaaggagtaggatctgctgcattcccttcactgattatggtggttgtagctagaaatattacaagaaaaaaacaaggcaaagcctttggtcttataggatcaattgtagctttaggtgaagggttaggtccttcaatagggggaataatagcacattatattcattggtcttacctacttatacttcctatgattacaatagtaactataccttttcttattaaagtaatggtacctggtaaatcaacaaaaaatacattagatatcgtaggtattgttttaatgtctataagtattatatgttttatgttatttacgacaaattataattggacttttttaatactcttcacaatcttttttgtgatttttattaaacatatttcaagagtttctaacccttttattaatcctaaactagggaaaaacattccgtttatgcttggtttgttttctggtgggctaatattttctatagtagctggttttatatcaatggtgccttatatgatgaaaactatttatcatgtaaatgtagcgacaataggtaatagtgttatttttcctggaaccatgagtgttattgtttttggttattttggtggttttttagtggatagaaaaggatcattatttgtttttattttaggatcattgtctatctctataagttttttaactattgcattttttgttgagtttagtatgtggttgactacttttatgtttatatttgttatgggcggattatcttttactaaaacagttatatcaaaaatagtatcaagtagtctttctgaagaagaagttgcttctggaatgagtttgctaaatttcacaagttttttatcagagggaacaggtatagcaattgtaggaggtttattgtcactacaattgattaatcgtaaactagttctggaatttataaattattcttctggagtgtatagtaatattcttgtagccatggctatccttattattttatgttgtcttttgacgattattgtatttaaacgttctgaaaagcagtttgaatag

SEQ ID NO: 421361 - DNA, 1416 bp, Staphylococcus aureus; identical to SEQ ID NO: 421189

SEQ ID NO: 421362 - DNA, 1380 bp, Staphylococcus aureus
ttgtttagtttatataaaaaatttaaaggtttgttttatagcgttttattttggctttgtattctttcattttttagtgtattaaatgaaatggttttaaatgtttctttacctgatattgcaaatcattttaatactactcctggaattacaaactgggtaaacactgcatatatgttaactttttcgataggaacagcagtatatggaaaattatctgattatataaatataaaaaaattgttaattattggtattagtttgagctgtcttggttcattgattgcttttattggtcacaatcacttttttattttgatttttggtaggttagtacaaggagtaggatctgctgcattcccttcactgattatggtggttgtagctagaaatattacaagaaaaaaacaaggcaaggcctttggttttataggatcaattgtagctttaggtgaagggttaggtccttcaatagggggaataatagcacattatattcattggtcttacctacttatacttcctatgattacaatagtaactataccttttcttattaaagtaatggtacctggtaaatcaacaaaaaatacattagatatcgtaggtattgttttaatgtctataagtattatatgttttatgttatttacgacaaattataattggacttttttaatactcttcacaatcttttttgtgatttttattaaacatatttcaagagtttctaacccttttattaatcctaaactagggaaaaacattccgtttatgcttggtttgttttctggtgggctaatattttctatagtagctggttttatatcaatggtgccttatatgatgaaaactatttatcatgtaaatgtagcgacaataggtaatagtgttatttttcctggaaccatgagtgttattgtttttggttattttggtggttttttagtggatagaaaaggatcattatttgtttttattttaggatcattgtctatctctataagttttttaactattgcattttttgttgagtttagtatgtggttgactacttttatgtttatatttgttatgggcggattatcttttactaaaacagttatatcaaaaatagtatcaagtagtctttctgaagaagaagttgcttctggaatgagtttgctaaatttcacaagttttttatcagagggaacaggtatagcaattgtaggaggtttattgtcactacaattgattaatcgtaaactagttctggaatttataaattattcttctggagtgtatagtaatattcttgtagccatggctatccttattattttatgttgtcttttgacgattattgtatttaaacgttctgaaaagcagtttgaatag

SEQ ID NO: 421363 - DNA, 1416 bp, Staphylococcus aureus
ttgccactcattttttgcgttagcaaaaacaggtttaagcctcgcagagcacacgtattaacgacttattgtaaaataagtctagtgtgttattatactttaataaataaagctacgcaaaatcatgtgcagtggaggtcatttattatgtcatattccattattagaattgctaaagtgaaatcaaaaacgaatacaagaggtattcaaaaacacgtccaaagacaaaataaaaattacgaaaatctggatattgatttggaaaattcatatttaaattatgatttagtgaatgataacttgatcgatttcaatcaaaaaattgatgagaaaattgaacagaattataaaggtgaacgtaaaatcagaaaagatgctgtaaaacatattgatggtttgattacatcagacaatagcttttttgaacaattaacaccagaagaaacaaagatgttttttgagcacgccaagtcatttttagaacaagaatacggaaaagataatttactttatgcaacggtgcatatggacgaattaacgcctcatatgcattatggtgttgtaccgataacaaaagatggacgattgagtgcgaaagaagtggtaggtaataaaaaagcgctgacggaatttcaagatagatttaatgaatatatcaatagctgtggttatgaattgagtagaggtatatcaagaaaattaatgccgagacaacatgagcaagtgagtcgatataaacagttaacagattatcacaaagaagaatacgagcgtcagagccaaaaattggaccatataaagcaagaaagcaaggaagtaatggaaaagtaccaaaacgctttaaacgttcttaaaacccctttaaatatcccgtataagatcgaaacggaaaaagtaggtggattattcagcaaagaaacacaagaaacaggcaacgtcgttatagataaaaacgagtttgaatcattgcaggagcaagttacagcgtcacagctgattattaaagattatgaatatatcaaagaaggattagcattaaaagaggcgaaacaaagatgtaaacagttagatagtgagctgagagaagagcatctgaaaaatgaggaattagtcgatgactataataatttagctgatagctataatgatttgttagagcagaataaagaaaaagataaagcattgaatcaatcatataatttattcaacaatgtatttagattgattaaaggtgtgatgaaagaagaagcatatcataggttgatcgattatattgataagcacttagagagttcaaaaatgcgagaaacaatgattgtagatgacaacgatgaacagttctttaagaaaaagtatcagagacaagaaccagaaattatttttgaagatgaacgagatgatggctactctttataa

SEQ ID NO: 421364 - DNA, 1380 bp, Staphylococcus aureus; identical to SEQ ID NO: 412597

SEQ ID NO: 421365 - DNA, 1416 bp, Staphylococcus aureus
ttgccactcattttttgcgttagcaaaaacaggtttaagcctcgcagagcacacgtattaacgacttattgtaaaataagtctagtgtgttattatactttaataaataaagctacgcaaaatcatgtgcagtggaggtcatttattatgtcatattccattattagaattgctaaagtgaaatcaaaaacgaatacaagaggtattcaaaaacacgtccaaagacaaaataaaaattacgaaaatctggatattgatttggaaaattcatatttaaattatgatttagtgaatgataacttgatcgatttcaatcaaaaaattgatgagaaaattgaacagaattataaaggtgaacgtaaaatcagaaaagatgctgtaaaacatattgatggtttgattacatcagacaatagcttttttgaacaattaacaccagaagaaacaaagatgttttttgagcacgccaagtcatttttagaacaagaatacggaaaagataatttactttatgcaacggtgcatatggacgaattaacgcctcatatgcattatggtgttgtaccgataacaaaagatggacgattgagtgcgaaagaagtggtaggtaataaaaaagcgctgacggaatttcaagatagatttaatgaatatatcaatagctgtggttatgaattgagtagaggtatatcaagaaaattaatgccgagacaacatgagcaagtgagtcgatataaacagttaacagattatcacaaagaagaatacgagcgtcagagccaaaaattggaccatataaagcaagcaagcaaggaagtaatggaaaagtaccaaaacgctttaaacgttcttaaaacccctttaaatatcccgtataagatcgaaacggaaaaagtaggtggattattcagcaaagaaacacaagaaacaggcaacgtcgttatagataaaaacgagtttgaatcattgcaggagcaagttacagcgtcacagctgattattaaagattatgaatatatcaaagaaggattagcattaaaagaggcgaaacaaagatgtaaacagttagatagtgagctgagagaagagcatctgaaaaatgaggaattagtcgatgactataataatttagctgatagctataatgatttgttagagcagaataaagaaaaagataaagcattgaatcaatcatataatttattcaacaatgtatttagattgattaaaggtgtgatgaaagaagaagcatatcataggttgatcgattatattgataatcacttagagagttcaaaaatgcgagaaacaatgattgtagatgacaacgatgaacagttctttaagaaaaagtatcagagacaagaaccagaaattatttttgaagatgaacgagatgatggctactctttataa

SEQ ID NO: 421366 - DNA, 1380 bp, Staphylococcus aureus; identical to SEQ ID NO: 412597

SEQ ID NO: 421367 - DNA, 1416 bp, Staphylococcus aureus; identical to SEQ ID NO: 421189

SEQ ID NO: 421368 - DNA, 1380 bp, Staphylococcus aureus
ttgtttagtttatataaaaaatttaaaggtttgttttatagcgttttattttggctttgtattctttcattttttagtgtattaaatgaaatggttttaaatgtttctttacctgatattgcaaatcattttaatactactcctggaattacaaactgggtaaacactgcatatatgttaactttttcgataggaacagcagtatatggaaaattatctgattatataaatataaaaaaattgttaattattggtattagtttgagctgtcttggttcattgattgcttttattgctcacaatcacttttttattttgatttttggtaggttagtacaaggagtaggatctgctgcattcccttcactgattatggtggttgtagctagaaatattacaagaaaaaaacaaggcaaagcctttggttttataggatcaattgtagctttaggtgaagggttaggtccttcaatagggggaataatagcacattatattcattggtcttacctacctatacttcctatgattacaatagtaactataccttttcttattaaagtaatggtacctggtaaatcaacaaaaaatacattagatatcgtaggtattgttttaatgtctataagtattatatgttttatgttatttacgacaaattataattggacttttttaatactcttcacaatcttttttgtgatttttattaaacatatttcaagagtttctaacccttttattaatcctaaactagggaaaaacattccgtttatgcttggtttgttttctggtgggctaatattttctatagtagctggttttatatcaatggtgccttatatgatgaaaactatttatcatgtaaatgtagcgacaataggtaatagtgttatttttcctggaaccatgagtgttattgtttttggttattttggtggttttttagtggatagaaaaggatcattatttgtttttattttaggatcattgtctatctctataagttttttaactattgcattttttgttgagtttagtatgtggttgactacttttatgtttatatttgttatgggcggattatcttttactaaaacagttatatcaaaaatagtatcaagtagtctttctgaagaagaagttgcttctggaatgagtttgctaaatttcacaagttttttatcagagggaacaggtatagcaattgtaggaggtttattgtcactacaattgattaatcgtaaactagttctggaatttataaattattcttctggagtgtatagtaatattcttgtagccatggctatccttattattttatgttgtcttttgacgattattgtatttaaacgttctgaaaagcagtttgaatag

SEQ ID NO: 421369 - DNA, 1416 bp, Staphylococcus aureus
ttgccactcattttttgcgttagcaaaaacaggtttaagcctcgcagagcacacgtattaacgacttattgtaaaataagtctagtgtgttattatactttaataaataaagctacgcaaaatcatgtgcagtggaggtcatttattatgtcatattccattattagaattgctaaagtgaaatcaaaaacgaatacaagaggtattcaaaaacacgtccaaagacaaaataaaaattacgaaaatctggatattgatttggaaaattcatatttaaattatgatttagtgaatgataacttgatcgatttcaatcaaaaaattgatgagaaaattgaacagaattataaaggtgaacgtaaaatcagaaaagatgctgtaaaacatattgatggtttgattacatcagacaatagcttttttgaacaattaacaccagaagaaacaaagatgttttttgagcacgccaagtcatttttagaacaagaatacggaaaagataatttactttatgcaacggtgcatatggacgaattaacgcctcatatgcattatggtgttgtaccgataacaaaagatggacgattgagtgcgaaagaagtggtaggtaataaaaaagcgctgacggaatttcaagatagatttaatgaatatatcaatagctgtggttatgaattgagtagaggtatatcaagaaaattaatgccgagacaacatgagcaagtgagtcgatataaacagttaacagattatcacaaagaagaatacgagcgtcagagccaaaaattggaccatataaagcaagaaagcaaggaagtaatggaaaagtaccaaaacgctttaaacgttcttaaaacccctttaaatatcccgtataagatcgaaacggaaaaagtaggtggattattcagcaaagaaacacaagaaacaggcaacgtcgttatagataaaaacgagtttgaatcattgcaggagcaagttacagcgtcacagctgattattaaagattatgaatatatcaaagaaggattagcattaaaagaggcgaaacaaagatgtaaacagttagatagtgagctgagagaagagcatctgaaaaatgaggaattagtcgatgactataataatttagctgatagctataatgatttgttagagcagaataaagaaaaagataaagcattgaatcaatcatataatttattcaacaatgtatttagattgattaaaggtgtgatgaaagaagaagcatatcataggttgatcgattatattgataatcacttagagagttcaaaaatgcgagaaacaatgattgtagatgacaacgatgaacagttctttaagaaaaagtatcagagccaagaaccagaaattatttttgaagatgaacgagatgatggctactctttataa

SEQ ID NO: 421370 - DNA, 1380 bp, Staphylococcus aureus; identical to SEQ ID NO: 412597

SEQ ID NO: 421371 - DNA, 1416 bp, Staphylococcus aureus
ttgccactcattttttgcgttagcaaaaacaggtttaagcctcgcagagcacacgtattaacgacttattgtaaaataagtctagtgtgttattatactttaataaataaagctacgcaaaatcatgtgcagtggaggtcatttattatgtcatattccattattagaattgctaaagtgaaatcaaaaacgaatacaagaggtattcaaaaacacgtccaaagacaaaataaaaattacgaaaatctggatattgatttggaaaattcatatttaaattatgatttagtgaatgataacttgatcgatttcaatcaaaaaattgatgagaaaattgaacagaattataaaggtgaacgtaaaatcagaaaagatgctgtaaaacatattgatggtttgattacatcagacaatagcttttttgaacaattaacaccagaagaaacaaagatgttttttgagcacgccaagtcatttttagaacaagaatacggaaaagataatttactttatgcaacggtgcatatggacgaattaacgcctcatatgcattatggtgttgtaccgataacaaaagatggacgattgagtgcgaaagcagtggtaggtaataaaaaagcgctgacggaatttcaagatagatttaatgaatatatcaatagctgtggttatgaattgagtagaggtatatcaagaaaattaatgccgagacaacatgagcaagtgagtcgatataaacagttaacagattatcacaaagaagaatacgagcgtcagagccaaaaattggaccatataaagcaagaaagcaaggaagtaatggaaaagtaccaaaacgctttaaacgttcttaaaacccctttaaatatcccgtataagatcgaaacggaaaaagtaggtggattattcagcaaagaaacacaagaaacaggcaacgtcgttatagataaaaacgagtttgaatcattgcaggagcaagttacagcgtcacagctgattattaaagattatgaatatatcaaagaaggattagcattaaaagaggcgaaacaaagatgtaaacagttagatagtgagctgagagaagagcatctgaaaaatgaggaattagtcgatgactataataatttagctgatagctataatgatttgttagagcagaataaagaaaaagataaagcattgaatcaatcatataatttattcaacaatgtatttagattgattaaaggtgtgatgaaagaagaagcatatcataggttgatcgattatattgataatcacttagagagttcaaaaatgcgagaaacaatgattgtagatgacaacgatgaacagttctttaagaaaaagtatcagagacaagaaccagaaattatttttgaagatgaacgagatgatggctactctttataa

SEQ ID NO: 421372 - DNA, 1380 bp, Staphylococcus aureus; identical to SEQ ID NO: 412597

SEQ ID NO: 421373 - DNA, 1416 bp, Staphylococcus aureus
ttgccactcattttttgcgttagcaaaaacaggtttaagcctcgcagagcacacgtattaacgacttattgtaaaataagtctagtgtgttattatactttaataaataaagctacgcaaaatcatgtgcagtggaggtcatttattatgtcatattccattattagaattgctaaagtgaaatcaaaaacgaatacaagaggtattcaaaaacacgtccaaagacaaaataaaaattacgaaaatctggatattgatttggaaaattcatatttaaattatgatttagtgaatgataacttgatcgatttcaatcaaaaaattgatgagaaaattgaacagaattataaaggtgaacgtaaaatcagaaaagatgctgtaaaacatattgatggtttgattacatcagacaatagcttttttgaacaattaacaccagaagaaacaaagatgttttttgagcacgccaagtcatttttagaacaagaatacggaaaagataatttactttatgcaacggtgcatatggacgaattaacgcctcatatgcattatggtgttgtaccgataacaaaagatggacgattgagtgcgaaagaagtggtaggtaataaaaaagcgctgacggaatttcaagatagatttaatgaatatatcaatagctgtggttatgaattgagtagaggtatatcaagaaaattaatgccgagacaacatgagcaagtgagtcgatataaacagttaacagattatcacaaagaagaataccagcgtcagagccaaaaattggaccatataaagcaagaaagcaaggaagtaatggaaaagtaccaaaacgctttaaacgttcttaaaacccctttaaatatcccgtataagatcgaaacggaaaaagtaggtggattattcagcaaagaaacacaagaaacaggcaacgtcgttatagataaaaacgagtttgaatcattgcaggagcaagttacagcgtcacagctgattattaaagattatgaatatatcaaagaaggattagcattaaaagaggcgaaacaaagatgtaaacagttagatagtgagctgagagaagagcatctgaaaaatgaggaattagtcgatgactataataatttagctgatagctataatgatttgttagagcagaataaagaaaaagataaagcattgaatcaatcatataatttattcaacaatgtatttagattgattaaaggtgtgatgaaagaagaagcatatcataggttgatcgattatattgataatcacttagagagttcaaaaatgcgagaaacaatgattgtagatgacaacgatgaacagttctttaagaaaaagtatcagagacaagaaccagaaattatttttgaagatgaacgagatgatggctactctttataa

SEQ ID NO: 421374 - DNA, 1380 bp, Staphylococcus aureus; identical to SEQ ID NO: 412597

SEQ ID NO: 421375 - DNA, 1416 bp, Staphylococcus aureus
ttgccactcattttttgcgttagcaaaaacaggtttaagcctcgcagagcacacgtattaacgacttattgtaaaataagtctagtgtgttattatactttaataaataaagctacgcaaaatcatgtgcagtggaggtcatttattatgtcatattccattattagaattgctaaagtgaaatcaaaaacgaatacaagaggtattcaaaaacacgtccaaagacaaaataaaaattacgaaaatctggatattgatttggaaaattcatatttaaattatgatttagtgaatgataacttgatcgatttcaatcaaaaaattgatgagaaaattgaacagaattataaaggtgaacgtaaaatcagaaaagatgctgtaaaacatattgatggtttgattacatcagacaatagcttttttgaacaattaacaccagaagaaacaaagatgttttttgagcacgccaagtcatttttagaacaagaatacggaaaagataatttactttatgcaacggtgcatatggacgaattaacgcctcatatgcattatggtgttgtaccgataacaaaagatggacgattgagtgcgaaagaagtggtaggtaataaaaaagcgctgacggaatttcaagatagatttaatgaatatatcaatagctgttgttatgaattgagtagaggtatatcaagaaaattaatgccgagacaacatgagcaagtgagtcgatataaacagttaacagattatcacaaagaagaatacgagcttcagagccaaaaattggaccatataaagcaagaaagcaaggaagtaatggaaaagtaccaaaacgctttaaacgttcttaaaacccctttaaatatcccgtataagatcgaaacggaaaaattaggtggattattcagcaaagaaacacaagaaacaggcaacgtcgttatagataaaaacgagtttgaatcattgcaggagcaagttacagcgtcacagctgattattaaagattatgaatatatcaaagaaggattagcattaaaagaggcgaaacaaagatgtaaacagttagatagtgagctgagagaagagcatctgaaaaatgaggaattagtcgatgactataataatttagctgatagctataatgatttgttagagcagaataaagaaaaagataaagcattgaatcaatcatataatttattcaacaatgtatttagattgattaaaggtgtgatgaaagaagaagcatatcataggttgatcgattatattgataatcacttagagagttcaaaaatgcgagaaacaatgattgtagatgacaacgatgaacagttctttaagaaaaagtatcagagacaagaaccagaaattatttttgaagatgaacgagatgatggctactctttataa

SEQ ID NO: 421376 - DNA, 1380 bp, Staphylococcus aureus; identical to SEQ ID NO: 412597

SEQ ID NO: 421377 - DNA, 1539 bp, Staphylococcus aureus; identical to SEQ ID NO: 409699

SEQ ID NO: 421378 - DNA, 222 bp, Staphylococcus aureus
atgactatcaaacagattgtgaatgatttattgaataaaaaatggtctttagaagatttgttttggttaattttcatgtgtgtaatatttagtacttttactacaccatttttaggtattccgattggagttattgcttattttttctttttttataaagatgatgatgatgttgatgagagagcagaaaaatatgattatcaagacgagaataagaaatag

SEQ ID NO: 421379 - DNA, 222 bp, Staphylococcus aureus; identical to SEQ ID NO: 421204

SEQ ID NO: 421380 - DNA, 618 bp, Staphylococcus aureus; identical to SEQ ID NO: 407393

SEQ ID NO: 421381 - DNA, 348 bp, Staphylococcus aureus; identical to SEQ ID NO: 407392

SEQ ID NO: 421382 - DNA, 222 bp, Staphylococcus aureus; identical to SEQ ID NO: 421204

SEQ ID NO: 421383 - DNA, 618 bp, Staphylococcus aureus; identical to SEQ ID NO: 407393

SEQ ID NO: 421384 - DNA, 348 bp, Staphylococcus aureus; identical to SEQ ID NO: 407392

SEQ ID NO: 421385 - DNA, 222 bp, Staphylococcus aureus; identical to SEQ ID NO: 421204

SEQ ID NO: 421386 - DNA, 618 bp, Staphylococcus aureus; identical to SEQ ID NO: 407393

SEQ ID NO: 421387 - DNA, 348 bp, Staphylococcus aureus; identical to SEQ ID NO: 407392

SEQ ID NO: 421388 - DNA, 348 bp, Staphylococcus aureus; identical to SEQ ID NO: 407392

SEQ ID NO: 421389 - DNA, 618 bp, Staphylococcus aureus; identical to SEQ ID NO: 407393

SEQ ID NO: 421390 - DNA, 222 bp, Staphylococcus aureus
atgactatcaaacagattgtgaatgatttattgaataaaaaatggtctttagaagatttgttttggttaatttccatgtgtgtaatatttagtacttttactacaccatttttaggtattccgattggagttattgcttattttttctttttttataaagatgatgatgatgttgatgagatagcagaaaaatatgattatcaagacgagaataagaaatag

SEQ ID NO: 421391 - DNA, 348 bp, Staphylococcus aureus; identical to SEQ ID NO: 407392

SEQ ID NO: 421392 - DNA, 618 bp, Staphylococcus aureus; identical to SEQ ID NO: 407393

SEQ ID NO: 421393 - DNA, 222 bp, Staphylococcus aureus
atgactatcaaacagattgtgaatgatttattgaataaaaaatggtctttagaagatttgttttggttaattttcatgtgtgtaatatttagtacttttactacaccatttttaggtattccgattggagttattgcttattttttctttttttataaagatgatgatgatgttgatgagatagcagaaaaatatgattatcaagacgaggataagaaatag

SEQ ID NO: 421394 - DNA, 348 bp, Staphylococcus aureus; identical to SEQ ID NO: 407392

SEQ ID NO: 421395 - DNA, 618 bp, Staphylococcus aureus; identical to SEQ ID NO: 407393

SEQ ID NO: 421396 - DNA, 222 bp, Staphylococcus aureus; identical to SEQ ID NO: 421204

SEQ ID NO: 421397 - DNA, 348 bp, Staphylococcus aureus; identical to SEQ ID NO: 407392

SEQ ID NO: 421398 - DNA, 618 bp, Staphylococcus aureus; identical to SEQ ID NO: 407393

SEQ ID NO: 421399 - DNA, 222 bp, Staphylococcus aureus; identical to SEQ ID NO: 421204

SEQ ID NO: 421400 - DNA, 348 bp, Staphylococcus aureus; identical to SEQ ID NO: 407392

SEQ ID NO: 421401 - DNA, 618 bp, Staphylococcus aureus; identical to SEQ ID NO: 407393

SEQ ID NO: 421402 - DNA, 222 bp, Staphylococcus aureus; identical to SEQ ID NO: 421204

SEQ ID NO: 421403 - DNA, 1098 bp, Staphylococcus aureus
atgtgtataagagacagcaatcacttttttattttgatttttggtaggttagtacaaggagtaggatctgctgcattcccttcactgattatggtggttgtagctagaaatattacaagaaaaaaacaaggcaaagcctttggttttataggatcaattgtagctttaggtgaagggttaggtccttcaatagggggaataatagcacattatattcattggtcttacctacttatacttcctatgattacaatagtaactataccttttcttattaaagtaatggtacctggtaaatcaacaaaaaatacattagatatcgtaggtattgttttaatgtctataagtattatatgttttatgttatttacgacaaattataattggacttttttaatactcttcacaatcttttttgtgatttttattaaacatatttcaagagtttctaacccttttattaatcctaaactagggaaaaacattccgtttatgcttggtttgttttctggtgggctaatattttctatagtagctggttttatatcaatggtgccttatatgatgaaaactatttatcatgtaaatgtagcgacaataggtaatagtgttatttttcctggaaccatgagtgttattgtttttggttattttggtggttttttagtggatagaaaaggatcattatttgtttttattttaggatcattgtctatctctataagttttttaactattgcattttttgttgagtttagtatgtggttgactacttttatgtttatatttgttatgggcggattatcttttactaaaacagttatatcaaaaatagtatcaagtagtctttctgaagaagaagttgcttctggaatgagtttgctaaatttcacaagttttttatcagagggaacaggtatagcaattgtaggaggtttattgtcactacaattgattaatcgtaaactagttctggaatttataaattattcttctggagtgtatagtaatattcttgtagccatggctatccttattattttatgttgtcttttgacgattattgtatttaaacgttctgaaaagcagtttgaatag

SEQ ID NO: 421404 - DNA, 1416 bp, Staphylococcus aureus; identical to SEQ ID NO: 421189

SEQ ID NO: 421405 - DNA, 1380 bp, Staphylococcus aureus; identical to SEQ ID NO: 412597

SEQ ID NO: 421406 - DNA, 1416 bp, Staphylococcus aureus; identical to SEQ ID NO: 421189

SEQ ID NO: 421407 - DNA, 1008 bp, Staphylococcus aureus
atggtggttgtagctagaaatattaccagaaaaaaacaaggcaaagcctttggttttataggatcaattgtagctttaggtgaagggttaggtccttcaatagggggaataatagcacattatattcattggtcttacctacttatacttcctatgattacaatagtaactataccttttcttattaaagtaatggtacctggtaaatcaacaaaaaatacattagatatcgtaggtattgttttaatgtctataagtattatatgttttatgttatttacgacaaattataattggacttttttaatactcttcacaatcttttttgtgatttttattaaacatatttcaagagtttctaacccttttattaatcctaaactagggaaaaacattccgtttatgcttggtttgttttctggtgggctaatattttctatagtagctggttttatatcaatggtgccttatatgatgaaaactatttatcatgtaaatgtagcgacaataggtaatagtgttatttttcctggaaccatgagtgttattgtttttggttattttggtggttttttagtggatagaaaaggatcattatttgtttttattttaggatcattgtctatctctataagttttttaactattgcattttttgttgagtttagtatgtggttgactacttttatgtttatatttgttatgggcggattatcttttactaaaacagttatatcaaaaatagtatcaagtagtctttctgaagaagaagttgcttctggaatgagtttgctaaatttcacaagttttttatcagagggaacaggtatagcaattgtaggaggtttattgtcactacaattgattaatcgtaaactagttctggaatttataaattattcttctggagtgtatagtaatattcttgtagccatggctatccttattattttatgttgtcttttgacgattattgtatttaaacgttctgaaaagcagtttgaatag

SEQ ID NO: 421408 - DNA, 1416 bp, Staphylococcus aureus; identical to SEQ ID NO: 421189

SEQ ID NO: 421409 - DNA, 1416 bp, Staphylococcus aureus
ttgccactcattttttgcgttagcaaaaacaggtttaagcctcgcagagcacacgtattaacgacttattgtaaaataagtctagtgtgttattatactttaataaataaagctacgcaaaatcatgtgcagtggaggtcatttattatgtcatattccattattagaattgctaaagtgaaatcaaaaacgaatacaagaggtattcaaaaacacgtccaaagacaaaataaaaattacgaaaatctggatattgatttggaaaattcatatttaaattatgatttagtgaatgataacttgatcgatttcaatcaaaaaattgatgagaaaattgaacagaattataaaggtgaacgtaaaatcagaaaagatgctgtaaaacatattgatggtttgattacatcagacaatagcttttttgaacaattaacaccagaagaaacaaagatgttttttgagcacgccaagtcatttttagaacaagaatacggaaaagataatttactttatgcaacggtgcatatggacgaattaacgcctcatatgcattatggtgttgtaccgataacaaaagatggacgattgagtgcgaaagaagtggtaggtaataaaaaagcgctgacggaatttcaagatagatttaatgaatatatcaatagctgtggttatgaattgagtagaggtatatcaagaaaattaatgccgagacaacatgagcaagtgagtcgatataaacagttaacagattatcacaaagaagaatacgagcgtcagagccaaaaattggaccatataaagcaagaaagcaaggaagtaatggaaaagtaccaaaacgctttaaacgttcttaaaacccctttaaatatcccgtataagatcgaaacggaaaaagtaggtggattattcagcaaagaaacacaagaaacaggcaacgtcgttatagataaaaacgagtttgaatcattgcaggagcaagttacagcgtcacagctgattattaaagattatgaatatatcaaagaaggattagcattaaaagaggcgaaacaaagatgtaaacagttagatagtgagctgagagaagagcatctgaaaaatgaggaattagtcgatgactataataatttagctgatagctataatgatttgttagagcagaataaagaaaaagataaagcattgaatcaatcatataatttattcaacaatgtatttagattgattaaaggtgtgatgaaagaagaagcatatcataggttgatcgattatattgataatcacttagagagttcaaaaatgcgagaaacaatgattgtagatgacaacgatgaacagttctttaagaaaaagtatcagagacaagaaccagaaattatttttgaagatgaacgagatgatggctactccttataa

SEQ ID NO: 421410 - DNA, 1380 bp, Staphylococcus aureus; identical to SEQ ID NO: 412597

SEQ ID NO: 421411 - DNA, 273 bp, Staphylococcus aureus
atgacaatcattttattcgttgttattcatgcaatcattttaatgggtatcgttcaatattacttaaaacgtggtcaaaaaattactaaagataaagtaaaaacagctgacaaggataataaagttgtcactgaaccaaaaaatacaaaagtagaaactgataaagtgacaacatctgttgaaacaaaaacagaaaaagcacaagattcattaaatgataatacaacaaaaacaatgacttcagataaaccagaagacaatcaaccaaaataa

SEQ ID NO: 421412 - DNA, 1128 bp, Staphylococcus aureus; identical to SEQ ID NO: 409709

SEQ ID NO: 421413 - DNA, 1416 bp, Staphylococcus aureus; identical to SEQ ID NO: 421189

SEQ ID NO: 421414 - DNA, 855 bp, Staphylococcus aureus; identical to SEQ ID NO: 421148

SEQ ID NO: 421415 - DNA, 135 bp, Staphylococcus aureus; identical to SEQ ID NO: 421203

SEQ ID NO: 421416 - DNA, 348 bp, Staphylococcus aureus; identical to SEQ ID NO: 407392

SEQ ID NO: 421417 - DNA, 618 bp, Staphylococcus aureus; identical to SEQ ID NO: 407393

SEQ ID NO: 421418 - DNA, 135 bp, Staphylococcus aureus; identical to SEQ ID NO: 421203

SEQ ID NO: 421419 - DNA, 2886 bp, Staphylococcus aureus
atgtgtataagagacagattaggcactgacacacagtttatttatacgacaaataaaaatatcacttcattttctcaagaagaaaattatgatgacgttattacacgtgttacagttacttctaaatttaaaccagatgttgatagagaaaaaataaaacaacaacaaactaatgaattgaatgcattaaaagaacaacaacaggtatataataaacaaattgcaagtgaaaagcgtagacaacgtatggaacgtgaaattgagtctaaaattcgtaaacaagaacttaaaaagatgaattttgaagctcaaaaacataagaagtacaaatcaatggttcatgaagaatttaagagtgctgagcaaatacgacaagaaattcaagctaaatatgataaccaacaagctaaaattgaacatgaaaagctgattgcaaaacaacatgcggatatgcaaaaagctgaaatccaaaaattgaaagcaaaacacaaagatgatttatctgcaattaatgaggatattattttatcagttacggtagatagtccatttattaatgattaccctgaaatttatgaagagattattgaaaataatgaacttaaaacaattgatgaattaactaattacgcagaaggttattttagtaagcaacatgttgattttcctaaaatatcaataaaagtcgggttggatgtgttgcaaaatgagcaggtgcaattaggcgataccgttattgttagatatctaacacatgatgttgaccaacgccaaagagtaattgcaacaaaatatagtcccatgaaaaaagaattcattgaagtaacttttggagataaaactgaaagttatgtatatcaaagtaatacagttagttcaaatacgacacaatcgattttgcaaaattataaaacttcagatgacattgaagatgttaagaacgaaatgaactattattatgtagagttaataaataaagaaaaagaaaattttaacaatcatttggaataccaaacgggattaataagagacgatataaatacttataagcagacgatagacggcagagtgaacgtgatgagtgctaattttgatgatcaatttaattctcttaatagtacgcttgaaacgaactcaaataatacaacgttagctctaaatcaattacaacaaaatgtgagtacacaatttagtcaaatgcagtctacaaataacgcaaagttattagaagtgaaaagtgaattacttcaatatactaattctaattacaatcaagctaatgatagaattaatcaaattaatcaaaaagttgatgattttaaagttggtgcagttaatttactaaaaggaacagcaaattatacgacgccttttaatcattctattatagaaaattcagggagaattgtagacggttacttatattcttctgattttagtagtagccccggccgtttatggcaaacgaatcaagttgttaaattactgccgaataccgattatgtacttagctatgatgctttttcaaaatcaaatatcgggacagcgtatacacctattgaaattttaagtgaggatggcagggatttagtaccaaaacagtatcttcatacgatagatacgtataaacatgttactaatactaaacaacgaatgacatttaaattcaacacaggtaataatatatatttccgctttcatttcacgtctgaaagtgttaattctgttgtatacattggtaaaatccaattggaaaaaggtacaattgcaactgattggtcaccgaatataaaagatgttgaggcggaaataaaggttgttgcggatagtattactacaaaagcacttgaagcggttcgcggagatatccaatatttaagaacaaatattcttgatacgaaaacaattgaggctaatatgctaaaggttgataatgcttttgttaacaagctattgtcaaataatattttagttaatcgattaacagctaattcgatattatcaaatgtgattaaaacaaaaactttggaatcagtttatcaaaatgtgggtgagttgaggtctcgattaattactacaaatagtattagtgcaaatgcgattaacgttgatagtgcattaatccataaactagtgtctgatgatcaatttgttaatattttgacagcaagaagcgcatttgtagattggattaaagcaattgacattgatgcaggacgtattcgaggtggtttgattagatctagaaacgaacgtatgttttgggatttagagcataataattttgatttttatgatggctcagttactaactattacggctcttctagaatagtgtttcatactacggataacagtatttatcaaggttacaatggcacgtgtgcatttttgaattttactaaatcagctggggataattacccatctgtagtaatgggaactagtggggatttaattgctagttcaactacagggcatttttcaggtataaaatgtcacacagcaaaagcggataaggtttataatttatcaaaagttgatgtcatagctgaccaagtattattcgacagtcatgggggtagtgctgacactggcggttggactttagaaaatttcagagtaccttctgtgcatagtaatgtcagagcgttttatggtaacaatcctgctaattataaatatgaattaggacaaagagaatataaattcagaactttatggactgaaggtataaatgacacgttaagagtggtaacttatcccggtacaataacagggataatgagtgataacgagagatatggtattcaaatagctaattatgatgtctacgttttaattaatgggcgtagagtatcattaaaacaattagttgatcgttaa

SEQ ID NO: 421420 - DNA, 618 bp, Staphylococcus aureus; identical to SEQ ID NO: 407393

SEQ ID NO: 421421 - DNA, 348 bp, Staphylococcus aureus; identical to SEQ ID NO: 407392

SEQ ID NO: 421422 - DNA, 618 bp, Staphylococcus aureus; identical to SEQ ID NO: 407393

SEQ ID NO: 421423 - DNA, 348 bp, Staphylococcus aureus; identical to SEQ ID NO: 407392

SEQ ID NO: 421424 - DNA, 1416 bp, Staphylococcus aureus; identical to SEQ ID NO: 421189

SEQ ID NO: 421425 - DNA, 663 bp, Staphylococcus aureus
atgtgtataagagacagcccttttattaatcctaaactagggaaaaacattccgtttatgcttggtttgttttctggtgggctaatattttctatagtagctggttttatatcaatggtgccttatatgatgaaaactatttatcatgtaaatgtagcgacaataggtaatagtgttatttttcctggaaccatgagtgttattgtttttggttattttggtggttttttagtggatagaaaaggatcattatttgtttttattttaggatcattgtctatctctataagttttttaactattgcattttttgttgagtttagtatgtggttgactacttttatgtttatatttgttatgggcggattatcttttactaaaacagttatatcaaaaatagtatcaagtagtctttctgaagaagaagttgcttctggaatgagtttgctaaatttcacaagttttttatcagagggaacaggtatagcaattgtaggaggtttattgtcactacaattgattaatcgtaaactagttctggaatttataaattattcttctggagtgtatagtaatattcttgtagccatggctatccttattattttatgttgtcttttgacgattattgtatttaaacgttctgaaaagcagtttgaatag

SEQ ID NO: 421426 - DNA, 996 bp, Staphylococcus aureus
atgcaagacaatcatacaaaatatatagacggaaatcaagataacgaaacactcaaagatgttacaaaaagtgggaaacaacgtccgtggagagaaaagaaaatagataatgtaagttatgcagatatactagaaattttaaaaattaaaaaggcttataacgtaaaacagtgtggtaacgtcttagagttcaagccgactgatgaaggttatttgaaattacataagacatggttttgcaaatcaaaattatgtccagtttgtaattggaggcgtgctatgaaaaatagttatcaagctgaaaaagttattaaagaagttatcaaagaaaagcctaaagcacgttggttattcttaacactttcaacacgaaatgcgatagatggagatactttagaacaaagtttgaaacacttaacgaaagcatttgataggttaagtagatataaaaaagttaaacaaaatcttgttggatttttgcgttcgacagaagttaccgttaataaaaatgacggtagttataatcaacatatgcatgttttattatgtgttgaaaatagttattttaaaaataaatctaattatataactcaagaagaatgggtctatttatggcaaaaagcattacaagttgattatctacctgttgctaatattaaagcgatcaaaccaaataaaaaaggcgataaagacattgaatcggcaatcaaagagacctcaaaatattcggttaaatcatctgattttttaactgatgatgatgaaaaaaatcaagaaattgtaagtgatttagaaaaaggtttgtatcgaaagcgtatgttaagttatggtggattgctgaaacaaaagcataaaattttaaacttagacgatgctgaagatggaaatttgattaatacaagtgatgaagataaaacaacagatgaagaagcaaaagcacattcaattacggcaatttggaattttgaaaagcaaaattattatttaaggcattag

SEQ ID NO: 421427 - DNA, 606 bp, Staphylococcus aureus
atgcttggtttgttttctggtgggctaatattttctatagcagctggttttatatcaatggtgccttatatgatgaaaactatttatcatgtaaatgtagcgacaataggtaatagtgttatttttcctggaaccatgagtgttattgtttttggttattttggtggttttttagtggatagaaaaggatcattatttgtttttattttaggatcattgtctatctctataagttttttaactattgcattttttgttgagtttagtatgtggttgactacttttatgtttatatttgttatgggcggattatcttttactaaaacagttatatcaaaaatagtatcaagtagtctttctgaagaagaagttgcttctggaatgagtttgctaaatttcacaagttttttatcagagggaacaggtatagcaattgtaggaggtttattgtcactacaattgattaatcgtaaactagttctggaatttataaattattcttctggagtgtatagtaatattcttgtagccatggctatccttattattttatgttgtcttttgacgattattgtatttaaacgttctgaaaagcagtttgaatag

SEQ ID NO: 421428 - DNA, 1416 bp, Staphylococcus aureus; identical to SEQ ID NO: 421189

SEQ ID NO: 421429 - DNA, 618 bp, Staphylococcus aureus; identical to SEQ ID NO: 407393

SEQ ID NO: 421430 - DNA, 348 bp, Staphylococcus aureus; identical to SEQ ID NO: 407392

SEQ ID NO: 421431 - DNA, 996 bp, Staphylococcus aureus; identical to SEQ ID NO: 421426

SEQ ID NO: 421432 - DNA, 618 bp, Staphylococcus aureus; identical to SEQ ID NO: 407393

SEQ ID NO: 421433 - DNA, 348 bp, Staphylococcus aureus; identical to SEQ ID NO: 407392

SEQ ID NO: 421434 - DNA, 618 bp, Staphylococcus aureus; identical to SEQ ID NO: 407393

SEQ ID NO: 421435 - DNA, 348 bp, Staphylococcus aureus; identical to SEQ ID NO: 407392

SEQ ID NO: 421436 - DNA, 618 bp, Staphylococcus aureus
atgattcaaacggttgttgctgctgctgttctttatattgctacagcagttgatttattagtaattttattaatattttttgctagagcaaagactagaaaagaatatagagatatttatgttggtcaatatttagggtctattattttaatattagttagtttgtttttagcttttgtattaaattatgttccagaaaagtggatattaggtttattgggtttaataccaatttatcttggaattaaagtggctatttatgatgattgtgaaggagaaaagagagctaaaaaagaattgaatgaaaaaggattgtctaaattagttggtacggttgcaattgttacgatagcaagttgtggcgccgataatattggtttatttgttccgtattttgtgacattaagtgttactaatttattacttactctgtttgtctttttaattttaattttcttcttggtgtttactgcacaaaaattagctaatatcacaggaattggagaaattgttgagaaatttagtcgttggattatggctatcatttatatagctttaggtttatttattattattgaaaatgacactattcaaacaattttaggatttatattttaa

SEQ ID NO: 421437 - DNA, 348 bp, Staphylococcus aureus; identical to SEQ ID NO: 407392

SEQ ID NO: 421438 - DNA, 618 bp, Staphylococcus aureus; identical to SEQ ID NO: 407393

SEQ ID NO: 421439 - DNA, 348 bp, Staphylococcus aureus; identical to SEQ ID NO: 407392

SEQ ID NO: 421440 - DNA, 618 bp, Staphylococcus aureus; identical to SEQ ID NO: 407393

SEQ ID NO: 421441 - DNA, 348 bp, Staphylococcus aureus; identical to SEQ ID NO: 407392

SEQ ID NO: 421442 - DNA, 618 bp, Staphylococcus aureus; identical to SEQ ID NO: 407393

SEQ ID NO: 421443 - DNA, 348 bp, Staphylococcus aureus; identical to SEQ ID NO: 407392

SEQ ID NO: 421444 - DNA, 618 bp, Staphylococcus aureus; identical to SEQ ID NO: 407393

SEQ ID NO: 421445 - DNA, 348 bp, Staphylococcus aureus; identical to SEQ ID NO: 407392

SEQ ID NO: 421446 - DNA, 618 bp, Staphylococcus aureus; identical to SEQ ID NO: 407393

SEQ ID NO: 421447 - DNA, 348 bp, Staphylococcus aureus; identical to SEQ ID NO: 407392

SEQ ID NO: 421448 - DNA, 618 bp, Staphylococcus aureus; identical to SEQ ID NO: 407393

SEQ ID NO: 421449 - DNA, 348 bp, Staphylococcus aureus; identical to SEQ ID NO: 407392

SEQ ID NO: 421450 - DNA, 618 bp, Staphylococcus aureus; identical to SEQ ID NO: 407393

SEQ ID NO: 421451 - DNA, 348 bp, Staphylococcus aureus; identical to SEQ ID NO: 407392

SEQ ID NO: 421452 - DNA, 618 bp, Staphylococcus aureus; identical to SEQ ID NO: 407393

SEQ ID NO: 421453 - DNA, 348 bp, Staphylococcus aureus; identical to SEQ ID NO: 407392

SEQ ID NO: 421454 - DNA, 618 bp, Staphylococcus aureus; identical to SEQ ID NO: 407393

SEQ ID NO: 421455 - DNA, 348 bp, Staphylococcus aureus; identical to SEQ ID NO: 407392

SEQ ID NO: 421456 - DNA, 618 bp, Staphylococcus aureus; identical to SEQ ID NO: 407393

SEQ ID NO: 421457 - DNA, 348 bp, Staphylococcus aureus; identical to SEQ ID NO: 407392

SEQ ID NO: 421458 - DNA, 618 bp, Staphylococcus aureus; identical to SEQ ID NO: 407393

SEQ ID NO: 421459 - DNA, 348 bp, Staphylococcus aureus; identical to SEQ ID NO: 407392

SEQ ID NO: 421460 - DNA, 618 bp, Staphylococcus aureus; identical to SEQ ID NO: 407393

SEQ ID NO: 421461 - DNA, 348 bp, Staphylococcus aureus; identical to SEQ ID NO: 407392

SEQ ID NO: 421462 - DNA, 618 bp, Staphylococcus aureus; identical to SEQ ID NO: 407393

SEQ ID NO: 421463 - DNA, 348 bp, Staphylococcus aureus; identical to SEQ ID NO: 407392

SEQ ID NO: 421464 - DNA, 618 bp, Staphylococcus aureus; identical to SEQ ID NO: 407393

SEQ ID NO: 421465 - DNA, 348 bp, Staphylococcus aureus; identical to SEQ ID NO: 407392

SEQ ID NO: 421466 - DNA, 618 bp, Staphylococcus aureus; identical to SEQ ID NO: 407393

SEQ ID NO: 421467 - DNA, 348 bp, Staphylococcus aureus; identical to SEQ ID NO: 407392

SEQ ID NO: 421468 - DNA, 618 bp, Staphylococcus aureus; identical to SEQ ID NO: 407393

SEQ ID NO: 421469 - DNA, 348 bp, Staphylococcus aureus; identical to SEQ ID NO: 407392

SEQ ID NO: 421470 - DNA, 618 bp, Staphylococcus aureus; identical to SEQ ID NO: 407393

SEQ ID NO: 421471 - DNA, 348 bp, Staphylococcus aureus; identical to SEQ ID NO: 407392

SEQ ID NO: 421472 - DNA, 618 bp, Staphylococcus aureus; identical to SEQ ID NO: 407393

SEQ ID NO: 421473 - DNA, 348 bp, Staphylococcus aureus; identical to SEQ ID NO: 407392

SEQ ID NO: 421474 - DNA, 348 bp, Staphylococcus aureus; identical to SEQ ID NO: 407392

SEQ ID NO: 421475 - DNA, 618 bp, Staphylococcus aureus; identical to SEQ ID NO: 407393

SEQ ID NO: 421476 - DNA, 348 bp, Staphylococcus aureus; identical to SEQ ID NO: 407392

SEQ ID NO: 421477 - DNA, 618 bp, Staphylococcus aureus; identical to SEQ ID NO: 407393

SEQ ID NO: 421478 - DNA, 348 bp, Staphylococcus aureus; identical to SEQ ID NO: 407392

SEQ ID NO: 421479 - DNA, 618 bp, Staphylococcus aureus; identical to SEQ ID NO: 407393

SEQ ID NO: 421480 - DNA, 348 bp, Staphylococcus aureus; identical to SEQ ID NO: 407392

SEQ ID NO: 421481 - DNA, 618 bp, Staphylococcus aureus; identical to SEQ ID NO: 407393

SEQ ID NO: 421482 - DNA, 348 bp, Staphylococcus aureus; identical to SEQ ID NO: 407392

SEQ ID NO: 421483 - DNA, 618 bp, Staphylococcus aureus; identical to SEQ ID NO: 407393

SEQ ID NO: 421484 - DNA, 348 bp, Staphylococcus aureus; identical to SEQ ID NO: 407392

SEQ ID NO: 421485 - DNA, 618 bp, Staphylococcus aureus; identical to SEQ ID NO: 407393

SEQ ID NO: 421486 - DNA, 348 bp, Staphylococcus aureus; identical to SEQ ID NO: 407392

SEQ ID NO: 421487 - DNA, 618 bp, Staphylococcus aureus; identical to SEQ ID NO: 407393

SEQ ID NO: 421488 - DNA, 348 bp, Staphylococcus aureus; identical to SEQ ID NO: 407392

SEQ ID NO: 421489 - DNA, 618 bp, Staphylococcus aureus; identical to SEQ ID NO: 407393

SEQ ID NO: 421490 - DNA, 348 bp, Staphylococcus aureus; identical to SEQ ID NO: 407392

SEQ ID NO: 421491 - DNA, 618 bp, Staphylococcus aureus; identical to SEQ ID NO: 407393

SEQ ID NO: 421492 - DNA, 348 bp, Staphylococcus aureus; identical to SEQ ID NO: 407392

SEQ ID NO: 421493 - DNA, 618 bp, Staphylococcus aureus; identical to SEQ ID NO: 407393

SEQ ID NO: 421494 - DNA, 348 bp, Staphylococcus aureus; identical to SEQ ID NO: 407392

SEQ ID NO: 421495 - DNA, 618 bp, Staphylococcus aureus; identical to SEQ ID NO: 407393

SEQ ID NO: 421496 - DNA, 348 bp, Staphylococcus aureus; identical to SEQ ID NO: 407392

SEQ ID NO: 421497 - DNA, 618 bp, Staphylococcus aureus; identical to SEQ ID NO: 407393

SEQ ID NO: 421498 - DNA, 348 bp, Staphylococcus aureus; identical to SEQ ID NO: 407392

SEQ ID NO: 421499 - DNA, 618 bp, Staphylococcus aureus; identical to SEQ ID NO: 407393

SEQ ID NO: 421500 - DNA, 348 bp, Staphylococcus aureus; identical to SEQ ID NO: 407392

SEQ ID NO: 421501 - DNA, 618 bp, Staphylococcus aureus; identical to SEQ ID NO: 407393

SEQ ID NO: 421502 - DNA, 348 bp, Staphylococcus aureus; identical to SEQ ID NO: 407392

SEQ ID NO: 421503 - DNA, 618 bp, Staphylococcus aureus; identical to SEQ ID NO: 407393

SEQ ID NO: 421504 - DNA, 348 bp, Staphylococcus aureus; identical to SEQ ID NO: 407392

SEQ ID NO: 421505 - DNA, 618 bp, Staphylococcus aureus; identical to SEQ ID NO: 407393

SEQ ID NO: 421506 - DNA, 348 bp, Staphylococcus aureus; identical to SEQ ID NO: 407392

SEQ ID NO: 421507 - DNA, 618 bp, Staphylococcus aureus; identical to SEQ ID NO: 407393

SEQ ID NO: 421508 - DNA, 348 bp, Staphylococcus aureus; identical to SEQ ID NO: 407392

SEQ ID NO: 421509 - DNA, 618 bp, Staphylococcus aureus; identical to SEQ ID NO: 407393

SEQ ID NO: 421510 - DNA, 348 bp, Staphylococcus aureus; identical to SEQ ID NO: 407392

SEQ ID NO: 421511 - DNA, 618 bp, Staphylococcus aureus; identical to SEQ ID NO: 407393

SEQ ID NO: 421512 - DNA, 348 bp, Staphylococcus aureus; identical to SEQ ID NO: 407392

SEQ ID NO: 421513 - DNA, 618 bp, Staphylococcus aureus; identical to SEQ ID NO: 407393

SEQ ID NO: 421514 - DNA, 348 bp, Staphylococcus aureus; identical to SEQ ID NO: 407392

SEQ ID NO: 421515 - DNA, 618 bp, Staphylococcus aureus; identical to SEQ ID NO: 407393

SEQ ID NO: 421516 - DNA, 1383 bp, Staphylococcus aureus
atgaaatcttgcccgaagcgcggacaacaagcacaagatgatgtacagatatgtacacaatgtggacataaatttgatagtcgtcaagcattatatagaaagtcaaccgatgaagatatacaaactaataacatcaagatgagaaaaatggtgccttgggcaattggttttttcattttaatcttaattattatattgttctttttactaagaaacttcaattcacctgaagcgcaaactaaaatattagtgaatgcgattgagaataatgataaacaaaaagtagcaacattattaagtactaaagataataaagtagattctgaagaagcgaaagtatacattaactatatcaaagatgaagttgggcttaagcaatttgtcagcgaccttaaaaatacggtacataaattgaataagagtaagaccagcgtagcttcttatattcaaaccagatctggtcaaaatatattacgtgtaagtaaaaatggcacacgttatatctttttcgataatatgagctttactgcacctaccaagcaaccaattgttaaaccgaaagaaaaaacaaaatatgagtttaaatctggtggtaagaaaaagatggttatagctgaagcaaataaagtgacgccaataggtaattttataccggggacatatagaattccagctatgaaatcaactgagaacggtgattttgcaggccatttaaaatttgattttagacaaagtaattctgaaacggtagatgttactgaagattttgaagaagcaaatatatctgtaactttaaaaggcgatacaaaattaaatgatagttctaaaaaagtaactataaatgaccgtgaaatggcattttcaagttccaaaacgtatggtccatatccacaaaataaagatattaccatttcagcttcaggtaaagcgaaaggtaaaacatttacaacacagacgaagacgattaaagccagcgatttaaaatacaatacagaaataactttgaactttgacagtgaagatatcgaagactatgttgaaaagaaagaaaaagaagaaaacagcttgaagaacaaattgatagaattctttgctggatattctttagcgaataatgctgcgtttaatcagtcggattttgattttgtatcgtcatatataaaaaaaggatcatccttttatgatgatgtaaagaagcgtgtatctaaaggaagtttaatgatgattagttcaccacaaattatagatgccgaaaaacatggtgataagattaccgcaaccgtaagattaataaatgaaaacggtaagcaagtagataaagaatatgagcttgaacaaggttcgcaagaccgcttgcaattaatcaagacatcagaaaaatag

SEQ ID NO: 421517 - DNA, 996 bp, Staphylococcus aureus; identical to SEQ ID NO: 421426

SEQ ID NO: 421518 - DNA, 348 bp, Staphylococcus aureus; identical to SEQ ID NO: 407392

SEQ ID NO: 421519 - DNA, 1416 bp, Staphylococcus aureus; identical to SEQ ID NO: 421189

SEQ ID NO: 421520 - DNA, 432 bp, Staphylococcus aureus
gtggatagaaaaggatcattatttgtttttattttaggatcattgtctatctctataagttttttaactattgcattttttgttgagtttagtatgtggttgactacttttatgtttatatttgttatgggcggattatcttttactaaaacagttatatcaaaaatagtatcaagtagtctttctgaagaagaagttgcttctggaatgagtttgctaaatttcacaagttttttatcagagggaacaggtatagcaattgtaggaggtttattgtcactacaattgattaatcgtaaactagttctggaatttataaattattcttctggagtgtatagtaatattcttgtagccatggctatccttattattttatgttgtcttttgacgattattgtatttaaacgttctgaaaagcagtttgaatag

SEQ ID NO: 421521 - DNA, 1380 bp, Staphylococcus aureus; identical to SEQ ID NO: 412597

SEQ ID NO: 421522 - DNA, 1416 bp, Staphylococcus aureus; identical to SEQ ID NO: 421189

SEQ ID NO: 421523 - DNA, 279 bp, Staphylococcus aureus
atgtgtataagagacagatcaagtagtctttctgaagaagaagttgcttctggaatgagtttgctaaatttcacaagttttttatcagagggaacaggtatagcaattgtaggaggtttattgtcactacaattgattaatcgtaaactagttctggaatttataaattattcttctggagtgtatagtaatattcttgtagccatggctatccttattattttatgttgtcttttgacgattattgtatttaaacgttctgaaaagcagtttgaatag

SEQ ID NO: 421524 - DNA, 1380 bp, Staphylococcus aureus; identical to SEQ ID NO: 412597

SEQ ID NO: 421525 - DNA, 1380 bp, Staphylococcus aureus; identical to SEQ ID NO: 412597

SEQ ID NO: 421526 - DNA, 1380 bp, Staphylococcus aureus; identical to SEQ ID NO: 412597

SEQ ID NO: 421527 - DNA, 1380 bp, Staphylococcus aureus; identical to SEQ ID NO: 412597

SEQ ID NO: 421528 - DNA, 1380 bp, Staphylococcus aureus; identical to SEQ ID NO: 412597

SEQ ID NO: 421529 - DNA, 1380 bp, Staphylococcus aureus; identical to SEQ ID NO: 412597

SEQ ID NO: 421530 - DNA, 1380 bp, Staphylococcus aureus; identical to SEQ ID NO: 412597

SEQ ID NO: 421531 - DNA, 1380 bp, Staphylococcus aureus; identical to SEQ ID NO: 412597

SEQ ID NO: 421532 - DNA, 1143 bp, Staphylococcus aureus
atgaagataggtataacatgttacccgtccatgggtggttctggaattattgccacagaattaggaattaaattagcagagcgaggtcacgaagtacattttatcacttcaaatatcccgtttagaataagaaaaccattaccgaatatgatttttcatcaagttgaagtgaatcaatatgcagtatttcaatatccaccgtatgatattacgttaagtactaaaatcgctgaagttattaaagaatatgatcttgatttgttgcatatgcactatgctgtacctcatgcaatttgtgggattttagctcgtgagatgtcaggtaaagatataaaaattatgacaacgttacacggtactgatattactgttttgggctatgatcattcactccaaggtgcaattaaatttggcattgaaaaaagtgatattgtgacaagtgtgagtaaatctttagcgcaagaaacacatgaaattatcgaaactaacaaagaaattataccgatttataattttgtacgtgaaaatgagtttccaactaaacataacacagcattaaaagcacaatttggtatagcaccagatgaaaaagtgttaatacatgtatcgaattttagacaagtaaaacgcatagatactattatagaaacatttgcaaaagtacgtgaaaagatacctagtaaattaattttacttggtgatggccctgaattagtgccaatgcgtcaaaagacgaaagagttaaacgtagaagaggatgttttatttttagggaaacaagattgcgtaagtgaattttaccaattatctgacttagtattattattaagtgataaagaaagctttggactaactttacttgaggctatgaaaacaggcgtcgttccaattggttcaaatgccggtggaattaaagaggttattaaacatggtgaaactggatttgtcgtagatgtgggtgattgtgattcagcgagtaactatgctatccgattacttgaagataaggtgttatacaacaaacttcagaaaaacatgctagcagatattgctgaacgttttggatcagaactcattacagatcaatatgagtattattatcaaaaaatgctaaatgagcataacaaaagtaaaggcgagtaa

SEQ ID NO: 421533 - DNA, 1380 bp, Staphylococcus aureus; identical to SEQ ID NO: 412597

SEQ ID NO: 421534 - DNA, 1380 bp, Staphylococcus aureus; identical to SEQ ID NO: 412597

SEQ ID NO: 421535 - DNA, 1380 bp, Staphylococcus aureus; identical to SEQ ID NO: 412597

SEQ ID NO: 421536 - DNA, 996 bp, Staphylococcus aureus; identical to SEQ ID NO: 421426

SEQ ID NO: 421537 - DNA, 354 bp, Staphylococcus aureus
atgattgcatatcaaaataaaaaagttttattaatgggcgatgctagtaaaaataatgaatctttactactaaaaaaatataacttgccggagattgatattttaaaagtaggacatcatgggagcaagacaagtagttctaaagaatttatagagatgattaagcctaaaataagtttgatttcttctgggaagaacaatatgtatcatcttcctaacatagaagttgttaaacgattgcaagggattcgcagtcgcatttacaatagtcaacaaaacggtcaagttacaattgacttagatgataatttaaaagttgattcaaactcttatggaaatgcaagtggtttatag

SEQ ID NO: 421538 - DNA, 837 bp, Staphylococcus aureus
gtgaaagaattaaaagctaaagatgaagcgtcagcaaaagcgtttgaagctaaaggtaagctagatgacttcaataacacaaaaatggccacgaaaaatttagaagcatccggaaacgctagtcctttcacagatgaagcgcaggataaacttaacatttttaattcgactggaattccaacaaaagtattatcagcaaccggaaatgctacaccttttactggtatagcacaaagtgccattaatttatttaatagtacaggtataccaaccaaacatttaccagctacaggtaatgcgaaagcatttactgatgatgcaaagcatgctgtagatcgttataactggactgatattccagaaaaaagcatccatgtttcatcaaatgcagttgagcaatctaattcagcaataggtgctttgaattccatccctcgttttattagatctacaattaacgttgtgcgtaatttctttaataatgaacatgcgcaaggtggacatatagatgcgtatgctgaaggtggtaatattcaatctcattctgtaccaggtacttatacaggaattgttggagaagcaggacccgaaatatttagtgttaacagagggaatgttacgatcacgccattaaacagtagggaaaaaatgcgaggtattgaaggtgtacttcaagattacacgggcggtaaaaattcaaacgctggcgttgttgttaatattaatttgaatgacatggttgttaaagaagaagcggatgaaaacagattaattaataagatggaacaacatttaaaacgaacccttgcagaacagcaaatgataggaggtgcataa

SEQ ID NO: 421539 - DNA, 618 bp, Staphylococcus aureus; identical to SEQ ID NO: 407393

SEQ ID NO: 421540 - DNA, 348 bp, Staphylococcus aureus; identical to SEQ ID NO: 407392

SEQ ID NO: 421541 - DNA, 135 bp, Staphylococcus aureus; identical to SEQ ID NO: 421203

SEQ ID NO: 421542 - DNA, 996 bp, Staphylococcus aureus
atgcaagacaatcttacaaaatatatagacggaaatcaagataacgaaacactcaaagatgttacaaaaagtgggaaacaacgtccgtggagagaaaagaaaatagataatgtaagttatgcagatatactagaaattttaaaaattaaaaaggcttataacgtaaaacagtgtggtaacgtcttagagttcaagccgactgatgaaggttatttgaaattacataagacatggttttgcaaatcaaaattatgtccagtttgtaattggaggcgtgctatgaaaaatagttatcaagctgaaaaagttattaaagaagttatcaaagaaaagcctaaagcacgttggttattcttaacactttcaacacgaaatgcgatagatggagatactttagaacaaagtttgaaacacttaacgaaagcatttgataggttaagtagatataaaaaagttaaacaaaatcttgttggatttttgcgttcgacagaagttaccgttaataaaaatgacggtagttataatcaacatatgcatgttttattatgtgttgaaaatagttattttaaaaataaatctaattatataactcaagaagaatgggtctatttatggcaaaaagcattacaagttgattatctacctgttgctaatattaaagcgatcaaaccaaataaaaaaggcgataaagacattgaatcggcaatcaaagagacctcaaaatattcggttaaatcatctgattttttaactgatgatgatgaaaaaaatcaagaaattgtaagtgatttagaaaaaggtttgtatcgaaagcgtatgttaagttatggtggattgctgaaacaaaagcataaaattttaaacttagacgatgctgaagatggaaatttgattaatacaagtgatgaagataaaacaacagatgaagaagcaaaagcacattcaattacggcaatttggaattttgaaaagcaaaattattatttaaggcattag

SEQ ID NO: 421543 - DNA, 1380 bp, Staphylococcus aureus; identical to SEQ ID NO: 412597

SEQ ID NO: 421544 - DNA, 714 bp, Staphylococcus aureus
atgccgagacaacatgagcaagtgagtcgatataaacagttaacagattatcacaaagaagaatacgagcgtcagagccaaaaattggaccatataaagcaagaaagcaaggaagtaatggaaaagtaccaaaacgctttaaacgttcttaaaacccctttaaatatcccgtataagatcgaaacggaaaaagtaggtggattattcagcaaagaaacacaagaaacaggcaacgtcgttatagataaaaacgagtttgaatcattgcaggagcaagttacagcgtcacagctgattattaaagattatgaatatatcaaagaaggattagcattaaaagaggcgaaacaaagatgtaaacagttagatagtgagctgagagaagagcatctgaaaaatgaggaattagtcgatgactataataatttagctgatagctataatgatttgttagagcagaataaagaaaaagataaagcattgaatcaatcatataatttattcaacaatgtatttagattgattaaaggtgtgatgaaagaagaagcatatcataggttgatcgattatattgataatcacttagagagttcaaaaatgcgagaaacaatgattgtagatgacaacgatgaacagttctttaagaaaaagtatcagagacaagaaccagaaattatttttgaagatgaacgagatgatggctactctttataa

SEQ ID NO: 421545 - DNA, 297 bp, Staphylococcus aureus
ttgattacatcagacaatagcttttttgaacaattaacaccagaagaaacaaagatgttttttgagcacgccaagtcatttttagaacaagaatacggaaaagataatttactttatgcaacggtgcatatggacgaattaacgcctcatatgcattatggtgttgtaccgataacaaaagatggacgattgagtgcgaaagaagtggtaggtaataaaaaagcgctgacggaatttcaagatagatttaatgaatatatcaatagctgtggttatgaattgagtagaggtatatga

SEQ ID NO: 421546 - DNA, 1380 bp, Staphylococcus aureus; identical to SEQ ID NO: 412597

SEQ ID NO: 421547 - DNA, 672 bp, Staphylococcus aureus
atgaaatacaaaagaaatcaagaagaaattgagacctattacgaatacacattaaagattgaagcaattaataatgaaatgcgtaagttccgacatgattatgtcaatatcttaactacactttcagaatacattcgagaagatgacatgcctggtctacgtgactatttcaataaaaatatagtgccaatgaaagataacttacaaatgaacgctattaagttaaatggtattgagaatcttaaagtacgtgaaattaaaggcttaatcactgctaaaattttacgtgcacaagaaatgagtataccgattagtattgaaataccagatgaagtaactcacattaatttgaatatgattgatttaagtcgcagtattggtattattcttgataacgcaatagaggcatcaactgaaattgatgatcctatcattcgagttgcatttattgaaagcgaaaattcagtaacgtttattgttatgaataaatgtgcagatgatataccacgtattcatgaattgttccaagaaagtttttctactaaaggtgaaggtcgtggtttaggtctatcaactttaaaagaaattgctgataatgcagacaatgtcttattagatacaattatcgagaatggtttctttattcaaaaggttgaaattattaacaactaa

SEQ ID NO: 421548 - DNA, 870 bp, Staphylococcus aureus
atgcattatggtgttgtaccgataacaaaagatggacgattgagtgcgaaagaagtggtaggtaataaaaaagcgctgacggaatttcaagatagatttaatgaatatatcaatagctgtggttatgaattgagtagaggtatatcaagaaaattaatgccgagacaacatgagcaagtgagtcgatataaacagttaacagattatcacaaagaagaatacgagcgtcagagccaaaaattggaccatataaagcaagaaagcaaggaagtaatggaaaagtaccaaaacgctttaaacgttcttaaaacccctttaaatatcccgtataagatcgaaacggaaaaagtaggtggattattcagcaaagaaacacaagaaacaggcaacgtcgttatagataaaaacgagtttgaatcattgcaggagcaagttacagcgtcacagctgattattaaagattatgaatatatcaaagaaggattagcattaaaagaggcgaaacaaagatgtaaacagttagatagtgagctgagagaagagcatctgaaaaatgaggaattagtcgatgactataataatttagctgatagctataatgatttgttagagcagaataaagaaaaagataaagcattgaatcaatcatataatttattcaacaatgtatttagattgattaaaggtgtgatgaaagaagaagcatatcataggttgatcgattatattgataatcacttagagagttcaaaaatgcgagaaacaatgattgtagatgacaacgatgaacagttctttaagaaaaagtatcagagacaagaaccagaaattatttttgaagatgaacgagatgatggctactctttataa

SEQ ID NO: 421549 - DNA, 948 bp, Staphylococcus aureus
ttgaaacgttcgtctaaaagtaaaatgagcctaccgaaaaaaatatttttatgggtattcggtattttagtaatcttagcgattgtagctgttgtgtatgtagctgctaaaatttttattactggtaataagatacacaatccgttaaatcgcaatcattcagaattaagagataaaaaagtgagtttaaacgatggtgatccattcacaatcgctttatttggtgtcgattcagatgctgatcgtaagaaaaagggtggcggagagcgtagtgatagtattatgattttatctatcaaccctaaaacgaagaaaactgaaatagtaagtataccgcgtgatacaagagcggaaattgttggccgtggtactactgaaaaaattgcacatgcctatgcatatggtggaccaaatatggctgttaaatcacttgaaaaattgatgaatgtgccaattgatcattatgcgacaatcgatatggatggtttgcataatatgatagatagcatcggcggtgttgatgtagtaagtaatgatacattcactgttgatggtgttcgttttacaaaaggacagcaaacacatgtaaatggtgatcaagcattgaagtttattagaagtcgtaaagaagaaggtgctggtggtgactttggtcgacaacaacgtcagcaaattgtacttgaagcgatggctaataagattgcaagcccatcatcgattacacattttaatagtctaatgaatgaaattcaaaataatgttaaaacagatttaactttaggtgatttgaatacgattagaagcaattataaagatgctaatgacacgattaataaacatcaattgagtggtcaaggcggcattcaaagtgacggattgtactacttcattcctagtgagcagtcaaaagctgaaagtactaagttattaaaagataatctagagtag

SEQ ID NO: 421550 - DNA, 1026 bp, Staphylococcus aureus
atggagcttcacgaaggacaaaatagtgaaacattgggtaatgatgaagcacgtgaaggcgattctacagacgatatgactgatatgatgaccaaaaagggcaaaggatcaaacgatacgctaaatcgtgaagaaggcgatgctgttggtcaaagccaggcatttcaacttgatggtgtgaacaaaaatgtagaaataaaatggcaaattcctgaaattgagccacaatatgttttagaatatcaagaatcgaaacaagacgtacaatatgaaatcaaagacttaattcaaattataaagaaaacgattgaacgagaacaacgagatgcacgttttaatttaacaaaagggcgattacaaaaggatttaattaattggtttatcgacgatcaatataaattgttttacaaaaaacaagatttaagtaaatcatttgatgcgacgtttacattgttaattgatgcgtcagcaagtatgcatgataaaatggctgaaacgaagaaaggtgtagtgttattccacgagacgttaaaagcattgaacattaaacatgaaattttatcattcagtgaggatgcctttgattcagacgatcatgcgcaaccaaatatcattaatgaaattattaactatgattactcaacctttgaaaaagatggcccacgtattatggcacttgaacctcaagatgataatcgtgatggtgttgctattagagttgcaagtgaacgattaatgcgtcgaaatcaacatcaacgatttttaatcgtattttctgacggcgaaccgtctgcatttaattatagtcaagatggtattattgatacgtatgaagctgtagaaatgtcacgtaaatttggcattgaagtatttaatgtatttttgagtcaagatccaataactgaagatgttgaacaaacaattcataatatttatggtcaatatgccattttcgttgaaggtgttgcgcatttacctggacatctctctccattattaaaaaaattactacttaaatctttataa

SEQ ID NO: 421551 - DNA, 996 bp, Staphylococcus aureus; identical to SEQ ID NO: 421426

SEQ ID NO: 421552 - DNA, 618 bp, Staphylococcus aureus; identical to SEQ ID NO: 407393

SEQ ID NO: 421553 - DNA, 348 bp, Staphylococcus aureus; identical to SEQ ID NO: 407392

SEQ ID NO: 421554 - DNA, 1014 bp, Staphylococcus aureus
atggcgattaaatattcagcattaaaccttgtccctattcgagaaggtgaagatgaacgaacagcaattaatgatatggttaagctcgcacaacatttagacgaattatcatatgaaagatattggattgctgaacaccataacgctcccaacctagtaagttcagcaactgctttattaattcaacatacgttagaacatacgaaacacatacgtgtaggttctggaggaatcatgttacctaaccatgctccattaatcgttgcggaacaattcggcacgatggcaacattatttccaaatcgtgtcgatttaggattaggacgtgcacctggaacagatatgatgaccgcaagtgcattaagacgagatcaacatgatggtgtttataaatttccagaagaagtttcattattacaacaatatttcggccccgctcaccaacaagcatatgttcgtgcttatccagcagtaggtaaaaatgtgcctttatacattcttggttcttcaacagattctgcacatttagctgctcgcaaagggcttccatatgtgttcgctggacattttgcacctcaacaaatgaaagaagctatcgaaatttacaaaacattatttgaaccttctgatgtgttagacgaaccttatgttattgtatgtttaaatacaatcgttgctgaaaatgatgacgaagcacaatatttagcttcatctatggcacaagtaatggttagtattactcgtggcagaatgcagcccgttcaaccgccaacacatgaactacaaaatatattaacgccgagagaatatgcgatggctatggaaagacagaaaatatcattaataggttcagaaattactgttcaacaaaaaattcaagattttatggaaacttatggtgaagtcaacgaaattatggcaataagttatatttatgataaagatatgcaattagactcttatcgtcggttcaagaatgttataaatcagataaatgaaaaaaacactttataa

SEQ ID NO: 421555 - DNA, 741 bp, Staphylococcus aureus
ttgagtagaggtatatcaagaaaattaatgcctagacaacatgagcaagtgagtcgatataaacagttaacagattatcacaaagaagaatacgagcgtcagagccaaaaattggaccatataaagcaagaaagcaaggaagtaatggaaaagtaccaaaacgctttaaacgttcttaaaacccctttaaatatcccgtataagatcgaaacggaaaaagtaggtggattattcagcaaagaaacacaagaaacaggcaacgtcgttatagataaaaacgagtttgaatcattgcaggagcaagttacagcgtcacagctgattattaaagattatgaatatatcaaagaaggattagcattaaaagaggcgaaacaaagatgtaaacagttagatagtgagctgagagaagagcatctgaaaaatgaggaattagtcgatgactataataatttagctgatagctataatgatttgttagagcagaataaagaaaaagataaagcattgaatcaatcatataatttattcaacaatgtatttagattgattaaaggtgtgatgaaagaagaagcatatcataggttgatcgattatattgataatcacttagagagttcaaaaatgcgagaaacaatgattgtagatgacaacgatgaacagttctttaagaaaaagtatcagagacaagaaccagaaattatttttgaagatgaacgagatgatggctactctttataa

SEQ ID NO: 421556 - DNA, 693 bp, Staphylococcus aureus
gtgagtcgatataaacagttaacagattatcacaaagaagaataccagcgtcagagccaaaaattggaccatataaagcaagaaagcaaggaagtaatggaaaagtaccaaaacgctttaaacgttcttaaaacccctttaaatatcccgtataagatcgaaacggaaaaagtaggtggattattcagcaaagaaacacaagaaacaggcaacgtcgttatagataaaaacgagtttgaatcattgcaggagcaagttacagcgtcacagctgattattaaagattatgaatatatcaaagaaggattagcattaaaagaggcgaaacaaagatgtaaacagttagatagtgagctgagagaagagcatctgaaaaatgaggaattagtcgatgactataataatttagctgatagctataatgatttgttagagcagaataaagaaaaagataaagcattgaatcaatcatataatttattcaacaatgtatttagattgattaaaggtgtgatgaaagaagaagcatatcataggttgatcgattatattgataatcacttagagagttcaaaaatgcgagaaacaatgattgtagatgacaacgatgaacagttctttaagaaaaagtatcagagacaagaaccagaaattatttttgaagatgaacgagatgatggctactctttataa

SEQ ID NO: 421557 - DNA, 312 bp, Staphylococcus aureus
atgaattataaaaaaacagattatccttattttgatttaaaatggttactttctcaaaataatttcgaagtattttatggaagagattttataactaattttgcaacaattgaagatagtaaattaaacactaaatcaatgtacttttacaacattttagataaagaagatttaaaaaccatccaaagactaatagaagtttatctagaaagcaaatatcctaaaataaaggataaagatgacttttttgttttggctactgataaacaaaatagaataaaaaacaccatagattggtataatatcaattaa

SEQ ID NO: 421558 - DNA, 597 bp, Staphylococcus aureus
atggaaaagtaccaaaacgctttaaacgtgcttaaaacccctttaaatatcccgtataagatcgaaacggaaaaagtaggtggattattcagcaaagaaacacaagaaacaggcaacgtcgttatagataaaaacgagtttgaatcattgcaggagcaagttacagcgtcacagctgattattaaagattatgaatatatcaaagaaggattagcattaaaagaggcgaaacaaagatgtaaacagttagatagtgagctgagagaagagcatctgaaaaatgaggaattagtcgatgactataataatttagctgatagctataatgatttgttagagcagaataaagaaaaagataaagcattgaatcaatcatataatttattcaacaatgtatttagattgattaaaggtgtgatgaaagaagaagcatatcataggttgatcgattatattgataatcacttagagagttcaaaaatgcgagaaacaatgattgtagatgacaacgatgaacagttctttaagaaaaagtatcagagacaagaaccagaaattatttttgaagatgaacgagatgatggctactctttataa

SEQ ID NO: 421559 - DNA, 597 bp, Staphylococcus aureus
atggaaaagtaccaaaacgctttaaacgttcttaaaacccctttaaatatcccgtataagatcgaaacggaaaaagtaggtggattattccgcaaagaaacacaagaaacaggcaacgtcgttatagataaaaacgagtttgaaccattgcaggagcaagttacagcgtcacagctgattattaaagattatgaatatatcaaagaaggattagcattaaaagaggcgaaacaaagatgtaaacagttagatagtgagctgagagaagagcatctgaaaaatgaggaattagtcgatgactataataatttagctgatagctataatgatttgttagagcagaataaagaaaaagataaagcattgaatcaatcatataatttattcaacaatgtatttagattgattaaaggtgtgatgaaagaagaagcatatcataggttgatcgattatattgataatcacttagagagttcaaaaatgcgagaaacaatgattgtagatgacaacgatgaacagttctttaagaaaaagtatcagagacaagaaccagaaattatttttgaagatgaacgagatgatggctactctttataa

SEQ ID NO: 421560 - DNA, 597 bp, Staphylococcus aureus
atggaaaagtaccaaaacgctttaaacgttcttaaaacccctttaaatatcccgtataagatcgaaacggaaaaagtagggggattattcagcaaagaaacacaagaaacaggcaacgtcgttatagataaaaacgagtttgaatcattgcaggagcaagttacagcgtcacagctgattattaaagattatgaatatatcaaagaaggattagcattaaaagaggcgaaacaaagatgtaaacagttagatagtgagctgagagaagagcatctgaaaaatgaggaattagtcgatgactataataatttagctgatagctataatgatttgttagagcagaataaagaaaaagataaagcattgaatcaatcatataatttattcaacaatgtatttagattgattaaaggtgtgatgaaagaagaagcatatcataggttgatcgattatattgataatcacttagagagttcaaaaatgcgagaaacaatgattgtagatgacaacgatgaacagttctttaagaaaaagtatcagagacaagaaccagaaattatttttgaagatgaacgagatgatggctactctttataa

SEQ ID NO: 421561 - DNA, 597 bp, Staphylococcus aureus
atggaaaagtaccaaaacgctttaaacgttcttaaaacccctttaaatatcccgtataagatcgaaacggaaaaagtaggtggattattcagcaaagaaacacaagaaacaggcagcgtcgttatagataaaaacgagtttgaatcattgcaggagcaagttacagcgtcacagctgattattaaagattatgaatatatcaaagaaggattagcattaaaagaggcgaaacaaagatgtaaacagttagatagtgagctgagagaagagcatctgaaaaatgaggaattagtcgatgactataataatttagctgatagctataatgatttgttagagcagaataaagaaaaagataaagcattgaatcaatcatataatttattcaacaatgtatttagattgattaaaggtgtgatgaaagaagaagcatatcataggttgatcgattatattgataatcacttagagagttcaaaaatgcgagaaacaatgattgtagatgacaacgatgaacagttctttaagaaaaagtatcagagacaagaaccagaaattatttttgaagatgaacgagatgatggctactctttataa

SEQ ID NO: 421562 - DNA, 450 bp, Staphylococcus aureus
ttgcaggagcaagttacagcgtcacagctgattattaaagattatgaatatatcaaagaaggattagcattaaaagaggcgaaacaaagatgtaaacagttagatagtgagctgagagaagagcatctgaaaaatgaggaattagtcgatgactataataatttagctgatagctataatgatttgttagagcagaataaagaaaaagataaagcattgaatcaatcatataatttattcaacaatgtatttagattgattaaaggtgtgatgaaagaagaagcatatcataggttgatcgattatattgataatcacttagagagttcaaaaatgcgagaaacaatgattgtagatgacaacgatgaacagttctttaagaaaaagtatcagagacaagaaccagaaattatttttgaagatgaacgagatgatggctactctttataa

SEQ ID NO: 421563 - DNA, 450 bp, Staphylococcus aureus
ttgcaggagcaagttacagcgtcacagctgattattaaagattatgaatatatcaaagaaggattagcattaaaagaggcgaaacaaagatgtaaacggttagatagtgagctgagagaagagcatctgaaaaatgaggaattagtcgatgactataataatttagctgatagctataatgatttgttagagcagaataaagaaaaagataaagcattgaatcaatcatataatttattcaacaatgtatttagattgattaaaggtgtgatgaaagaagaagcatatcataggttgatcgattatattgataatcacttagagagttcaaaaatgcgagaaacaatgattgtagatgacaacgatgaacagttctttaagaaaaagtatcagagacaagaaccagaaattatttttgaagatgaacgagatgatggctactctttataa

SEQ ID NO: 421564 - DNA, 792 bp, Staphylococcus aureus
ttgcctttagaagttgctttattgtatagatctttaattgctttttcgctattcggtgtaatgttcatatttatttttaaaaaactgaaattaaataatacaaattggtttacgataattggttttggactatgtaactttactataagttatttgcttctttattacggtactttctatagttcagctgctatagttacattgattttttcaatgaaagccatattaacacctatatttattagtatggtattcaagaggaaaatttctaacagaatatatatagggggaggactaggagttgtaagtgtagttgtaatcttatatcctgatttaaacagcttaacaaatgaatttataattggtgtagcatttgctcttttaggtacaattataacgtcaattggtgatgttttatctttatataacagtgaaagtaaagttcatcctgttttgtcaaatacaattggtatgttatcagcagtgatatttttacttatttatactagtttcaaaggatataggtattcatttccattagaattaaatttttggtttggtttattatatttatctattctagcttcatttttagcctggtttttctatctgaaattaattaataatattggagcagctgaaagtggttacatggttgctatgtttcctgcaattggtggtatagcaagtgttattatgggagaaactcatttaagtataaatttagtagtcgggattatattagcatgtatgggtgcatatttagcattatataaaccaaaacctagttaa

SEQ ID NO: 421565 - DNA, 591 bp, Staphylococcus aureus
ttgaaacccttaacgaaagcatttgataggttaagtagatataaaaaagttaaacaaaatcttgttggatttttgcgttcgacagaagttaccgttaataaaaatgacggtagttataatcaacatatgcatgttttattatgtgttgaaaatagttattttaaaaataaatctaattatataactcaagaagaatgggtctatttatggcaaaaagcattacaagttgattatctacctgttgctaatattaaagcgatcaaaccaaataaaaaaggcgataaagacattgaatcggcaatcaaagagacctcaaaatattcggttaaatcatctgattttttaactgatgatgatgaaaaaaatcaagaaattgtaagtgatttagaaaaaggtttgtatcgaaagcgtatgttaagttatggtggattgctgaaacaaaagcataaaattttaaacttagacgatgctgaagatggaaatttgattaatacaagtgatgaagataaaacaacagatgaagaagcaaaagcacattcaattacggcaatttggaattttgaaaagcaaaattattatttaaggcattag

SEQ ID NO: 421566 - DNA, 267 bp, Staphylococcus aureus
ttgttagagcagaataaagaaaaagataaagcattgaatcaatcatataatttattcaacaatgtatttagattgattaaaggtgtgatgaaagaagaagcatatcataggttgatcgattatattgataatcacttagagagttcaaaaatgcgagaaacaatgattgtagatgacaacgatgaacagttctttaagaaaaagtatcagagacaagaaccagaaattatttttgaagatgaacgagatgatggctactctttataa

SEQ ID NO: 421567 - DNA, 414 bp, Staphylococcus aureus
gtgtataagagacaggaatgggtctatttatggcaaaaagcattacaagttgattatctacctgttgctaatattaaagcgatcaaaccaaataaaaaaggcgataaagacattgaatcggcaatcaaagagacctcaaaatattcggttaaatcatctgattttttaactgatgatgatgaaaaaaatcaagaaattgtaagtgatttagaaaaaggtttgtatcgaaagcgtatgttaagttatggtggattgctgaaacaaaagcataaaattttaaacttagacgatgctgaagatggaaatttgattaatacaagtgatgaagataaaacaacagatgaagaagcaaaagcacattcaattacggcaatttggaattttgaaaagcaaaattattatttaaggcattag

SEQ ID NO: 421568 - DNA, 222 bp, Staphylococcus aureus; identical to SEQ ID NO: 421204

SEQ ID NO: 421569 - DNA, 180 bp, Staphylococcus aureus
atgttaagttatggtggattgctgaaacaaaagcataaaattttaaacttagacgatgctgaagatggaaatttgattaatacaagtgatgaagataaaacaacagatgaagaagcaaaagcacattcaattacggcaatttggaattttgaaaagcaaaattattatttaaggcattag

SEQ ID NO: 421570 - DNA, 474 bp, Staphylococcus aureus
atgatttcacacttgataacggatacttcgaagaagatacatcagacagtgattcagattcagacagtgattcagactcagacagcgactcagattcagacagtgattcagactcagacagcgactcagattcagacagtgattcagactcagatagcgactcagactcagacagcgactcagactcagacagtgattcagactcagacagcgactcagattcagacagcgactcagactcagatagcgactcagattcagacagtgactcagactcagatagcgactcagactcagacagtgactcagactcagacagcgattcagattcagatagcgactcagattcggacagtgattcagactcagatagcgactcagattcagacagcgactcagactcagatagcgactcagactcagacagtgattcagactcggatgcaggaaaacatacacctgttaaaccaatga

SEQ ID NO: 421571 - DNA, 348 bp, Staphylococcus aureus; identical to SEQ ID NO: 407392

SEQ ID NO: 421572 - DNA, 348 bp, Staphylococcus aureus; identical to SEQ ID NO: 407392

SEQ ID NO: 421573 - DNA, 348 bp, Staphylococcus aureus; identical to SEQ ID NO: 407392

SEQ ID NO: 421574 - DNA, 348 bp, Staphylococcus aureus; identical to SEQ ID NO: 407392

SEQ ID NO: 421575 - DNA, 348 bp, Staphylococcus aureus; identical to SEQ ID NO: 407392

SEQ ID NO: 421576 - DNA, 348 bp, Staphylococcus aureus; identical to SEQ ID NO: 407392

SEQ ID NO: 421577 - DNA, 348 bp, Staphylococcus aureus; identical to SEQ ID NO: 407392

SEQ ID NO: 421578 - DNA, 348 bp, Staphylococcus aureus; identical to SEQ ID NO: 407392

SEQ ID NO: 421579 - DNA, 348 bp, Staphylococcus aureus; identical to SEQ ID NO: 407392

SEQ ID NO: 421580 - DNA, 348 bp, Staphylococcus aureus; identical to SEQ ID NO: 407392

SEQ ID NO: 421581 - DNA, 348 bp, Staphylococcus aureus; identical to SEQ ID NO: 407392

SEQ ID NO: 421582 - DNA, 348 bp, Staphylococcus aureus; identical to SEQ ID NO: 407392

SEQ ID NO: 421583 - DNA, 348 bp, Staphylococcus aureus; identical to SEQ ID NO: 407392

SEQ ID NO: 421584 - DNA, 348 bp, Staphylococcus aureus; identical to SEQ ID NO: 407392

SEQ ID NO: 421585 - DNA, 348 bp, Staphylococcus aureus; identical to SEQ ID NO: 407392

SEQ ID NO: 421586 - DNA, 348 bp, Staphylococcus aureus; identical to SEQ ID NO: 407392

SEQ ID NO: 421587 - DNA, 348 bp, Staphylococcus aureus; identical to SEQ ID NO: 407392

SEQ ID NO: 421588 - DNA, 348 bp, Staphylococcus aureus; identical to SEQ ID NO: 407392

SEQ ID NO: 421589 - DNA, 348 bp, Staphylococcus aureus; identical to SEQ ID NO: 407392

SEQ ID NO: 421590 - DNA, 348 bp, Staphylococcus aureus; identical to SEQ ID NO: 407392

SEQ ID NO: 421591 - DNA, 348 bp, Staphylococcus aureus; identical to SEQ ID NO: 407392

SEQ ID NO: 421592 - DNA, 1380 bp, Staphylococcus aureus
atgaatatcattgagcaaaaattttatgacagtaaagcttttttcaatacacaacaaactaaagatattagttttagaaaagagcaattaaagaagttaagcaaagctattaaatcatacgagagcgatattttagaagcactatatacagatttaggaaaaaataaagtcgaagcttatgctactgaaattggcataactttgaaaagtatcaaaaatgcccgtaaggaacttaaaaactggactaaaacaaaaaatgtagacacacctttatatttatttccaacaaaaagctatatcaaaaaagaaccttatggaacagttttgatcattgcaccatttaactatccttttcaactagtgttcgaacctttaatcggtgctattgcagcaggtaatacggcaattattaaaccatctgagttgacaccaaatgttgcacgagtgattaaacgattaatcaatgaaacatttgatgcaaattacattgaagttattgagggaggaattgaagaaacgcaaacgttaattcacttaccttttgactatgtcttctttacaggaagtgaaaatgtaggcaaaatcgtttatcaagctgccagcgaaaatttagttcctgtgacattagaaatgggtggtaaatctccagtcatcgttgatgaaacagcgaatattaaagttgctagtgagcgcatttgttttgggaaattcactaatgccggccaaacatgtgttgcaccagattacattttagtacacgaatctgtaaaagatgatttaatcacagccctatcaaaaacgttgcgtgaattttatggtcaaaatatacaacaaagtccagattatggccgcattgtaaaccttaaacattatcatcgtctgacttcattacttaacagtgcacaaatgaatattgtatttggtggtcatagtgatgaggatgaacgttatatagaaccaacattgttagatcacgttacaagtgattcagcaattatgcaagatgaaatttttggtcctatcttaccgattttaacgtatcagtcattggatgaagcaatagcctttattcaccaaagaccaaaacctttgagtttatatttatttagcgaagatgaaaatgctacacaacgtgtaataaacgagctatcatttggcggcggcgctattaatgatacattgatgcacctagcgaatcctaaattaccatttggtggtgttggcgcctcaggtatgggacgctatcatggtaaatattcattcgacacttttacacatgaaaaaagctacattttcaaatctacacgattagaatcaggtgtccatttaccaccatataaaggtaaatttaaatacatcaaagctttctttaaaaattaa

SEQ ID NO: 421593 - DNA, 348 bp, Staphylococcus aureus; identical to SEQ ID NO: 407392

SEQ ID NO: 421594 - DNA, 348 bp, Staphylococcus aureus; identical to SEQ ID NO: 407392

SEQ ID NO: 421595 - DNA, 348 bp, Staphylococcus aureus; identical to SEQ ID NO: 407392

SEQ ID NO: 421596 - DNA, 348 bp, Staphylococcus aureus; identical to SEQ ID NO: 407392

SEQ ID NO: 421597 - DNA, 348 bp, Staphylococcus aureus; identical to SEQ ID NO: 407392

SEQ ID NO: 421598 - DNA, 348 bp, Staphylococcus aureus; identical to SEQ ID NO: 407392

SEQ ID NO: 421599 - DNA, 348 bp, Staphylococcus aureus; identical to SEQ ID NO: 407392

SEQ ID NO: 421600 - DNA, 348 bp, Staphylococcus aureus; identical to SEQ ID NO: 407392

SEQ ID NO: 421601 - DNA, 966 bp, Staphylococcus aureus
ttgataattagcgaaaggaacggggaagggaaatctagccttataaaatcaatacagtattgtttaggatcaaatttaaaagcgtttccaaaaggatgggactacaaaaattatgtttttcaattagaaatagttattgataaaaataagatattgattcagagatataataatataataacagttttagatgatgggaaaattaaaaagtttggatacttaaaagactattctgattggtttcaagataagatggagatgaatttaaaattagttagtaagaataaaaatacttctagtttagcttcactggaagctattttgagcccattgtatattgatcaagataaatcatgggatggaattctatataagaactcatttgagggtttagcacaatataaaagtcaaagttttcctaaagaagtatttgaatactatttaggtatttctaataatataatgaatgataaaataaataaactcaataaatatagagagaaatcgaaagaaaaaaaagtgaaaattgaacaagtagattctgtatataaaaattatagttctcaaaaaaacatttcgaaaacgataccaaaagaatttgaagagtttaaaaaacaagtagatttctatattaaagaaacagatcgattttctcaaatgatcactcaaaaaacagacaagttatctaaagaaaaaatgaagcttgatattttacaacaagacagggaagaattgagaaaattattaacaaaaacaaaaaaaagattatcagaagtaagttatgaatgtacttattgtcattcagtactaacaagaggccaatccttaacaaggatggaattagatgataataagatagaaatattattacgaaaagatagtataaatcaagaaataataaaaatagaaaacaatattcaaaagaaattaatagaaattcaaaatctgtctcttatacacatctga

SEQ ID NO: 421602 - DNA, 348 bp, Staphylococcus aureus; identical to SEQ ID NO: 407392

SEQ ID NO: 421603 - DNA, 348 bp, Staphylococcus aureus; identical to SEQ ID NO: 407392

SEQ ID NO: 421604 - DNA, 348 bp, Staphylococcus aureus; identical to SEQ ID NO: 407392

SEQ ID NO: 421605 - DNA, 744 bp, Staphylococcus aureus
atggacggtaaacgtgttgttgtacgtactttagatataggtggagataaagaattatcatacttaaacttgcctgaagaaatgaatccattcttaggttaccgtgcgattcgtttatgccttgcgcaacaagatattttcagaccacagctacgtgcattattacgtgcatcagtttatggtaagttaaatatcatgttcccaatggttgcaacaattaacgaatttagagaagctaaagctatattattagaagaaaaagaaaaccttaaaaatgaaggtcatgacatttcggatgatatagaattaggaatcatggtagagatacctgcaacagcagcattagctgatgtctttgctaaagaagtagatttcttcagtatcggtacaaatgatttaattcaatacacattagctgctgaccgtatgtcagagcgtgtatcatatctataccaaccatataacccttcaatcttacgtttagttaaacaagttattgaagcgtcacataaagaaggtaaatggacaggtatgtgtggtgaaatggctggagatgaaacagctattccattattgcttggtttaggtttagatgagttctctatgagtgcaacgtctattctgaaagcaagaagacaaattaatggtttaagtaaaaatgaaatgactgaacttgctaaccgtgcagtcgactgtgcaacgcaagaagaagttattgaattagttaacaactacgtaaaataa

SEQ ID NO: 421606 - DNA, 537 bp, Staphylococcus aureus; identical to SEQ ID NO: 406140

SEQ ID NO: 421607 - DNA, 801 bp, Staphylococcus aureus
atgtgtataagagacagctattatgtttctacaacttggatagttttacaatggacgcaaaaccctttactagttggtttaactaatactttattaatgattcctatgtgtatttcatttttatttggtcctttagtagatgccttaccattaaagaagactctatttttaacccctttattacaatgtctattactatcactaattgcttctttaaacctaattggatacttaaatgtatacggcttgatcattttagtggcaattgcaatgttttgcactcaaataggatacccagctcagtctaaagctatacctttattagtaaaaaaagatcaattattagatgcaaattctgctatgagtgtcgcatatcaaggaacagatgttattatgaattcaataagtggtattattgttgcagcaatagctttttttccactatattctattaattcactaatatttctaatagcttgtttatttatgctgaatgtaaatattcctaatataactaaccctgcaagaaataatccttcttatttacaaaatttaaaagaaggtgtgctaggaattaaaatttcactcctactagttgttgcattggtaagtggtgttataaattttggactaggacttctttatacatggatacctttaaaggctgaccatttaggtggagcctattattacggtttattaatggcactattttcaataggtttaattgtaggttcattaatcacaccttatatctgtctcttatacactctgacgctgccgacgactccttacgtgtag

SEQ ID NO: 421608 - DNA, 225 bp, Staphylococcus aureus; identical to SEQ ID NO: 406123

SEQ ID NO: 421609 - DNA, 2223 bp, Staphylococcus aureus
atgattaagttaaaagaatttcaagaaaaaatggttgataaattactaagatttacagcacctgattataaagttaatgaacttttaattaaagcccctacaggatcggggaaaacaatttgtttattatcatggataaatgattatattattagtactcatgatgatgttgtgtttgtatggtttacacctggagcaggagaactagaagaacaaagtaaagataaagctaaaggtttcacgaatataaaatctcaatctgttgatgaagcattaaatcaagggtttgaaaaagaaacagtgacgttcattaattatgaaagagttactggtaaaaagaaaaaagcaatgatgacagatagtgaaaaagataatcttgaagataagataaatgaggcttttcgtaaaggatatcatttcattctagttatagatgaagctcatcgtaatgatactaaaaaagctcgagatataatatctaaatttaaagcttcgaaaattgtacgagtgtcagcaactatagaaaatccaaataatccagataaaatagaattttatgaaatagatgaaaatgatgttattaattcagggttaattacaaaatcagttatagtgaatgaaggtatagatatagatattaatgttgaaaatgaatttgatttgctttttaatgcagcagaaataaaaagaaaagaaatcttaaatgcttaccaagataaaaacattaataatataaatccactggtacttgtccagctacctgataaaactgataatgaagattttttagtacaaaagatagaaaactatattaaaaaaaatcttaaaaaagattatgagaattcaactcttggaatttggttgtcagataagaaaaaaaatcattttaatataagtgatttaaataatcctgtagaatacttaataattaaacaagctgtggcgactggatgggatgcaccaagagctaaaattcttataaaaattcgcgaaaatatgggagaagtattcaccattcaaacgataggtagaatcagaagaatgcctcaaccaaaattaggacactataatatagatgttttagataatgcatatctatatacttttgacaaggattttttaaacggggcttttgctgtaggtcaagcagtagcacctacacctattcttaaattgaaagaaagtgcgaaaacattaagtttaataagtgagcgtgtatataatcaagaaattgaaaaagatgaaaaagtcattttcaaaaatctttttttaggtttaaaacaagcatggcatactacagaggattttaatgaaaatgcggaaataataagaaattatggaatgattataggaacaactattaaaacaacgtttaagcaaggaagattcagtacactagaaaatgctgagagattggaagatgtagaacgtttaatagaagtagattatcgaaagaacaggatagatttattacatgtttttcatgaactaagtagggttacacatctgcctatttctaaagtagaagttattctaaaaaagctttttttagataataaaaaaatggaaaaagaaaaattattaaaattaaattctcaagaatggacagcatttattctaaataactggagatatttaagagaagaatttaagaaaattgatattcagttatcattgacattagatttaagtgaaatacagcaaaatgactttaaatttcctttagaagaaaggtacacatataatccagagcttccatctagaataataattactaatgcatatgatggttacttatcttctacaattgctactagaccgagtttagtagaacgtctatttgaaaggtatgttgaacaaaatgctgatattatagactttatttataaaaatggagataaaggaactcagtatttttctttaacatataaatcaaatggaggattgcatcatttctatcctgattacatagtccaattaaaaaataaagaggtttatataattgaaacaaaagcaggaaaaacaaaagatggcattgataaaaatattgatccatattctcctgttaaatttgaatccttaaaagattattcacttcgtcataatgttaaatgggcatttgttcgagactttaatgaagaattatggtatttaaattctggtatatggagtgatgatatgtatagatggactacaattgataaattatttgaggaaaaataa

SEQ ID NO: 421610 - DNA, 1761 bp, Staphylococcus aureus
atgtctagtgagtttatagaacgtccgtttaaaaatgaaaaagatgaagcgataaaatatattagtaacttattaaataaagcaaaaaataaaaatgaattgtatgatgctcaaaatttagaagaggtattaagactgttaaatagtaaaaaatatggtttagtatgggaagaacataaagaaaaagtagaagagaaattaaaaacacatatacctgtttttaaagaggataaagaaagaaaaattaatggtatgaaaaatataaatgattttaattttctattagaaggagataatttacacagcctgtatttacttgaaaaaacccataccaataaaattgatttaatatacatagatcctccatataatatgggacaaaaagattttaaatataatgatgattatgttgataaagatgataattattatcattccaagtggttatcttttatgaaaagtagattattaatggctaaaaaattattaactgaggacggaatattggctgtatctatagattatcatgaaggatttcaactaaaattgttactggatgaaatttttggagaaaacaattttgcatcagatttacatgttgaaacttcagcaatagcaggaccaagaagaattgcagcaatgaaaggatcgattgtaaaaactacagaatatgttttgatatatacaaaaaactcatcaaaaaaagtaataaaaaaacctatgtatgacaagatagaaggatttgacagccactactcaaaatttttgaatagcgaaagtggtattttagaaaactttacagagacacttagacgcacaaaaaacatctctgatatttttgaaaaatacaatatgaaaataaatttagaaaatcttggtaagttagtttatttggaaaaagaagttagtgattggttatatgataaatcaatatcagcaaacttatttcgtatagataagatatttaaggacaaaagtataaatttagaaaaagggttaaacattgttaatggtaaatatgtagtttttaatacaaatggaaacccttattatgctttccggtattctgaaagaataggagatacaagcggatttatagagtcctttggtgaaagagcagttagagggaatttgtggaaaggattttcttcagatggagggaatttaaaaaaagaaggctctgtagattttaagaaaggaaaaaaacccttaaggcttattaaacaactagtaatgactctgttaggagacaaacaagatacaatcatattagatttctttgctggttctggaactactgcacatgcagtggctgcgcttaataaagaagatggaggaaataggaaatatataatttgtactaataatgaaaataatatttgtgaagaagttacatataaaagattagaaaatatacaatcagatttacctcataatgtaaaatacttcaaaacgtgttttatagaaaaagaattgttcccagatatagagttggaaagtgagttactaaaatatataacaccattggtggaattagagtttacaacagatataaaaaacccattatatcaaatcattttaagtaatgagcaattagaaagtttgttagagagtaataatataaaaagtaattcagtattatttatgtaccctgaagttcttttaggtcgagaagagaaaaaaatgattaaatcgttggatgttagaattgaagaaatacctgattacttctttggaaaggaattgtgggcaaatgattaa

SEQ ID NO: 421611 - DNA, 255 bp, Staphylococcus aureus
atgaaaagtgtgaaaaagttgagtgaagaattaggggttagtaagcaaacgatttttaataatattaagcgattgaatatagagacaataaaacaggaaaacacttcgtttattaaagaagataccgatatagaaaaaatcattcaaagagtaaatgaaaataaaaagaaatatggttttgaaagtactactgaagacaaacaaaaaaagggtcggataatattaattttgaatcgaaaagcgatgctcaaatag

SEQ ID NO: 421612 - DNA, 276 bp, Staphylococcus aureus
atgttgtattttatattaaaagatgaaaatatagtagaaattcaactacttgtcacaatgagttatcaatatattttaggtgtattattaggcgaagttctacaatctagttggacgattgctaaattgactttccagcgtccgagtccacagtgggatggtagtgcacttaaagaactcagtcatgtacctatcttcatttatagtacaatctggattatcttcaatctttatgcagtgaatattttactcaaatatactcacttgataaattaa

SEQ ID NO: 421613 - DNA, 231 bp, Staphylococcus aureus
atgagcagaataacacaagtgcatcgtattttagaacaaaaacatttagatgcgattatcattctttcggattacaatagaagatatttatcaggttttactggtaccagtggagcacttatcatatctaaagataaacaatatttgataacagactttagatatattgatcaagcaactaagcctgtctcttatacacatctgacgctgccgacgatactccttgtgtag

SEQ ID NO: 421614 - DNA, 795 bp, Staphylococcus aureus; identical to SEQ ID NO: 408181

SEQ ID NO: 421615 - DNA, 762 bp, Staphylococcus aureus
atgtgtataagagacagaaataaaagccgtatatcattaataagcatttctaatactgtagataaaattagagacgtcaaagatgttgacgaaattgctttaattcaaaaagcagctaatattgttgatgaaacatatgaatatattttaactgttgtaaaagcaggtatgactgaaaaagaattaaaggcaatattagaaagtaaaatgctagaattaggagcagatggaccatcatttgatacgattgtagcatctggtcatagaggtgcattaccacatggtgttgcaagtgataaaattattgaaaaaggcgacatgattacattagattttggcgcgtattataacggctattgttcagatattactagaacatttgctattggagaaccagatcctaaactgaaagaaatatatcaaatagtacttgaatctcaaatgaaagcaattaatgagattagacctggcatgactggtgcagaagctgatgccatttcaagaaactatttagagtcaaaagggtatggaaaagaatttggacattcactaggacatggtattggtttagaaatccatgaagggccaatgctggctcgtacgatacaagataaacttcaagttaacaactgtgttacagtagaacctggtgtttatatagaaggtttgggcggtataagaatagaagatgatattttaattacagaaaatggttgtcaagtctttactaaatgcacaaaagaccttatagttttaacataa

SEQ ID NO: 421616 - DNA, 1203 bp, Staphylococcus aureus; identical to SEQ ID NO: 417124

SEQ ID NO: 421617 - DNA, 129 bp, Staphylococcus aureus; identical to SEQ ID NO: 419638

SEQ ID NO: 421618 - DNA, 180 bp, Staphylococcus aureus
atgagtaaaaatttagataagggattggttatatcaacagttttaaacgttattctttgcatgcttttaatattaactatgcgagtagaaagtttaactgtatcagttatattagcaataatcactggagtaaatgcagtatatttagttgctaaggttttaaaacagaaaaagacctga

SEQ ID NO: 421619 - DNA, 522 bp, Staphylococcus aureus; identical to SEQ ID NO: 408201

SEQ ID NO: 421620 - DNA, 282 bp, Staphylococcus aureus
atgaatgacaaagagaaaatttataatcaacttcatcatgatgcaccaattcaaaatataccagcacccgaaaatttatttgtcgaatatatagaagctgatgaagtatggtattcaccagttgtatgtatggctttaagtaaagcgcataatattaatttttatgatagtgatgatgtggggtgcattgataaagcagccacatgtagcattaaaaaatttaatcctgagacaggtgagtttgaacaattcagcaaaatggctcaaaaggagataacgtaa

SEQ ID NO: 421621 - DNA, 1749 bp, Staphylococcus aureus
atgataagctctaaaagtattgaaaatcatgcagttacaaaaattgagactatggctaataatacaatgaaaattaatccttatataaattcaaatgataataaaatatcttttgatggggaattggaaatttacgattctgaagatataaataaaacctcttatcttggtgctatacaaatacaggttaaaggaaagcaagtggctaaaagaggagaaaaagttatccatcgaaataatgtaaaaattaatgatttaaaagcttatgaaaaagaagggggcgtttattattttgtagtctatttaattgtggaaaatggaaaggttatagataatcaactttatggtagacaattacatcaaatatacttgaattctttactagaaaaagatcaaaatagtacaactatagaaatgtatgaaatagaagatgaaaatattttatataaaaactgtttaaattatttaaaaaccaaaaggcagcaaagttatataaatcaattaaaaattaaagatatagaaaaagagccaatttacataaacacaccagaaaatatcatttttgatggacgaggatttcccttaaatgatttttatagttacagacatataaattcttctaaggtcgagttaactatacctgatggaattttaaagatggaaaaattaaaaacaacaaaaaaaagaaaaattaaaaaaaataataaagtaatatttgaagggttaatagattttgaaattacaaaagaaatgacagctttaataattgataatatttttgaattacaaatgtgtgaaacaacaaaaaaaagtaaatataaaatgttaccttttaagaatttagatattaagtcagacactttttatataatcaatgaaatttctaaaggtggtacattttggatagatacagtcaaattaaatgtaaaaccttttaaaatagacatttataggattaaaaaagacttagacaaattaaatgttaagctagtagagtatagcaatttaattcctaaaaacattaatttaaaaccagacagctttataaagcagatgagagaaatagttggattatacgaattgttagaaaataaagatttcgaaggttttaaaatgaatagtaataatttttataaactaaatttttgcggtaaaaaattattattatataagtataattcggaattatataatgtatactctatggaatttatgaatcgttttgagatatttacgaaagatatggtagaaaaagtgccgattatttatatattcactaaaagtaagattaaagatatattgaattttgatattaatctcgttaaaaaatttattgagacagataaccttaatgaaccttctgattttaaatgggaaaaagttaataatttctcattagagttaatagatgtttacgattatacaaaggcaatagaatatttagatttagctgagtatatattgcataaattagataacaaagataatgacaaacgttttattaatttaattaataaagctcaaataatgaaaagaaaaaatatagaagttaaagaaataatatctgaattgatagaattacatagtaaattaataagtgttgataaagaattagcttatctaaatatcaacgtaatagcaggcagtaaacaggaagctgaaactagatatcaaaatttagacaaaaacaatttgaaaaactttgaagactatccgatttttaagttgtatcaagatttagttaattaa

SEQ ID NO: 421622 - DNA, 681 bp, Staphylococcus aureus
atgagtttttcgtttctcttcattctgaccgctggaatggttgcggcctttaatccttgtggtatcgccttgcttccttcttatatctcctatttaattggaggcgaaacaaaggatcattcgttccgctatgcaatttttaaaggattagggcttggtggagcgatgaccacggggtttttaacgatttttgtattggctggtttgttgataggaggattgggaagcgcactaacagggatttttccgattctttcattggttatgggtatactcattgctttattggggttgggcatgctatttgggaagcatttgccgattaaaataggatcttttcaagtcaagccagggaaatggtctatctatttttacggaatagcctatgccgtgacatcacttggttgtaccttgccagcctttatgttggtggtctctgcatcgctgaatgacaatagcgtaacggccgtgatcatcaagttcatcatctactcccttggtatgggaattgtggtgacagcgatcacgatggtctcattgatttcacgacaattggtacagaagtttctgcacaactatatgggttctatccaaaaaatagcagctgttgtgattttcctctccggtttgtacatggcttattactggtatttcggttctggtggcatttgtacattttaa

SEQ ID NO: 421623 - DNA, 363 bp, Staphylococcus aureus
gtggttagctatatttttttactttgcaacagaaccaatgaaagtaaacgtgatagaaataaccttaaatcgcgtacattaggtagttggataataggaaaagataaaatacataaaataaaatatattattggtatcaatacaggtgctaataatgcagttgtctcagcttatgaagtatcatttgaacaagcggagagtatcgaaacaaataatggtagaatgagatatgcgtttattgggctttcagaaagagatgctactctaaaaaaattgaatttatacaaaaaagcactaccagatttaagatttggtagtggtagcgctacagggttctgttgcaaagtaaaaaaatatagctaa

SEQ ID NO: 421624 - DNA, 363 bp, Staphylococcus aureus; identical to SEQ ID NO: 421623

SEQ ID NO: 421625 - DNA, 363 bp, Staphylococcus aureus; identical to SEQ ID NO: 421623

SEQ ID NO: 421626 - DNA, 363 bp, Staphylococcus aureus; identical to SEQ ID NO: 421623

SEQ ID NO: 421627 - DNA, 363 bp, Staphylococcus aureus; identical to SEQ ID NO: 421623

SEQ ID NO: 421628 - DNA, 363 bp, Staphylococcus aureus; identical to SEQ ID NO: 421623

SEQ ID NO: 421629 - DNA, 363 bp, Staphylococcus aureus; identical to SEQ ID NO: 421623

SEQ ID NO: 421630 - DNA, 363 bp, Staphylococcus aureus; identical to SEQ ID NO: 421623

SEQ ID NO: 421631 - DNA, 723 bp, Staphylococcus aureus
gtgccagagttgagattcccagaatttgaaggcgaatgggaagagaagcagtttgctgattttactaaaataaatcaaggattacagattgctattaatgaacgtaaaactgaatattctccagagttgtatttttatataacaaatgaatttttaagaccaaatagtcaaactaaatattttatcgaaaatccccctcaatcagtaattgcaaataaagaagatattttaatgactagaacaggtaatactggaaaagtagtaactaatgtatttggagcgtttcataataatttttttaaaattaaatttgataaaaatctgtatgatagattgtttttagtagaggttttaaattcatctaagatacaaaataaaatattatctttagcaggatcttcgacgataccagatttaaaccatagtgatttttatagtattagttcttcttatccgctgcttagagaacagcaaaaaataggtaaattcttcagcaaacttgaccgacaaattgaattagaagaacaaaaacttgaattacttcaacaacagaaaaaaggctatatgcagaaaatcttctcgcaagaattgcgattcaaagatgagaatggtgaagattatccagattggaaagagaagaagttaggggatattacagaacaatctatgtatggtataggtgcatctgcaacaaggtttgattcgaaaaatatatatatataa

SEQ ID NO: 421632 - DNA, 159 bp, Staphylococcus aureus
atgatggtgaaaaaaacaaaatccaattcactaaaaaaagttgcaacacttgcattaagtagttcagttttggagtacaaaatgacaaaatgtacttcaaaatggactacttttttcattttaacttacataccaaattacatacaaaatgatttataa

SEQ ID NO: 421633 - DNA, 606 bp, Staphylococcus aureus
gtgtataagagacaggtaaaagacaatgatactcctatagctaatcaactacaattttcaaatgaatcctatgatttaatttcagaatcaaaagattttaataaatttagtaatttcaaaggaaaaaaacttgatgtttttggtattagttataatggccagtgtaacactaaatacatatatggtggaatcacagctactaacgaatatctagataaacctagaaatatacctataaatatatggatcaatggaaatcacaaaactatttctaccaataaagtttcgacaaataaaaaatttgttaccgctcaagagattgatatcaaattaagaaggtaccttcaagaagaatacaacatttatggacataacggcactaaaaaaggagaagaatacggtcataaatcaaaattttattctgggtttaatattggtaaagtaacgtttcatttaaataataatgacaccttttcatatgatttattctacacaggagatgatgggctaccaaaaagttttttaaaaatttatgaagacaataaaactgtagagtctgagaaattccatttggatgtcgatatctcttataaagaaacaaaataa

SEQ ID NO: 421634 - DNA, 729 bp, Staphylococcus aureus
atgaataaaatatttagagttctcactgttagcttgtttttcttcacatttttaataaaaaacaatctagcatatgctgatgtaggggtaatcaatcttagaaacttttatgctaattatcaacctgaaaagcttcaaggagttagttctggaaatttttctacttctcatcaattagagtatattgatggaaaatacactttatattcacagtttcataatgaatatgaagcgaagagattaaaagatcataaagtagatatctttggaataagttactcaggtctttgtaatacaaaatatatgtatggtggaattacgttggcaaatcaaaatttagataaacctagaaatatacctattaatctctgggtcaatggtaagcaaaatactatatctacagacaaagtttctactcaaaaaaaagaagtaactgctcaagagattgatattaagttacgaaaatacctacaaaacgaatacaatatatatggttttaataaaacaaagaaaggtcaggaatatggatataagtcaaaatttaattctgggtttaacaaaggaaaaattactttccatttaaataatgaaccttcttttacatacgatttgttttacaccggaactggtcaagcagagagttttttaaaaatttacaatgataataaaactatagatgcagagaattttcatttggatgtagagatttcatatgagaaaactgaataa

SEQ ID NO: 421635 - DNA, 621 bp, Staphylococcus aureus
gtgaagaaaatcattagtatcgcaattatagttttagcgttggtattaagtggttgtggtgtccctacgaaatcagaagtggctcaaaagtcatcgaaagttgaagtgaaaggcgagcgaccaacgatacatttcctaggacaagcaagttatgaaaatgatatgaatatcgtcaaagatcaattggaaaatgcaggatttaacgtgaagatgaatatccaaccagactatggtagctatcgtacacaacgtcaagccggcaattatgatatccaaatcgatgactggatgacagtattcggtaacccgaactatgctatgacggcattatttagttctacaggatcaaatagtttattgaaagataaacatgtagaccagttgttaaataaagcttctactcaaaatgaagcagatgttaaacaaacatataagcaaattgaagatgaagttgtatttgataaagggtatattgcgcctttatatggatcaaaaaagaatttagtatatgacaataaagtgttagataaaaatagtgttggattgccaaattcacgtgcattaatatggcaacaatttgattacaacaatagtagagaacgagatacgctccccttgtga

SEQ ID NO: 421636 - DNA, 627 bp, Staphylococcus aureus
atgtatttaaatgatttattatcagaaatagatataaaccttgataaaagaagtgatgaattagactcttcatattcattttttgagaaatattttatgcaaaatgcgaataaacctacatttaaaggcaaacccatttattttgaatatgccaatgacaatgcattcaagcatatatgtagtatagatgacatattaaatggggataatggaagagaaaaatataacatgtatccatgcgtaaaccatcatgcacatagattatgtaatgtaaattgttctatcgcttcccccaataatcctcaagctttttttcatgaaaacagggcaaaatgcatttatagagcaaagcatctcccttatatttattatgtgctgaaaaatttagaactttctaatgaaacaaatataaaggtatggaaaaacccagacaaaagaaaagataatagaaagaataatagatggaatatattgtactcatattccaattttcattatcacattattttacaagaatattataaaaatagtgctttacattcatatagatttattactggctatcctttagttttaataagcgaaataaaacgactagagagtaattacaaaaaagcaataaaataa

SEQ ID NO: 421637 - DNA, 699 bp, Staphylococcus aureus
atgattaatatatattgtgatgaaagttgtcatatacaaaacgatgttgcaaatattatggtcttaggcgctttatcagttgattctaaggataaaattagtatagtagattcatttagaaagataaaaagagaatttaatattaaagagtctgttgaattaaaatggactaaagcatcaaagagtaaacttggtatgtataaaaaacttattgatttatttttcaatgaaagtttatgttttagggtagtaattgcacacaataaaaaagaattatcattttcttctggcgatgattataatacatggtattataaaatgtattttctattactaggcaaaatgattaacaaccctaatgagcaatataaaatattactagatattaaagatactcttggagctcccaaagtgcaatttcttcatgaagtattatgcaacaacatttatgattttaaaaaagatgtgattaaagaaatgcatcaaattgactctagaagaaacgacttacttcaattatgcgatattttaattggtattttctcatatgatagaagaaatttacagtcttctcctattaaaaccgaaatagttaactatttcaaaaaaaaggctggtaatagttttaatggcacaagcccagatgaaagcaagctaaatgtttttgattggggagaaaaacaaaatgtatttaaatga

SEQ ID NO: 421638 - DNA, 234 bp, Staphylococcus aureus
atgacaaggtcagcattaaaaccatttaaaaataaacgcgttatggttactggacgtatacatcgtgttttgtttaaaaattatttagatagacatagcacatttaagccgaatgtaaggatattattaaaagatgtaattgtttcaggtgtttcaatagatcatttatggctatatgagacaaataaattatgcattggcaatggaacttattcatcaacgagtaaaatttag

SEQ ID NO: 421639 - DNA, 498 bp, Staphylococcus aureus
atgatattaagcaaagtgaccaacaaatttgtgctatttcaaaaaataccacttcttatcaaaagacatgtatacagtattaatgtcaaagctttttcgcttattgaaatgttagtagcgatgatggttataagtataactttactaattgttccagacttaattagacttagcaaaacttttctaattgaaagtagggaattaacaactgtagatttcgaatttttctcaagagatattctagaggattttaaaggagtagatagaaacgatattgaaattaggcaacagcgtatcattttacataaaggtgaagaaatgatcgaatacaaattaataaataataaaattattaaagttgtaaatgacagaggaaatataacattgattaataatgttacagcatttactgcaaatatctactataaatctattattaaaataacgataacagttaaagtcggtacaaatctgcagactaaaactatttatgtataa

SEQ ID NO: 421640 - DNA, 171 bp, Staphylococcus aureus
atgtctgataaagaaatagctttagaattaactaaaagttacttagaacatttaaatgtgcgagcgagtagtaataatacacatcattcgcataccactgctgaaaacacagaaaaaatgtatcaacatttctataacgtagtatctaaactaggtaactctggtaaatag

SEQ ID NO: 421641 - DNA, 204 bp, Staphylococcus aureus
atgacaaaaggcatcgtcagcatcggaactttatatggtcttaaaacttctctcactgcagcagcaactggtaacgttaataaagttgctatcattgttataacaatatctaatcctgacttatctaaaaagattgttaacgcaatggcagttaacactggattaaatccagctaacccatcattaatctctgcctcactataa

SEQ ID NO: 421642 - DNA, 336 bp, Staphylococcus aureus
atgtggattggatttccatttttcatatttggattttcaggtttgcttgttgaattaagtcaacgaggacaccaaagatattgttattttgttggtggtatagctttggtttttttggggttatatttttctggatatgattttttcattttaaaacttatcttttcgattttaatttgtggtgctatgacttgttttgtggttggtgctatatatgcttttaataattctgataaggaacgatcttttgctgatacgctttttaagatatttgatattgctggtgctgtttatactgcttatttatttttaagagaaattgtaaatttcttttag

SEQ ID NO: 421643 - DNA, 846 bp, Staphylococcus aureus
atgacattggtacgggaatgtaatacctttttgtctttcgtgacagataagtcgttagaaaaaaataagttatataaggctaattcgtgtaaaaatcgattttgtccggtttgtgcttggcgtaaagctagaaaagatgcgttgggtttatctttgatgatgcagcatgtacaaaaagaacataaaaaagaatttatatttttaacgttaacgacacctaatgtatctaaaaatggattagaagatgaaattaagcattataatcaatcttttagaagattgagtaatagaacgaaattcaagaaagttgttaagggttatgtaaggaaattagagattacatacaacaaagagcgggacgattataatccccattttcacgttttaattgcagttaacaaatcttattttacagataaaaattattatattagtcagaaagaatggttaaatttatggcgagatgtgacgggaatgccagaaattacacaagttcatgttgagaaagttaaggctaataatgacaaagaactttatgaaatggctaaatattcgggtaaagatagtgattatttaagtaatcaaaaagtattcgacgcgtattatcgttctttaaaaggtaagcaggtattggtgtattcgggattatttaaagaggcgagaaagttattaaaaaatggcgatttagattatttaaaagagattgatccaactgaatatatctatcaaattttttatatttggaaacaaaaagaatatttagcgagtgaactgcatgatttaacagaacaagaaaaaagagaattaaatcatcaaatgattgatgagattgaagaagaaacataa

SEQ ID NO: 421644 - DNA, 321 bp, Staphylococcus aureus
atgatttatgcaactgggattagtttttataaaaatgaagaaaataaaaatttaaaaagtattgttcgaattcaattagaatctacttcggatgaatcttggaagttggatgaaaaagttataaaaggttggtatgaaaaagaaagaattcataattggcttaaatctaataaagaaaaaggttttgaaataaaaattaaaatttctccatattctttgttagagccagttgaaaataatagtgttaaatatgttcgagcaattgcagatgaaacacctttgaataatttacttaaattaacacattatactgaaagttaa

SEQ ID NO: 421645 - DNA, 645 bp, Staphylococcus aureus
atgaaaaacaaggttttattatcaaacttatttatttgcttaatcagttttactttactaagtacctcagcacttgcaaacgtagaaacacaagaacctcaagaaactatagaaactccagacgataacgaattaactacgtctgaagaaggtgtgatcgaaaataatatttctactatcgatgaaaatggtgatgaagtatttttcgaaaatgaagaagataaacaaatgtacttaaatgaacaaaataagcaaggtacaatacaaccaagggcagtcggagtatcacaaaaagtaaaaacaatatctaaaaaaagatataacatgaaattctcaggttattctaatatgactccaaattggtctaaagcatcaaaatacacaatacctagaaataaatctttaaaattcagtgtaggtgctacatatggtggtgttaaaatcaacttatcatttggtaaaacatatggtgtaaatactacaataaaagctaattcaaaaaaatatagtagacttgcaggatatcaagatgtaacactaactaaaaaacaaagaatatactatcaagcaggaactaaaattaagacagtaaatttcgtaacaaaaaaaacacatgctaaatacgtaaaagttaaatataaataa

SEQ ID NO: 421646 - DNA, 180 bp, Staphylococcus aureus
atgaaattttttgatttttcttttacctttgcgattgcttttcttttagctgatataggtatcatatattgggtttatactggggagtttaatttattattatttgttattcctgtttttcttttgattttctcattagtttatttgagtgaatataataaaaaatatagagataaatga

SEQ ID NO: 421647 - DNA, 846 bp, Staphylococcus aureus; identical to SEQ ID NO: 421643

SEQ ID NO: 421648 - DNA, 321 bp, Staphylococcus aureus; identical to SEQ ID NO: 421644

SEQ ID NO: 421649 - DNA, 645 bp, Staphylococcus aureus; identical to SEQ ID NO: 421645

SEQ ID NO: 421650 - DNA, 180 bp, Staphylococcus aureus; identical to SEQ ID NO: 421646

SEQ ID NO: 421651 - DNA, 180 bp, Staphylococcus aureus; identical to SEQ ID NO: 421646

SEQ ID NO: 421652 - DNA, 645 bp, Staphylococcus aureus; identical to SEQ ID NO: 421645

SEQ ID NO: 421653 - DNA, 321 bp, Staphylococcus aureus; identical to SEQ ID NO: 421644

SEQ ID NO: 421654 - DNA, 846 bp, Staphylococcus aureus; identical to SEQ ID NO: 421643

SEQ ID NO: 421655 - DNA, 189 bp, Staphylococcus aureus; identical to SEQ ID NO: 421153

SEQ ID NO: 421656 - DNA, 1380 bp, Staphylococcus aureus; identical to SEQ ID NO: 412597

SEQ ID NO: 421657 - DNA, 189 bp, Staphylococcus aureus; identical to SEQ ID NO: 421153

SEQ ID NO: 421658 - DNA, 1380 bp, Staphylococcus aureus; identical to SEQ ID NO: 412597

SEQ ID NO: 421659 - DNA, 189 bp, Staphylococcus aureus; identical to SEQ ID NO: 421153

SEQ ID NO: 421660 - DNA, 1380 bp, Staphylococcus aureus
ttgtttagtttatataaaaaatttaaaggtttgttttatagcgttttattttggctttgtattctttcattttttagtgtattaaatgaaatggttttaaatgtttctttacctgatattgcaaatcattttaatactactcctggaattacaaactgggtaaacactgcatatatgttaactttttcgataggaacagcagtatatggaaaattatctgattatataaatataaaaaaattgttaattattggtattagtttgagctgtcttggttcattgattgcttttattggtcacaatcacttttttattttgatttttggtaggttagtacaaggagtaggatctgctgcattcccttcactgattatggtggttgtagctagaaatattacaagaaaaaaacaaggcaaagcctttggttttataggatcaattgtagctttaggtgaagggttaggtccttcaatagggggaataatagcacattatattcattggtcttacctacttatacttcctatgattacaatagtaactataccttttcttattaaagtaatggtacctggtaaatcaacaaaaaatacattagatatcgtaggtattgttttaatgtctataagtattatatgttttatgttatttacgacaaattataattggacttttttaatactcttcacgatcttttttgtgatttttattaaacatatttcaagagtttctaacccttttattaatcctaaactagggaaaaacattccgtttatgcttggtttgttttctggtgggctaatattttctatagtagctggttttatatcaatggtgccttatatgatgaaaactatttatcatgtaaatgtagcgacaataggtaatagtgttatttttcctggagccatgagtgttattgtttttggttattttggtggttttttagtggatagaaaaggatcattatttgtttttattttaggatcattgtctatctctataagttttttaactattgcattttttgttgagtttagtatgtggttgactacttttatgtttatatttgttatgggcggattatcttttactaaaacagttatatcaaaaatagtatcaagtagtctttctgaagaagaagttgcttctggaatgagtttgctaaatttcacaagttttttatcagagggaacaggtatagcaattgtaggaggtttattgtcactacaattgattaatcgtaaactagttctggaatttataaattattcttctggagtgtatagtaatattcttgtagccatggctatccttattattttatgttgtcttttgacgattattgtatttaaacgttctgaaaagcagtttgaatag

SEQ ID NO: 421661 - DNA, 1380 bp, Staphylococcus aureus; identical to SEQ ID NO: 412597

SEQ ID NO: 421662 - DNA, 189 bp, Staphylococcus aureus; identical to SEQ ID NO: 421153

SEQ ID NO: 421663 - DNA, 1380 bp, Staphylococcus aureus; identical to SEQ ID NO: 412597

SEQ ID NO: 421664 - DNA, 189 bp, Staphylococcus aureus; identical to SEQ ID NO: 421153

SEQ ID NO: 421665 - DNA, 321 bp, Staphylococcus aureus; identical to SEQ ID NO: 421644

SEQ ID NO: 421666 - DNA, 321 bp, Staphylococcus aureus; identical to SEQ ID NO: 421644

SEQ ID NO: 421667 - DNA, 321 bp, Staphylococcus aureus; identical to SEQ ID NO: 421644

SEQ ID NO: 421668 - DNA, 321 bp, Staphylococcus aureus; identical to SEQ ID NO: 421644

SEQ ID NO: 421669 - DNA, 321 bp, Staphylococcus aureus; identical to SEQ ID NO: 421644

SEQ ID NO: 421670 - DNA, 321 bp, Staphylococcus aureus; identical to SEQ ID NO: 421644

SEQ ID NO: 421671 - DNA, 189 bp, Staphylococcus aureus; identical to SEQ ID NO: 421153

SEQ ID NO: 421672 - DNA, 645 bp, Staphylococcus aureus; identical to SEQ ID NO: 421645

SEQ ID NO: 421673 - DNA, 180 bp, Staphylococcus aureus; identical to SEQ ID NO: 421646

SEQ ID NO: 421674 - DNA, 180 bp, Staphylococcus aureus; identical to SEQ ID NO: 421618

SEQ ID NO: 421675 - DNA, 645 bp, Staphylococcus aureus; identical to SEQ ID NO: 421645

SEQ ID NO: 421676 - DNA, 180 bp, Staphylococcus aureus; identical to SEQ ID NO: 421646

SEQ ID NO: 421677 - DNA, 1101 bp, Staphylococcus aureus
ttgattgcttttattggtcacaatcacttttttattttgatttttggtaggttagtacaaggagtaggatctgctgcattcccttcactgattatggtggttgtagctagaaatattacaagaaaaaaacaaggcaaagcctttggttttataggatcaattgtagctttaggtgaagggttaggtccttcaatagggggaataatagcacattatattcattggtcttacctacttatacttcctatgattacaatagtaactataccttttcttattaaagtaatggtacctggtaaatcaacaaaaaatacattagatatcgtaggtattgttttaatgtctataagtattatatgttttatgttatttacgacaaattataattggacttttttaatactcttcacaatcttttttgtgatttttattaaacatatttcaagagtttctaacccttttattaatcctaaactagggaaaaacattccgtttatgcttggtttgttttctggtgggctaatattttctatagtagctggttttatatcaatggtgccttatatgatgaaaactatttatcatgtaaatgtagcgacaataggtaatagtgttatttttcctggaaccatgagtgttattgtttttggttattttggtggttttttagtggatagaaaaggatcattatttgtttttattttaggatcattgtctatctctataagttttttaactattgcattttttgttgagtttagtatgtggttgactacttttatgtttatatttgttatgggcggattatcttttactaaaacagttatatcaaaaatagtatcaagtagtctttctgaagaagaagttgcttctggaatgagtttgctaaatttcacaagttttttatcagagggaacaggtatagcaattgtaggaggtttattgtcactacaattgattaatcgtaaactagttctggaatttataaattattcttctggagtgtatagtaatattcttgtagccatggctatccttattattttatgttgtcttttgacgattattgtatttaaacgttctgaaaagcagtttgaatag

SEQ ID NO: 421678 - DNA, 201 bp, Staphylococcus aureus
atgaaagtccaaatttatcaattaccgattatttttggagatagttctaataatgaaactgatgaaaaagaaagtatatataatggtaagagtattgcaggatcagtagtgtattttcttaaagttaaaaacaaacctactgttgcaaaattactcaaatacattatgatcatggtcactaaaattgttactattgcatag

SEQ ID NO: 421679 - DNA, 180 bp, Staphylococcus aureus; identical to SEQ ID NO: 421618

SEQ ID NO: 421680 - DNA, 180 bp, Staphylococcus aureus; identical to SEQ ID NO: 421646

SEQ ID NO: 421681 - DNA, 180 bp, Staphylococcus aureus; identical to SEQ ID NO: 421618

SEQ ID NO: 421682 - DNA, 180 bp, Staphylococcus aureus; identical to SEQ ID NO: 421618

SEQ ID NO: 421683 - DNA, 180 bp, Staphylococcus aureus; identical to SEQ ID NO: 421618

SEQ ID NO: 421684 - DNA, 279 bp, Staphylococcus aureus
gtgcaatacaaagataaactacaaacgattattggtgcgcataaaatataccaaggcaataaaccagtattaacattgaaagaaatcgatttccgtgcacgagaagcgttaataaaaaataaaatattatataacgaaaatcgtaataaaggtaagcttaagatcaccggtggcggtaataactacactattgatttaagcaaaagattacattcagatctagcaaatgtttatgttaaaaatcctaataaaataactgttgacgtcctctttgattag

SEQ ID NO: 421685 - DNA, 366 bp, Staphylococcus aureus
atgagtaagaacatcacgaaaaatataattttaacgacaacattattactattaggtactgtattacctcaaaatcaaaaaccagtatttagtttttactctgaagctaaagcttatagtattggtcaagatgaaactaacatcaatgaattaattaaatattacacacagcctcatttttcattttcaaataaatggctatatcaatatgataatggaaacatttatgttgaacttaagagatattcatggtcagcacatatatctttatggggcgctgaaagttggggaaatattaatcagttaaaagatcgttacgtagatgtgtttggactaaaagacaaagatactgatcagttatggtag

SEQ ID NO: 421686 - DNA, 321 bp, Staphylococcus aureus; identical to SEQ ID NO: 421644

SEQ ID NO: 421687 - DNA, 180 bp, Staphylococcus aureus; identical to SEQ ID NO: 421618

SEQ ID NO: 421688 - DNA, 180 bp, Staphylococcus aureus; identical to SEQ ID NO: 421618

SEQ ID NO: 421689 - DNA, 180 bp, Staphylococcus aureus; identical to SEQ ID NO: 421618

SEQ ID NO: 421690 - DNA, 180 bp, Staphylococcus aureus; identical to SEQ ID NO: 421618

SEQ ID NO: 421691 - DNA, 189 bp, Staphylococcus aureus; identical to SEQ ID NO: 421153

SEQ ID NO: 421692 - DNA, 321 bp, Staphylococcus aureus; identical to SEQ ID NO: 421644

SEQ ID NO: 421693 - DNA, 645 bp, Staphylococcus aureus; identical to SEQ ID NO: 421645

SEQ ID NO: 421694 - DNA, 189 bp, Staphylococcus aureus; identical to SEQ ID NO: 421153

SEQ ID NO: 421695 - DNA, 537 bp, Staphylococcus aureus
atgatgaaaactatttatcatgtaaatgtagcgacaataggtaatagtgttatttttcctggaaccatgagtgttattgtttttggttattttggtggttttttagtggatagaaaaggatcattatttgtttttattttaggatcattgtctatctctataagttttttaactattgcattttttgttgagtttagtatgtggttgactacttttatgtttatatttgttatgggcggattatcttttactaaaacagttatatcaaaaatagtatcaagtagtctttctgaagaagaagttgcttctggaatgagtttgctaaatttcacaagttttttatcagagggaacaggtatagcaattgtaggaggtttattgtcactacaattgattaatcgtaaactagttctggaatttataaattattcttctggagtgtatagtaatattcttgtagccatggctatccttattattttatgttgtcttttgacgattattgtatttaaacgttctgaaaagcagtttgaatag

SEQ ID NO: 421696 - DNA, 189 bp, Staphylococcus aureus; identical to SEQ ID NO: 421153

SEQ ID NO: 421697 - DNA, 195 bp, Staphylococcus aureus
atgactttcgaagaaaaattaagtcaaatgtacaacgagattgcgaataagattagtagcatgataccagtagagtgggaaaaagtatatacaatggcttatatagatgatgaaggtggagaagtgttctactattacacagaacctggaagcaatgaattatactactatactctgtctcttatacacatctga

SEQ ID NO: 421698 - DNA, 417 bp, Staphylococcus aureus
atgtacttaaatgaacaaaataagcaaggtacaatacaaccaagggcagtcggagtatcacaaaaagtaaaaacaatatctaaaaaaagatataacctcaaattctcaggttattctaatatgactccaaattggtctaaagcatcaaaatacacaatacctagaaataaatctttaaaattcagtgtaggtgctacatatggtggtgttaaaatcaacttatcatttggtaaaacatatggtgtaaatactacaataaaagctaattcaaaaaaatatagtagacttgcaggatatcaagatgtaacactaactaaaaaacaaagaatatactatcaagcaggaactaaaattaagacagtaaatttcgtaacaaaaaaaacacatgctaaatacgtaaaagttaaatataaataa

SEQ ID NO: 421699 - DNA, 321 bp, Staphylococcus aureus; identical to SEQ ID NO: 421644

SEQ ID NO: 421700 - DNA, 180 bp, Staphylococcus aureus; identical to SEQ ID NO: 421618

SEQ ID NO: 421701 - DNA, 369 bp, Staphylococcus aureus
atgattgagtatttaaggtttgcaaattgtacacaagaactgacaattgaaaagtatggtatggatgtaacttttgtaccagctaatttaaatgggctagaacatacaacactgaaagaaaaagttatacctaacgttatggaaacattaaatgatggtgcattacatatcgctgaagaagcacaccatattatgaataatcactctatcatgatttatccaattgatattgaaactttgtttgaaacgaataaatggattaatgcatacgaatgttatttcaaaaatatgttaggacttaaatgtgaattacaaagtatcgatgcatttaattttattcagcaattagatttgaataataatagttaa

SEQ ID NO: 421702 - DNA, 276 bp, Staphylococcus aureus
gtgtataagagacagatacctagaaataaatctttaaaattcagtgtaggtgctacatatggtggtgttaaaatcaacttatcatttggtaaaacatatggtgtaaatactacaataaaagctaattcaaaaaaatatagtagacttgcaggatatcaagatgtaacactaactaaaaaacaaagaatatactatcaagcaggaactaaaattaagacagtaaatttcgtaacaaaaaaaacacatgctaaatacgtaaaagttaaatataaataa

SEQ ID NO: 421703 - DNA, 180 bp, Staphylococcus aureus; identical to SEQ ID NO: 421618

SEQ ID NO: 421704 - DNA, 237 bp, Staphylococcus aureus
atgtgtataagagacagatatggtggtgttaaaatcaacttatcatttggtaaaacatatggtgtaaatactacaataaaagctaattcaaaaaaatatagtagacttgcaggatatcaagatgtaacactaactaaaaaacaaagaatatactatcaagcaggaactaaaattaagacagtaaatttcgtaacaaaaaaaacacatgctaaatacgtaaaagttaaatataaataa

SEQ ID NO: 421705 - DNA, 180 bp, Staphylococcus aureus; identical to SEQ ID NO: 421618

SEQ ID NO: 421706 - DNA, 180 bp, Staphylococcus aureus
atgagtaaaaatttagataagggattggttatatcaacagttttaaacgttattctttgcatgcttttaatattaactatgagagtagaaagtttaactgtatcagttatattagcaataatcactggagtaaatgcagtatatttagttgctaaggttttaaaacagaaaaagacctga

SEQ ID NO: 421707 - DNA, 147 bp, Staphylococcus aureus
atggacgaaaaaacaccacatatgcattatggcgttgttccaataactgatgatggtcgtttaagtgctaaagaagttgtaggtaataaaaaagctttaacagcgtttcaagatagatttaatgagcatgttaaacaacgaggataa

SEQ ID NO: 421708 - DNA, 231 bp, Staphylococcus aureus
atggacgaaaaaacaccacatatgcattatggcgttgttccaataactgatgatggtcgtttaagtgctaaagaagttgtaggtaataaaaaagctttaacagcgtttcaggatagatttaatgagcatgttaaacaacgaggatatgatttagaacgtgggcaatcaagacaagtaacaaatgctaaacatgagcaaataagtcagtatctgtctcttatacacatctga

SEQ ID NO: 421709 - DNA, 681 bp, Staphylococcus aureus
atggaaaaatttgagaaattaagcaatccttcacaaaatttcgaacaaatttataaaaaaaacataataaataatcccaaaataattatcgatatgtattaccatccggattacttcacattagcaaacggacttttaccttggattataatcatgcgaaatagagaattaaataatttaggaaattatgatatagagatacataacttattaaaaaataaaattaatagaactattatagagcaaattaaagatcccggattgtttaatggtttatcaggtctgacatatatcttagctatatcatcgaaaaatggacgctatgataatctaatagaaggaactttaccttatttggaatatcaaacatacgataagataagcgagtgtattagaaataaaaacaataaaacagttaatgattatgattacgatttaataagtgggctgagtggaatcttaaaatgttatctaaataaacatgtaatcaagtacatacaagataaaaaagtaatagatgatatcgctatatgtttagcagactattttaactttaaggaatacaacaatttacaaataagtagttcagttttggagtacaaaatgacaaaatgtacttcaaaatggactacttttttcattttaacttacataccaaattacatacaaaatgatttataa

SEQ ID NO: 421710 - DNA, 213 bp, Staphylococcus aureus
atgcaaaataagtcaaaatcgccttttaaaattgcattgtctagatttattcataataaaattgcaatgttatcgattatttttttattaatcataactattgtatcaattatagcgccattaatagctccttttccagtgaaccaacaagatttattaaatataaaaggttacagttggagtgatttctggttatttcggaggtattgttga

SEQ ID NO: 421711 - DNA, 183 bp, Staphylococcus aureus
atgaaatatagaattatagcggctttgttttttttgatgttgttattaatatatgtatttaaaatagctccttttttaaatactgatagtcaaattgtaaatttagttgttgtgttaattattttctttataggtgcattattagggtggattagtcgtaaatttgataaaaactccaaataa

SEQ ID NO: 421712 - DNA, 309 bp, Staphylococcus aureus; identical to SEQ ID NO: 420782

SEQ ID NO: 421713 - DNA, 309 bp, Staphylococcus aureus; identical to SEQ ID NO: 420782

SEQ ID NO: 421714 - DNA, 183 bp, Staphylococcus aureus; identical to SEQ ID NO: 421711

SEQ ID NO: 421715 - DNA, 444 bp, Staphylococcus aureus
atgtataaaaaaatattaactttatctattttgcttgttatgatttttacagttgttcctgttcataatgaagttgaagctaaacctaaaaaaggttctgttgtaacgattaataaaaagcaatatatatatcaagggactgtaaaaaaatattatcctgcaaaatattgtaaactggttaataagtatgctaagaattcccagtcttttacaaatttagtggctggtactagcggttttgcgacttttgcaaaaaaagctggttatgctggtgtgttagcttcgagtttatatattgctaatttaggtgttcagaataatactacgatttacaaaaatgctgcaagaaaaggtacgggtgtgcaagttagttatgatttatatgttcctaaaacaggacataattatggattaacacgtaatacaaaagttgtatataaataa

SEQ ID NO: 421716 - DNA, 309 bp, Staphylococcus aureus; identical to SEQ ID NO: 420782

SEQ ID NO: 421717 - DNA, 183 bp, Staphylococcus aureus; identical to SEQ ID NO: 421711

SEQ ID NO: 421718 - DNA, 444 bp, Staphylococcus aureus; identical to SEQ ID NO: 421715

SEQ ID NO: 421719 - DNA, 612 bp, Staphylococcus aureus
ttgggagatgagattaaaagatataataaatcttttgataaattatttaaacgaaaagttgtaaaaagagtagtaaaaggttatgttcgaaaattagaaataacttataatgagaaacgagatgattatcacccacattttcatgtgcttattgttgttaataaatcatattttacggatgtaaaagcttatttgaatcaaaaagagtggttgcgtttatggcgtgaggcaacaggaatttcagaaattacgcaagtagatgtgcgtcgggtcaaagagcaaaatagtaatgagttgtatgaaatggctaaatatacaggtaaagatagtgattatttatctaatgaaaaagtgtttaaagttttttatgagtctttaaaaggtaaaagggcatttgcatatggtggattatttaaagaagttagaaaaaagcttaaaaatggcgatttagattatttaaaagaggttgatccaacaaaatacatatatcaaattttttgtggttggaatcaaatgcattattatgcgagtgaattgagattgatgagtgaagaaatgcaaaaagaagtgaatcatcaaatgataaatgaattagatgataaatatttataa

SEQ ID NO: 421720 - DNA, 183 bp, Staphylococcus aureus; identical to SEQ ID NO: 421711

SEQ ID NO: 421721 - DNA, 444 bp, Staphylococcus aureus; identical to SEQ ID NO: 421715

SEQ ID NO: 421722 - DNA, 612 bp, Staphylococcus aureus; identical to SEQ ID NO: 421719

SEQ ID NO: 421723 - DNA, 183 bp, Staphylococcus aureus; identical to SEQ ID NO: 421711

SEQ ID NO: 421724 - DNA, 444 bp, Staphylococcus aureus; identical to SEQ ID NO: 421715

SEQ ID NO: 421725 - DNA, 444 bp, Staphylococcus aureus; identical to SEQ ID NO: 421715

SEQ ID NO: 421726 - DNA, 183 bp, Staphylococcus aureus; identical to SEQ ID NO: 421711

SEQ ID NO: 421727 - DNA, 309 bp, Staphylococcus aureus; identical to SEQ ID NO: 420782

SEQ ID NO: 421728 - DNA, 450 bp, Staphylococcus aureus
atgtgtataagagacaatgtaaaagcttatttgaatcaaaaagagtggttgcgtttatggcgtgaggcaacaggaatttcagaaattacgcaagtagatgtgcgtcgggtcaaagagcaaaatagtaatgagttgtatgaaatggctaaatatacaggtaaagatagtgattatttatctaatgaaaaagtgtttaaagttttttatgagtctttaaaaggtaaaagggcatttgcatatggtggattatttaaagaagttagaaaaaagcttaaaaatggcgatttagattatttaaaagaggttgatccaacaaaatacatatatcaaattttttgtggttggaatcaaatgcattattatgcgagtgaattgagattgatgagtgaagaaatgcaaaaagaagtgaatcatcaaatgataaatgaattagatgataaatatttataa

SEQ ID NO: 421729 - DNA, 183 bp, Staphylococcus aureus; identical to SEQ ID NO: 421711

SEQ ID NO: 421730 - DNA, 444 bp, Staphylococcus aureus; identical to SEQ ID NO: 421715

SEQ ID NO: 421731 - DNA, 444 bp, Staphylococcus aureus; identical to SEQ ID NO: 421715

SEQ ID NO: 421732 - DNA, 183 bp, Staphylococcus aureus; identical to SEQ ID NO: 421711

SEQ ID NO: 421733 - DNA, 351 bp, Staphylococcus aureus
gtgcgtcgggtcaaagagcaaaatagtaatgagttgtatgaaatggctaaatatacaggtaaagatagtgattatttatctaatgaaaaagtgtttaaagttttttatgagtctttaaaaggtaaaagggcatttgcatatggtggattatttaaagaagttagaaaaaagcttaaaaatggcgatttagattatttaaaagaggttgatccaacaaaatacatatatcaaattttttgtggttggaatcaaatgcattattatgcgagtgaattgagattgatgagtgaagaaatgcaaaaagaagtgaatcatcaaatgataaatgaattagatgataaatatttataa

SEQ ID NO: 421734 - DNA, 444 bp, Staphylococcus aureus; identical to SEQ ID NO: 421715

SEQ ID NO: 421735 - DNA, 183 bp, Staphylococcus aureus; identical to SEQ ID NO: 421711

SEQ ID NO: 421736 - DNA, 309 bp, Staphylococcus aureus; identical to SEQ ID NO: 420782

SEQ ID NO: 421737 - DNA, 444 bp, Staphylococcus aureus; identical to SEQ ID NO: 421715

SEQ ID NO: 421738 - DNA, 183 bp, Staphylococcus aureus; identical to SEQ ID NO: 421711

SEQ ID NO: 421739 - DNA, 309 bp, Staphylococcus aureus; identical to SEQ ID NO: 420782

SEQ ID NO: 421740 - DNA, 309 bp, Staphylococcus aureus
atggctaaatatacaggtaaagatagtgattatttatctaatgaaaaagtgtttaaagttttttatgagtctttaaaaggtaaaagggcatctgcatatggtggattatttaaagaagttagaaaaaagcttaaaaatggcgatttagattatttaaaagaggttgatccaacaaaatacatatatcaaattttttgtggttggaatcaaatgcattattatgcgagtgaattgagattgatgagtgaagaaatgcaaaaagaagtgaatcatcaaatgataaatgaattagatgataaatatttataa

SEQ ID NO: 421741 - DNA, 183 bp, Staphylococcus aureus; identical to SEQ ID NO: 421711

SEQ ID NO: 421742 - DNA, 444 bp, Staphylococcus aureus; identical to SEQ ID NO: 421715

SEQ ID NO: 421743 - DNA, 219 bp, Staphylococcus aureus
atgtgtataagagacagatttaaagaagttagaaaaaagcttaaaaatggcgatttagattatttaaaagaggttgatccaacaaaatacatatatcaaattttttgtggttggaatcaaatgcattattatgcgagtgaattgagattgatgagtgaagaaatgcaaaaagaagtgaatcatcaaatgataaatgaattagatgataaatatttataa

SEQ ID NO: 421744 - DNA, 183 bp, Staphylococcus aureus; identical to SEQ ID NO: 421711

SEQ ID NO: 421745 - DNA, 444 bp, Staphylococcus aureus; identical to SEQ ID NO: 421715

SEQ ID NO: 421746 - DNA, 183 bp, Staphylococcus aureus; identical to SEQ ID NO: 421711

SEQ ID NO: 421747 - DNA, 444 bp, Staphylococcus aureus; identical to SEQ ID NO: 421715

SEQ ID NO: 421748 - DNA, 444 bp, Staphylococcus aureus; identical to SEQ ID NO: 421715

SEQ ID NO: 421749 - DNA, 183 bp, Staphylococcus aureus; identical to SEQ ID NO: 421711

SEQ ID NO: 421750 - DNA, 183 bp, Staphylococcus aureus; identical to SEQ ID NO: 421711

SEQ ID NO: 421751 - DNA, 444 bp, Staphylococcus aureus; identical to SEQ ID NO: 421715

SEQ ID NO: 421752 - DNA, 444 bp, Staphylococcus aureus; identical to SEQ ID NO: 421715

SEQ ID NO: 421753 - DNA, 183 bp, Staphylococcus aureus; identical to SEQ ID NO: 421711

SEQ ID NO: 421754 - DNA, 183 bp, Staphylococcus aureus; identical to SEQ ID NO: 421711

SEQ ID NO: 421755 - DNA, 444 bp, Staphylococcus aureus; identical to SEQ ID NO: 421715

SEQ ID NO: 421756 - DNA, 183 bp, Staphylococcus aureus; identical to SEQ ID NO: 421711

SEQ ID NO: 421757 - DNA, 444 bp, Staphylococcus aureus; identical to SEQ ID NO: 421715

SEQ ID NO: 421758 - DNA, 183 bp, Staphylococcus aureus; identical to SEQ ID NO: 421711

SEQ ID NO: 421759 - DNA, 309 bp, Staphylococcus aureus; identical to SEQ ID NO: 420782

SEQ ID NO: 421760 - DNA, 309 bp, Staphylococcus aureus; identical to SEQ ID NO: 420782

SEQ ID NO: 421761 - DNA, 183 bp, Staphylococcus aureus; identical to SEQ ID NO: 421711

SEQ ID NO: 421762 - DNA, 183 bp, Staphylococcus aureus; identical to SEQ ID NO: 421711

SEQ ID NO: 421763 - DNA, 183 bp, Staphylococcus aureus; identical to SEQ ID NO: 421711

SEQ ID NO: 421764 - DNA, 183 bp, Staphylococcus aureus; identical to SEQ ID NO: 421711

SEQ ID NO: 421765 - DNA, 975 bp, Staphylococcus aureus
atgaaaccattacatttaaagttgaataatttcggcccctttttaaaagaagaaattgatttttctaaaattgataataatgaattgtttttaataagtggtaagactggatcgggtaaaacaatgatttttgatgcaatgacttatgccttgtttggtaaagcatcaactgaacaaagagaagaaaatgatttgagaagtcatttcgctgatggtaaacagccgatgtcagtaacatttgaatttcaattaaatcatcgaatttataaagtgcatagacaaggcccttatatcaaagaaggtaatacaacaaaaacgaacgctaaatttgatgtatttgagatggtggatggcaagtatgaaattagagaaagtaaagtaatttcaggtacccaattcattattgaattattaggagtaaatgcagatcaattccgacaattgtttattttgcctcaaggtgaattcaaacgctttttaatatcaaacagtcgtgaaaagcaagggatattaagaacactgtttgacagtgaaaaatttgaagctatacgagaaatattaaaagaagaagtaaaaaaagaaaaagctcaaatcgagaatagatatcaacaaattgaccttttatggcaagaaattgaatcatttgatgatgacaaaataaaaggcttattagagcttgccactcagcagatagacaaattgattgaaaatataccacttttacaagctaggtcgaaagaaatactagcatttgtaaatgaaagtaaagaaactgctattaaagaatatgaaataatagaaaagaaaacactagaaaataatatattaaaagataatattaaccaactcaacaaaaataaaattgatttcgttcaattgaaagagcaacaacctgaaatagacgaaattgaagctaagttaaagttgttacaagatattaccaacctattgaatctgtctcttatacacatctga

SEQ ID NO: 421766 - DNA, 309 bp, Staphylococcus aureus; identical to SEQ ID NO: 420782

SEQ ID NO: 421767 - DNA, 405 bp, Staphylococcus aureus; identical to SEQ ID NO: 421033

SEQ ID NO: 421768 - DNA, 225 bp, Staphylococcus aureus; identical to SEQ ID NO: 420803

SEQ ID NO: 421769 - DNA, 309 bp, Staphylococcus aureus; identical to SEQ ID NO: 420782

SEQ ID NO: 421770 - DNA, 225 bp, Staphylococcus aureus; identical to SEQ ID NO: 420803

SEQ ID NO: 421771 - DNA, 309 bp, Staphylococcus aureus; identical to SEQ ID NO: 420782

SEQ ID NO: 421772 - DNA, 312 bp, Staphylococcus aureus
atgtgtataagagacagatattatcctgcaaaatattgtaaactggttaataagtatgctaagaattcccagtcttttacaaatttagtggctggtactagcggttttgcgactcttgcaaaaaaagctggttatgctggtgtgttagcttcgagtttatatattgctaatttaggtgttcagaataatactacgatttacaaaaatgctgcaagaaaaggtacgggtgtgcaagttagttatgatttatatgttcctaaaacaggacataattatggattaacacgtaatacaaaagttgtatataaataa

SEQ ID NO: 421773 - DNA, 1005 bp, Staphylococcus aureus
atgatggaactgagtgatagagagtggaaagcatttaaaatcaaagacttattttattgttatacaggaaaatattatagtaaaaacaaatattcaaatggtaatatgccgctaataacagcaaagtctcaatataatgggatttcacattggattaatattaatggtgaagattattttgaagatgctattacaataggtaaagtagatgcagcttctttttatcaaccatttggatttgtctgttcatcagatgtaaatgtaattaagccgaaagatgtgaaattaaataagtatatagcatattttttatgcaatcaaataatgatgcagagttctaaatttgattacgggaatcaaattagactcaatgatacaaaagctttaaacataatgcttccatcaattgataataaaccagactatgacttcatggaacaatacattaaagaaaaatattttaatctaaaattacaaattaaagaaaaacaaaaacatgaaatcaatgattggcgagagctagatgaggttgagtggagttcttattatttatatgagctatttgattttaaaagaggtaaccaaaacaaaatgtcagatttagatcttggttatttaccattaatatcggctaaaaaaacaaataatggctataaaagttttgtagaaaaaaataataaaactttataccctggatctatcatttcactaaacaatgatggagatgggggagttggaatagcttattatcaaccgttcaaaagtatgatggatacacatgtaactgctttaattagtaaagaagatattaataagtacacaaagttatttatttcaagaacgattactaaacaacgcaacaaatttagtcatgggtatgcaattagctcaaatagattaaggcgacaaataatcaagctccccactaaaaacaatcagcccgactatgaatttatggagcaatacatgaagcgaaaagaaaataagatattagatagattataa

SEQ ID NO: 421774 - DNA, 1905 bp, Staphylococcus aureus
atgaacgaaaaaactggcatagatcaatttatgagaaaagaaattgaaagtttaggtgtaagttacgatgaacaacaaagcagcaatgttgaaatagcagaagcgttaaaaacagcaagtaaaagtttaagtgggaaaataggcaaaccagagtttttatttttcagcaatgaatttttagttgttgttgaagacaaaaaagatatacataagcatgaaatgaagtctgaaagaggcgaattaatactagattcatcagaaatactgaaagagtatgcagttaatggcgcagtgcattatgcacaacacataattaaatatacaaatataattgataaggtttttgctgttggtgcatcaggtgatgggcacacaaatcatatatcaatttactatgttgacagtgaaggctataaatatatttcagacataaagaacttagatgatctaaaagaaggaaacattatagaattttaccgcgtttcagttttaggagaattaccgaaagaagagagagaactaaaagaagtaaataaaatcgctgcagatttgcacgaggatttaaggaactacggttcgcttgaaggcgaaaagaaagcttctgtagtgtctgctattttactagctttagaaaatgaagaagtaatttttaatgtagataaactgcaaggacttcaaggtgagggtgttaaagatggtgaaatcctctttgatgctattgataaatacttaagaaataaaagtttaatgcctcatgctaaaattggtgaattaaaagataacttcacttttatacagaacgatttgacgttaaatagatcaagagaagatttaaagatgacaccattaaaatattttactatcaagctaagtaataaattaaagaaaaatatcaaacattctgatatggatatactaggtaatttttatggtgagtttgtaaaatatggaggaaatgatggtaattcattaggcatagtcttaacacctagacatattacaaacctgatgtgcgaattaattgatattgacgaaaatgattatgtattagatccatgctgtggttcgggaggcttcttaatagctgctatgaataggatgttagataaaacaaattgtgatgataaaaaagaccacatcaagcaaaaacaattacatggcgtagaattacaacaaaaattattcacaattgctactaccaatatgattttacgtggggatggtaaaagtaacttgaagcgtgacgacattttccatgtcgaaaaagaattttatgcaaataagattaccaaagcgttaatcaacccaccatattcacaagctaaaactaaaaatttaagtcatttatcagaaataagttttatcaatgaaacattatcactaatgaaaaaggacgctaagttagccgctatagttcctcaaagtacaatgattggtaaaactaaaaatgataagaattacaagcgtgaaatactagaaaaacattcattagaaacagtaattacgcttaataaagataccttttatggtgtgggagtaaatccatgcatagcaatttttactgcaggtattccacaagataacaaaaaacgtgttaactttataaatttttctgatgatggttatatagtgcgcaaacatgtgggattagttggagatggtaccgagaaatcaaaaaaagaatatcttttaaacgtgttaaatgattatgaagatgcggatactaactttttagttaaatcccctattacttgggaagatgaatggctgcacagtttcttttactacaatgaagaaattcctacagatgaagatttcgaaaagacaatagctgattacttatcatttgaatttgatatgaaactgcacggcagggggtatttatttgatgatggaactgagtga

SEQ ID NO: 421775 - DNA, 1257 bp, Staphylococcus aureus; identical to SEQ ID NO: 409235

SEQ ID NO: 421776 - DNA, 279 bp, Staphylococcus aureus
ttggtcatccgaaaaaaagatcgagcggcatatgaggcacgccaagcgattccaaacattaatgaaaacagtccgccaatattaattgtacatggagggaaagaccagcaagttggtattcatcatgcgtattatttagcggaccaactagagttaaaaggtgccacgcatgaaacattttatcaaatggcagaaggacatgtgccaagaccaccagcgatggttgaaacattgacttatattaaagagtttatgaaccaagttgagtcgcatagctag

SEQ ID NO: 421777 - DNA, 486 bp, Staphylococcus aureus
ttgcaacagaaccagttttttaataatactgatgctaaaattattgatttatctgtgtctgtgaatgtcttaaaaaatgaaactttttattatttgttggataaagcattagaagagaaagacaataatttttattgtgaaactgataaatctggtaatattttttacacttgggataaagtttttggtatgccagaaactacgaacgttcaacaatctattttagaaggtggaaattcatttgaaatagaattacctggtattttttcagcattactgttaggagctatgtattcatatcgaatggattttaaaaaaacaaattctgtaatagagtttgaagtggatatttcatataatcatgcccttacgaaaaaaaataaatacgtgaaaataaaagaaatcattcctgtgacaattacttttaataatatgattcagggaccatatgttttgtatgattcatttatctttaaacaattatga

SEQ ID NO: 421778 - DNA, 663 bp, Staphylococcus aureus
atgaacaaaatcgattggtctagaaattttgaatggtttgtaaatatcggaggtacaatatcctccatactagtaataatttacatgattatattaattaaatatatattgttagacaaaacaacaatattaaaagttaatgtttatgcaactttaactgaacattatcgcgaagcactaactaaaactcctgaagaaataaagaactattttcaaaataaatttccaataggtaaaacggaaataataccaaatgaatttatagccgaaaaaaaaagaaagattatggcagaaataacactaactaacccaaacaagctagcagttgtaattggctcagatgaacacgatataaaaatacttaatatttataatcgcgaaggtaataagattgaatatataaacgttaataaaagaaaagatatgcctaccaaaaatcaaacagaaatagaaaaaggtcaattaaaattaaataaaggtgattatatagcaatattaactcaagaatttggagaaaatggtgaacaagaaatagaaatagaagtagagggacataaaaaaactatatcgttatctcctcttcatatgagtcccaatccgactaattacatagaagtaaaaaataatattaaaagttatataataaaatatttaaaaaaatga

SEQ ID NO: 421779 - DNA, 1431 bp, Staphylococcus aureus
atggaaaatttattaggtttcaaactagattatcactattatgtattaaaagattataaaaatcttttaatgcaacatatcgatccaagattcataactaaattgttttctgacttatccatcataggaatttatacttcttggcatgacattgattcacttaaatgcaatagtttagatgtatttgatattgatacacctttaaagtcttttgaaagagaagatcttgcgcaatttataaatgatttttatattaactttaataattcttctaatataataggagaaaatatagatactgaatttaatagaattatattaccaccgttaatattatcaatatctaatgaaataaaatatattggtgtttcagtcaagttctacagacgatctgaatttataatagaagtatttcaaaatatcgataattcaacaccttccacaaactatgaatctttcatttattctaatttaaaaatatataaacctattaaaaaagcggataaagagttactatatgtagaatctgaatttaataatattgatgaatctatatatgaatacttatctattattgaatttaatattttcaaagtactaaaaactagtttttttaataagcactttagcatcttgtattttgataataaaatgtttaagttaaaatttgattcagatttaatagctcaatttgtaaatgcaccatatattgaagaactaggaaattcttttcatcaaacaatcacaaatatacaacattatcattatgatatattttcgcaaaaaaagattttagcagcaacaatcaataaaagtaaatataaaatttctgaatcggagtacaaaaataatcgtttgaaatatactgctatcaatattagttacttattatctgcattaataccaatacacaataaaatatttataaacgaattgaaattattacgcgcagataaatggcattttaaatccattagagacgttaatctatttagccaatttttaaacaatataaattataattatacaaatttatatacaagcaataactacagcattaatgagttatatggtaaattaaaaagttctgtgttagataaaattcctcaaactgaaattgatcatatttttgagaatatgaagattaattctattaatgaaaaaactaactcaacttatttgtatattaatttaattagcattttaacttttataatcacttgtttctctattattcaagttttagatatatttaatattaataataattttatggtatctttgcctatcattataattctattaatttggttatcctggaggttttataaatactctaagttcgttaaaatgatgaataacttaaataaatttggaatagaaaaacctccattaattgtcaaactatataactttatgttttttaattaa

SEQ ID NO: 421780 - DNA, 414 bp, Staphylococcus aureus
atgtataattcaattttgcttgcagcagatggttcaaaaaatagtatacgtgcagcccaagagttactaaattttataggtgattatacaattgtcacaatacttacggttgtagatattgaagaatcaaaaacagatgttttacatgatcaccaaggaactaatctaactcaaaaaagggaaagtaaattacaatctattaaagatttatttacagaacacaatgtgaattacaaaattaaaattgttcacggtactccaacagataaagtggttgaagtttcaaatagtggtgaatatcaagctatcattttaggtacacgtggcttaaacagttttcaaaaaatggttcttggtagtgtaagtcataaagttgctaaacgttctcaaatacctgtaattattgttaaataa

SEQ ID NO: 421781 - DNA, 1452 bp, Staphylococcus aureus
atggttgaaaaattaaaatctgaatggttcaatcagcctagaaagaatatacttgctgggatcgttgtagcactagcattaataccagaagcaattgcgttttcaattattgctggtgtggatccgatggtgggattgtatgcagcatttatcattgctactgttactgccatagtgtgtggtagacctgcaatgatttctggcgccaccggggctgtggcgcttttagtcacacctttagttaaagaacatggtgttgaatatctttttgctgctacgatattgatggggttaatacaattaattttaggaatacttaaagtcggtcgtttaatgaaatttattccccgtccagttatgattggatttgttaatgcattgggtattatgatttttatgtctcaaatagagcatatttttaatatatctatagcaacttatatatacgttattataactttactaattgtatatgttattcctagattttataaagctatacctgccccattaatagctataattgttttaacagcattgtatatgtatacaggatctgacgtaagaaccgtaggtgatttaggtaatattaagcaaactttgcctcatttcttaatccctaacattccttttaatttagaaacacttcaaattattttcccatattcattatcaatggctattgtgggtctagtagaaagcctacttacagctaaaattgtagatgatgcaacagatacacacagtagtaaaaacaaagaatcaagaggtcaagggattgctaatattattactggtttctttggcggtatgggaggttgtgccatgattggacaatcagtaatcaatgttaagtcaggtgcaaatagtagattgtctacatttacagcaggtattgtacttatgtttatgattattgttctcggtggtgtagtcgttcaaatcccgatgccaattcttgcagggataatggttatggtttctatcgggactgttgattggaattcatttaagtatataaaaaaagcacctaaaacagatgcattcgttatggttttaacggttattattgtattaataacacataacttagctatcggtgtagttgtaggtgttgttttcagtgctatattctttgcgactaaaatttctaaagttgaagttatttataaagagttaggtaagcagcatcgtttttcttttaaaggtcagatattctttgtatcaattgattctatgatggagaaaattgattttaatattgaagatagtgtcatagtgttgaattttgatcacgctcacctatgggatgattcagcagtaaatgccattgatacgattgttaggaaatttgaagagaaaaacaatattgtgtatgttgaaaaattaaacgcagatagccgaaaaattatttcagaactaagttatttaaatgaaactcatttaaattaa

SEQ ID NO: 421782 - DNA, 543 bp, Staphylococcus aureus
atgaaatatggctacattagacctgtaacaataaatgacactgttactgaacaagcaaagaaaatagaaatatatacaaaaaacattctaaaagagacgcatgctaataataaaaaaagaaacgaactaaatacattattaaattcaaaattagtttttggtgatacattgtatattacagatttgtgtattattgcagattctacaaaacacttagtagatatactagatttactttctgccaaaggaatttcactatatataattaatttaaataaaaatctcattgcagataccaatgaaaattttataaaaacattacatgagattactgattttcaaagcgacattgtaaaatttagaacacgtatggggttagagaattatacaagagaaggtaaacgtcttggtagacctaaacgtgatgataaaaatttaagagatgctatagaaatgtatatgagtaagaaatatacattagatgagataaaagaaaaaacaaatataagtagagccacattatacagacatttagataaataa

SEQ ID NO: 421783 - DNA, 609 bp, Staphylococcus aureus
atgattgttggttatgcgagagtatcatcaatcgaacaaaatttagaaagacaactcgaaaatttaaagacgtttggtgctgaaaaaatatttatagaaaaacaatctgggaaatctattgaaaatagaccaatacttcaagaagcacttaactttgtaagaatgggggatcggtttatagtagaatctattgatcgtttaggtcgtaattacgatgaagtgattcataccgttaattatttaaaagacaaagaagttcaattgatgattactagcttacctatgatgaacgaagtcattggcaatccattattagataaatttatgaaagacttaatcattcaaatattagcaatggtttcagaacaagaacgaaatgaaagtaaacgtagacaagcgcaagggattaaaattgcgaaagaaaaaggtgtgtataaaggacgccctttactatattcacctaatgctaaaaatcctcacaagagaattgtttaccatcgtgttattgagctactaaataaaggagaatctattagtaagatagccaaagacgtgggtattacacgtcaaacaatttatagaatcaaaagggaaagaacagaacattaa

SEQ ID NO: 421784 - DNA, 186 bp, Staphylococcus aureus
ttgttacaagatatagtctataaagtattgttatcgattcgagaagaaaatagcgtagattttaaaacgttggatgtgagtgaaaaaccttttctattagcacttgagagcgtagcaggggaagatttagcacaaaaaatttctaaatttcaaataactatacataaaaggctttttgttttataa

SEQ ID NO: 421785 - DNA, 780 bp, Staphylococcus aureus
atgaaaccactattcagcgaaaagataaacgaaagcttgaaaaaatatcaacctactcatgtcgaaaagggattgaaatgtgagagatgtggcagtgaatacgacttatataagttcgctcctactaaaaaacacccgaatggttacgagtataaagacggttgcaaatgtgaaatctatgaggaatataagcgaaacaaacaacggaagataaacaacatattcaatcaatcaaacgttaatccgtctttaagagatgcaacagtcaacaactataagccacaaaatgaaaaacaagtactagctaaacaaacagcaatagagtacgttcaaggcttctctacaaaagagccaaaatcattaatattgcaaggttcatacggaactggtaaaagccacctagcatacgctatcgcaaaagcagttaaagctaaagggcatacggttgcttttatgcacataccaatgttgatggatcgtatcaaagcgacatacaacaaaaatgcagtagagactacagacgagctagtcagattgctaagtgatattgatttacttgtactagatgatatgggtgtagaaaacacagagcacactttaaataaacttttcagcattgttgataacagagtaggtaaaaacaacatctttacaactaactttagtgataaagaactaaatcaaaatatgaactggcaacgtatcaattcaagaatgaaacacaatgcgagaaaagtaagagtaatcggagacgatttcagggagcgagatgcatggtaa

SEQ ID NO: 421786 - DNA, 189 bp, Staphylococcus aureus
atgcaatacattacaagataccagaaagacaatgacggcacttattccgtcgttgctactggtgttgaacttgaacaaagtcacattgacttgctagaaaacggatatccactaaaagcagaagtagaggttccggacaataaaaagttatctatagaacaacgcaaaaaaaatattcgcaatgtgtag

SEQ ID NO: 421787 - DNA, 849 bp, Staphylococcus aureus
atgaggactgaaaaagaaattttaaatttagtttctgaatttgcttatcaacgaagcaatgtaaaaattattgctctcgagggttcaagaactaatgaaaatataaaaaaagataagtttcaagattatgattttgcttttttcgtatcagatattgagtgtttcacacatgaagaaagttggttaagtttatttggagaattattgtttatacagaaaccagaagatatggaattattcccacctgatttagattatggttacagttatataatgtattttaaagatggcataaaaatggatattacattaattaatttaaaagatttaaatcgttattttagtgattctgatggtcttgtaaaaattttagttgataaagataatttagtaactcaagaaattgttccagatgactcatattattggttaaaaaaaccaacagaacgagaattttatgattgctgtaatgagttttggagtgtctcaacgtatgtagcaaagggtgtttttagaagagaaatattatttgctttagatcatttcaataatattttacgtcctgaattattaagaatgatttcttggtatattggctttaataggggttttgattttagtttaggaaagaattataagtttataaacaaatatttaactgataaagaattcaatatgtttttagctacttttgagatgaatggatatagaaagacataccaatcttttaagctttgttgtgaattatttaaatattattcaaataaagtaagttgtttaggaaattataaatatccaaattacgaaaaaaatattgagaattttattcgtaataattatgagaattaa

SEQ ID NO: 421788 - DNA, 1221 bp, Staphylococcus aureus
gtgtataagagacagaataaatccaatactaatcacaaaaatatatctaattctaagacgactcagtttaacactgttcaatcaaatgaccatattaggaaaaataatatcacacatgatattgaaactaataatactaaaaaagtaaaacaggtaaagtcaattacaaacaataaaactaatacattaaataaagaccaagtaaaattgaatgaaaatgtccaagaaaataatcaagatttagttatagatgttaaagatgataacaacaataattatcattatgatttaaatgctaacgatattttaatattgcacctaaataaaaatagagaagttggaaaagaagttaaaaatcatttttatttgctagaaaaccaaattaatgtagatgaaattctaaacaaattaatcaacttagattatctagatataaaatcgaattttgatgtttctttattttatcttaaagtcccagaattaaaagaaatattaagagaatataaactcaaattaagtggaaataagccagaattgatagaaagaatcaaaactaatatagatgaaaatgcgattaaactaccacaagtatatgttccaacttcaaaggggaataaaataattggtgaaacggaatatattttacacttttataacagtccaattatttcattaggttcagcacataaaatggcaaaagaagtattaaatatagatgataaaatagagtatatttatttttatttattacaacaaaatcaaaaatcaaataattcagatcatagaacagcaaatatcataaatagtttagtgctttactataaaaagactaataaagataaagacgttataagaaaatatactaattatgctacttatttatcagtaacacaaggtatccactcagcagctttcctatactctagtgaagaaaacattatagatagactatttatatattttaattatcatcttgaatattatgaaaacatgttatttatagacaacgttagtagacgtttatttaaaaacttattctatgaagatattaaatctttcgaagatacagataaaaacttttgtgatgaaatctgcgaattactatttgctcaaatttataataatagaaatattacattaaataaccttccaactataaactatgttttagaaaaaattaaaaaagaaaatgaaataagaatgacaaaatatgacttttag

SEQ ID NO: 421789 - DNA, 879 bp, Staphylococcus aureus
atggcctttttacttttacacaattatacggactttatcaaaaattatgatgaaaattatcagtttagaaaagaaattgaaagtaaaggatatagtcaacaagagtttgttaatactgttgaaactaactataaagcgttactcaatgagaagaataagttagaaagtagagaggaaaaacgtaaagagatttatcaatcagctaaagatgtttatctaactgaaagtgaaaaaaatcatctcattgttcagcaaatgtaccctaaatctcatcatcattttagccatgatgaaaaagcatttattgttgatgaggcacaaaaaggtaatattataaaagcaactcatgttcaatacctattcaaacaaaataacaatattcctaatgatgtattgttggaagatacttataaaaaagcaagtaaggatattttctttagtgaaagacatcttaaaagactagaaaaagatagctttgaatataacgctgagttgcaattcattaaagaaaaagagaaagaaattgaaagttataaagaacatattgatgatgatttaagaatagatataggcgatagaagctttgaaaaagtaaaaggccaaacacctaatgagaaagttcaattactcattaaacttgagaaatataataacatcgatcaagaaaaagttatcgaaaaacatattaatcaggtggatagaaataataatgacaatcatcttgaacatgaatatgaacaatctaatcacattcatttaccaaagataaatgctagtgacttccttatgtactatgcgaacgaaactgaaaagcaaaacaatattaatcatcagaaaaagaagaagaaacaagagagaaataaccaaatgagaagatag

SEQ ID NO: 421790 - DNA, 243 bp, Staphylococcus aureus
ttgttttcgatatgtttgtctgtaatttctataataattgctattgtttctcttatctcttctatacgttctagaatctatcaaaaaactaaagataataaactattaagacctcaacttttattggaagctcaaaaaaagcaagcaacagattatattggaatcgattttgaaattgaaggttatgagaagttgaaagattataatgttttacttaagttttttggttctgttgcaaagtaa

SEQ ID NO: 421791 - DNA, 492 bp, Staphylococcus aureus
gtggctacattcgaacatatcaaagcatacgatagaaaaacaataagttatgatatgttacatgtaacaccacctatgggtcccttagatgtagtaaaagaaagtacactttcagatagtgagggttgggtagatgttaacccaaccacattacagcataaaagctactctaatgtatttgcacttggtgatgcttcaaatgtacctacttcaaaaacaggcgcagctattcgtaagcaagcacctatcgtcgctaataatttattgcaagtgatgaataatcaaatgttaacgcatcattatgatggttatacttcatgccctattgttactggatataataggttaatacttgcagagtttgattataataaaaatactaaagaaacaatgccgtttaatcaggccaaagaacgtagaagtatgtatatatttaagaaagatttattacctaaaatgtattggtacggcatgctaaaaggattaatataa

SEQ ID NO: 421792 - DNA, 279 bp, Staphylococcus aureus
gtgataaaaaatacgtccaataaatatattactaaaactaaaatcttaaatcaattgggatatgaatataattcaagcaatgaacgatggttacgaagagtaatcaattcattagtatatgattatggctatcctatcgggtgcagttataaacctagtgaacgtggttattacatcattacgacagaacaagaaaagcaacaagcgatgagaagtattaagaaattagctgatggcagtatgaaacgctatgaagctttgaaacgaattaaagtgtaa

SEQ ID NO: 421793 - DNA, 399 bp, Staphylococcus aureus
atgggatatttaaaaaggattggattgtacataagtatcttggttttaatagttatggtagcaggttgtggcaaaggtaatgaaacaaaagaagattcaaaagaagaacaaatcaaaaagagctttgcgaaaacgttagatatgtatccaatcaaaaatcttgaagatttatatgacaaagaaggatatcgagatggcgaatttaaaaagggtgacaaagggatgtggactttactcacaagttttgctaaaagtaacaagccaggtgaaatagatgacgaaggtatggttttattccttaatagaaatacaaagaaggcaacaggatattattatatgagtaaagctcatgatgaatttaatggaaaagatcaacaaaaaaatatcatgttgaattaa

SEQ ID NO: 421794 - DNA, 1071 bp, Staphylococcus aureus
atgacaaaagaaaatatttgtatcgtttttggagggaaaagtgcagaacacgaagtatcgattctgacagcacaaaatgtattaaatgcaatagataaagacaaatatcatgttgatatcatttatattaccaatgatggtgattggagaaagcaaaataatattacagctgaaattaaatctactgatgagcttcatttagaaaatggagaggcgcttgagatttcacagctattgaaagaaagtagttcaggacaaccatacgatgcagtattcccattattacatggtcctaatggtgaagatggcacgattcaaggactttttgaagttttggatgtaccatatgtaggaaatggtgtattgtcagctgcaagttctatggacaaacttgtaatgaaacaattatttgaacatcgagggttaccacagttaccttatattagtttcttacgttctgaatatgaaaaatatgaacataacattttaaaattagtaaatgataaattaaattacccagtctttgttaaacctgctaacttagggtcaagtgtaggtatcagtaaatgtaataatgaagcggaacttaaagaaggtattaaagaagcattccaatttgaccgtaagcttgttatagaacaaggcgttaacgcacgtgaaattgaagtagcagttttaggaaatgactatcctgaagcgacatggccaggtgaagtcgtaaaagatgtcgcgttttacgattacaaatcaaaatataaagatggtaaggttcaattacaaattccagctgacttagacgaagatgttcaattaacgcttagaaatatggcattagaggcattcaaagcgacagattgttctggtttagtccgtgctgatttctttgtaacagaagacaaccaaatatatattaatgaaacaaatgcaatgcctggatttacggctttcagtatgtatccaaaattatgggaaaatatgggcttatcttatccagaactgattacaaaacttatcgagcttgctaaagaacgtcaccaggataaacagaaaaataaatacaaaattgactaa

SEQ ID NO: 421795 - DNA, 1359 bp, Staphylococcus aureus
atgattaatgttacattaaagcaaattcaatcatggattccttgtgaaattgaagatcaatttttaaatcaagtgataaatggagtcacaattgattcacgagcaatttctaaaaatatgttatttataccatttaaaggtgaaaatgttgacggtcatcactttgtctctaaagcattacaagatggtgctggagctgctttttatcaaagaggaacacctatagatgaaaatgtaagcgggcctattatatgggttgaagacacattaacggcattacaacaattggcacaagcttacttgagacatgtaaaccctaaagtaattgccgtcacagggtctaatggtaaaacaacgactaaagatatgattgaaagtgtattgcataccgaatttaaagttaagaaaacgcaaggtaattacaataatgaaattggtttacctttaactattttggaattagataatgatactgaaatatcaatattggagatggggatgtcaggtttccatgaaattgaatttctgtcaaacctcgctcaaccagatattgcagttataactaatattggtgagtcacatatgcaagatttaggttcgcgcgaggggattgctaaagctaaatctgaaattacaataggtctaaaagataatggtacgtttatatatgatggcgatgaaccattattgaaaccgcatgttaaagaagttgaaaatgcaaaatgtattagtatcggtgttgctactgataatgcattagtttgttctgttgatgatagagatactacaggtatttcatttacgattaataataaagaacattatgatctaccaatattaggaaagcataatatgaaaaatgcgacgattgccattgcggttggtcatgaattaggtttgacatataacacaatctatcaaaatttaaaaaatgtcagcttaactggtatgcgtatggagcaacatacattagaaaatgatattactgtgataaatgatgcctataatgcaagtcctacaagtatgagagcagctattgatacactgagtactttgacagggcgtcgcattctaattttaggagatgttttagaattaggtgaaaatagcaaagaaatgcatatcggtgtaggtaattatttagaagaaaagcatatagatgtgttgtatacgtttggtaatgaagcgaagtatatttatgattcgggccagcaacatgtcgaaaaagcacaacacttcaattctaaagacgatatgatagaagttttaacaagcgatttaaaagcgcatgaccgtgtattagttaaaggatcacgtggtatgaaattagaagaagtggtaaatgctttaatttcatag

SEQ ID NO: 421796 - DNA, 1521 bp, Staphylococcus aureus
ttgcaaaattttaaagaactagggatttcggataatacggttcagtcacttgaatcaatgggatttaaagagccgacacctatccaaaaagacagtatcccttatgcgttacaaggaattgatatccttgggcaagctcaaaccggtacaggtaaaacaggagcattcggtattcctttaattgagaaagtagtagggaaacaaggggttcaatcgttgattttagcacctacaagagaattggcaatgcaggtagctgaacaattaagagaatttagccgtggacaaggtgtccaagttgttactgtattcggtggtatgcctatcgaacgccaaattaaagccttgaaaaaaggcccacaaatcgtagtcggaacacctgggcgtgttatcgaccatttaaatcgtcgcacattaaaaacggacggaattcatactttgattttagatgaagctgatgaaatgatgaatatgggattcatcgatgatatgagatttattatggataaaattccagcagtacaacgtcaaacaatgttgttctcagctacaatgcctaaagcaatccaagctttagtacaacaatttatgaaatcaccaaaaatcattaagacaatgaataatgaaatgtctgatccacaaatcgaagaattctatacaattgttaaagaattagagaaatttgatacatttacaaatttcctagatgttcatcaacctgaattagcaatcgtattcggacgtacaaaacgtcgtgttgatgaattaacaagtgctttgatttctaaaggatataaagctgaaggcttacatggtgatattacacaagcgaaacgtttagaagtattaaagaaatttaaaaatgaccaaattaatattttagtcgctactgatgtagcagcaagaggactagatatttctggtgtgagtcatgtttataactttgatatacctcaagatactgaaagctatacacaccgtattggtcgtacgggtcgtgctggtaaagaaggtatcgcggtaacatttgtaaatccaattgaaatggattacattagacaaattgaagatgctaatggtagaaaaatgagcgcacttcgtccacctcatcgtaaagaagtacttcaagcacgtgaagatgacatcaaagaaaaagttgaaaactggatgtctaaagagtcagaatcacgcttgaaacgcatttctacagagttgttaaatgaatataacgatgttgatttagttgctgcacttttacaagagttagtagaagcgaacgatgaagttgaagttcaattaacttttgaaaaaccattatctcgcaaaggccgtaacggtaaaccaagcggttctcgtaacagaaatagtaagcgtggtaatcctaaatttgacagtaagagtaaacgttcaaaaggatactcaagtaaaaagaaaagtacaaaaaaattcgaccgtaaagagaagagcagcggtggaagcagacctatgaaaggtcgcacatttgctgaccatcaaaaataa

SEQ ID NO: 421797 - DNA, 696 bp, Staphylococcus aureus
atgcaatctaaaatattgataattgaagatgatcacgcaatcacacatttacttgatgttgcattaactttagattattacaatgtaactacagccgacaatgccacacaagcacactttaaaattcaaattgataaaccagatgtcattttattagatttaggtttaccagataaagatggattatgtttgatttcagaaatcaggcaacatactgacattcctatcattgtaataagtgcaagacaagaagaacaaacaattattcaagctttagataacggtgcgaatgactatatgactaaaccttttaatgttgatgagcttcgggcacgaatacgagtcatcgagagaatcgctaagtcgcatcaagaaactaacattgtatttactaacggtttgctaagcatcgactttggctccaaatctgttgttattaataatcaggaggtacatttgactccaaatgaatttagcttgttagaactattgtcaaatcataaaggaaaagtactcacttatgagatgatattaaaacgaatatatggctatgttaataagactgaaatgcctagtttaagagtgcatatgacatcattaagacaaaaactttcacaatgtcatgaggacgcaaaagatattattaaaacacatccacgcattggttatcaaatgttgcagtggaaagagaaataa

SEQ ID NO: 421798 - DNA, 1677 bp, Staphylococcus aureus
atggaaataattttgtttctaacaatgatggttatgattacgtatgtttttagtggatatctatatcgcgtagcattggtgcaatcgtcaagagtagatttaatatttactagatttgaaaatatgtgttttaaaattatcggcacagatttagaacacatgtcagctaaaacatatgtcaaacattttctggcatttaatggatttatggggtttataacatttgtattgctaatagttcagcaatggctttttttaaatccaaatcataatttaaaccaatcgatagatttagcgtttaatacagcaatatcttttttaacaaatagtaatttacaacactataacggtgaatcagatgtgacatatttaacgcaaatgattgtaatgacatatttaatgtttacatctagtgcatcaggttacgccgtttgtatagcgatgttgagacgtttaactggattaactaatatcattggtaatttttatcaagatattgttcggtttattgtccgagtagttttaccattatcatgtttaattagtattttattgatgactcaaggtgtaccacaaacgttgcatgctaatttaatgattcggactttaagcggacatattcaacatattgcatttggacctattgcatcacttgaatcaataaaacatcttggtacgaatggtggaggatttttagcaggaaattctgcaacaccttttgaaaatccaaatatttggagcaattttatagaaatgggcagtatgatgttacttcctatgtcaatgttgttcttatttggtcgcatgttaagtagacatggtaaacgagtacatcgtcatgcgttgatattatttgtcgcaatgtttttcatttttatagcaattcttacattaactatgtggagtgagtatcgtggtaatccaatactagcgaatttaggcatttatggaccgaatatggaaggtaaagaggtacggtttggagcaggcttgtcagcactatttacagttattacgacggcatttacaacgggttctgttaataacatgcatgatagcttaacgcctttaggtggattaggaccaatggtattaatgatgctaaatgttgtatttggtggcgaaggcgtaggactcatgaatttattgatatatgtcttactgacggtgtttatatgcagtttgatggttggtaaaacaccagaatatttaaatatgccaattggcgcccgtgaaatgaaatgtattgtcttagtctttctcatacatccaattttaattttagtattttcagcacttgcttttatgattcctggagcaagtgaaagtataacgaatccgtcttttcatggtatttcgcaagttatgtatgaaatgacatcagctgctgcgaacaatggatcagggtttgaaggactgaaagatgatacaacattctggaatatctctacaggaatcattatgttgctttctcgttatataccaattattttgcaattaatgattgcatcaagtttagtgaataaaaaatcataccaccaagataaatatacaatagcgattgataaaccttattttggcgtatcactaatcgtatttatcgttttactaagtggtttgacatttattccagtactattacttggtcctattggtgaatttttaactttaaaataa

SEQ ID NO: 421799 - DNA, 2028 bp, Staphylococcus aureus
atgcatcatgtaaataaatatttcaatcaaacaatggtgatagaagctttgaaaatgagtttttataagctgaatcctaaacaattaataaaaaatccgataatgtttgtcgttgaggttggaatgattttaacgttgatattaatatgttttcctgacatatttggaactagttatctatcgcgaggttatttgattacaatttttatcatattattaataactatattgtttgctaatttttcagaagcctttgctgaaggtcgtggaaaagcgcaagctgatagtttaagacaagcacaatcaaatttaactgctcgattgatagaagaaaatggtgcgtatcggatagtgaacgccacagagttaaaagccggacaaaatattcgggtagaaaatggagaaacaatccctgttgatggcgttgtaataaatggattagcaaccgttgatgaatctgcaattactggtgagtctgcacctgtgataaaagaatcaggtggcgattttgatggagtcattggcggtacacttgtaacatctgattggttagaaatacgtgttgagagtgaagcgggtacatcttttttagataaaatgattgccttagttgaaggggcggaaagaaataaaacaccaaatgaaattgcactttttacattattaacaacgttaacaattatatttttagtcgttattgtaacgttatatccaatagcatcttacctgcatttaattttacctattgcgatgctcattgcgttaacagtatgtttaataccaacgacaatcggtggtttgttatcggcgattggtattgcaggcatggatcgtgttactcaattcaatgtattagcgaaaagtgggcgtgctgtagaagtatgtggagatgtcgatgtaatgattttagacaagacaggcacaatcacttatggcaatcgaatcgctagtgaatttttaccagtgaatcaacaaatgctggaaaaattgatagtcgctgcttatatgtcatcaatctacgatgatacgccagaaggaaaaagtattgtacgattagcgaagcagatgtatatatatgagctgcctaaagacattgatggcacatataagacttttacagctgaaactagaatgagcggaatcattacaaatgaaatatcggtattcaaaggtgcacctaatagtatgataaatcttgtcaaacaacaacaaggcaatattcctcttaatattgagtctctctgtatggatgtatcgagtaaaggtggcacaccattaatagtcattgaaaacaatgtcatgcttggcgtgatttatttaaaagatgtgattaaagatggtcttgtagaacgatttactgaattgagaaaaatggggattgaaacagttatgtgtacaggtgataatgctttaacagcagctacaattgcaaaagaagccggggttgatagatttgttgcagagtgtaaacccgaagataaaattaaagtcatcaaagatgaacaagcgaaaggccatattgttgcgatgacaggagatggtacaaatgatgcacctgcgctagcacaagcgaatataggattagctatgaactcagggacaattagtgctaaagaggcagctaatctaattgatttagattcgaatcctacaaagttaatagaggttgtaaaaataggcaaacaattattaatgacgagaggtgcattaacgacatttagtttggctaatgacgtagcaaaatactttgcaattttacctgcactaatgatgtcaacaattccagaaatgacttcactaaatattatgcatttatcgtcacctaaatctgcaattatatcagctttgatattcaatgcattaatcattgttgccttaattccaattgccatgaaaggtgtaaaagtaaagggttacagcattgatagaatttttataaataatatgttgatttatggattaggtggattaatcgtcccgtttttaggcattaaattaatagatatgattgtacaattttttgtgtaa

SEQ ID NO: 421800 - DNA, 561 bp, Staphylococcus aureus
atgaatacgataagaaatagtatttgtttaacgataataactatggtattatgtggatttttattcccgttagctatcacgttaattggtcaaatatttttttatcaacaagcaaacggcagtttaattacgtatgacaatcgtatagtaggatcaaaattgattggacagcactggacagagacacgatattttcacgggagaccgagtgcagttgattataatatgaatcctgaaaaattatataaaaacggcgtatcatcaggtggaagtaatgaatcgaatggaaacaccgaattaatagcacgcatgaaacatcatgttaaatttgggaattcaaatgtaacaatagatgctgcaacaagttctgggtcgggcttagatccgcatattacggttgaaaatgcattgaagcaagcacctcgtattgctgatgctcgtcatatatctacttcaagagtggccgacttgattcaacatcgtaagcagcgtggtgtgttaacaaatgattatgtgaatgtgcttgaactaaatattgctcttgataagatgaaagattga

SEQ ID NO: 421801 - DNA, 741 bp, Staphylococcus aureus
atgtttgataataaagaatatagctatacattcgtagatgctcaaggacatacgcattatttttataactgttatccaaaaaatgcaaatgccaatggaagcggccaaacatatgtgaatccagcaacagcaggagataacaatgactacacagcgagtcaaagccaacagcatattaatcaatatggctatcaatcaaatgtaggtccagacgcgagctattattcacatagtaacaacaaccaagcgtataacagccatgatggtaatggaaaggtcaattcccctaatggcacgtctaatcaaaatggcggatcagcaagtaaagcgacagctagtggtcatgcgaaagacgcaagctggttaacaagtcgtaaacaactacaaccatatggacaatatcacggtggtggtgcgcattacggtgtcgactatgcaatgcctgaaaattcaccagtttactcattaactgatggtacagtagtacaagcaggttggagtaactatggtggtggtaatcaagtaacgattaaagaagcgaacagtaataactaccaatggtatatgcataataatcgtttaactgtttcagctggtgataaagtcaaagctggtgaccaaattgcatattcaggtagtacgggtaattcaacagcacctcacgtacacttccaacgtatgtctggtggcatcggtaatcaatatgcagtagacccaacgtcatacttgcaaagtagataa

SEQ ID NO: 421802 - DNA, 1134 bp, Staphylococcus aureus
atgaaaaagatattttattgctttctattgatattttctattttaatgctatttggaggaataaatgaagttactcaaaataaattgacttttatagatatttttatgtttgctatttttatatctcttattgtatttagtatagttaaattgtttaagcataatcatttagattataaaagcaataaatccaatactaatcacaaaaatatatctaattctaagacgactcagtttaacactgttcaatcaattgaccatattagaaaaaataatatcacacatgatattgaaactaataatactaaaaaagtaaaacaggtaaagtcaattacaaacaataaaactaatacattaaataaagaccaagtaaaattgaatgaaaatgtccaagaaaataatcaagatttagttatagatgttaaagatgataacaacaataattatcattatgatttaaatgctaacgatattttaatattgcacctaaataaaaatagagaagttggaaaagaagttaaaaatcatttttatttgctagaaaaccaaattaatgtagatgaaattctaaacaaattaatcaacttagattatctagatataaaatcgaattttgatgtttctttattttatcttaaagtcccagaattaaaagaaatattaagagaatataaactcaaattaagtggaaataagccagaattgatagaaagaatcaaaactaatatagatgaaaatgcgattaaactaccacaagtatatgttccaacttcaaaggggaataaaataattggtgaaacggaatatattttacacttttataacagtccaattatttcattaggttcagcacataaaatggcaaaagaagtattaaatatagatgataaaatagagtatatttatttttatttattacaacaaaatcaaaaatcaaataattcagatcatagaacagcaaatatcataaatagtttagtgctttactataaaaagactaataaagataaagacgttataagaaaatatactaattatgctacttatttatcagtaacacaaggtatccactcagcagctttcctatactctactgactgtctcgtatacacatctgacgctgccgacgaatag

SEQ ID NO: 421803 - DNA, 312 bp, Staphylococcus aureus
atggaatatgcagcttctgtttgtcctttcggtatagaaataataccgccacgaataatttccgaagcatacgcacctacatttaatgatagtctgtcatacttggattataaaaaacaaaaacctaatgctaagatcaaagcaatcaaaggtaatgctgaacaaagtagatctgcatttgcattttctaaaaaagcagatgatgaaacagttcaaaaattcaatgatggcttgaaaaaaatcgaggaaaacggtgaattagctaaaataggtaagaaatggtttggtcaagatgtttctaaatctaaatag

SEQ ID NO: 421804 - DNA, 462 bp, Staphylococcus aureus
atgttactcgcagatatggaagatgagtatatttcagaactaacgacatatactcaatttgatttgttacgcggttcttcaattgaagacattgcgaatacttttgtaaataatatactcaaaaatattttccagcatattcatgataatttagagttttatcatactattttacaattggaacgcacgagtcaattagaattgaaaatcaacgaacatattaaaaataatatgcaacgttatattagtatcaatcattctatcggaggcattccagagatgtatttttacagttacgtttccggagcaacaatttcaattattaaatactgggtaatggacaaacagcccatttcagttgatgaattagctaaacatgtgcataatattatttttaatggtccattaagaataatggcagaaaaccgtttgcataaatcaaaccttgattcactaacttaa

SEQ ID NO: 421805 - DNA, 2529 bp, Staphylococcus aureus
atggatataaataaaatgacatatgctgttcaaagtgctttacaacaagcagttgaactgagtcagcaacataaattacaaaatatagaaattgaggcaattttaagcgctgccttaaatgaaagtgaaagcttatataaaagtattttagaacgagcaaatattgaggtagatcaattaaacaaagcttatgaagacaaactaaacacgtatgcatctgtagaaggtgacaatatacaatatggtcaatatattagccaacaagcaaaccaattgataactaaggctgaatcatacatgaaagaatatgaagatgaatatatttcaatggagcatattttacgttcggcaatggacattgatcaaacaacaaaacattatataaataataaagtagaagttatcaaagaaattattaaaaaagtaagagggggaaatcacgtgacatcacaaaatccagaagttaattacgaagcattagctaaatatggccgcgacttagtagaagaagttagacaaggtaaaatggatcctgttataggaagagatgaagaaattcgaaatacgattcgtattttaagtcgtaaaactaaaaacaaccctgtgctcattggtgaaccaggtgttggtaaaactgcaattgttgaaggattagcgcaacgtatagttaagaaagatgtgccagaatcattattagataaaactgtttttgagttagatttaagcgcattagtagcgggcgctaaatatcgtggtgaatttgaagagagattaaaagcagtcctaaaagaagttaaagagtctgatggtagaattatattatttattgatgaaatccatatgcttgtaggtgctggtaaaacagatggtgccatggatgcaggcaacatgctaaaaccaatgttagcacgaggagagttacattgtattggtgcaacaactttaaatgaatatcgagaatatattgaaaaagattcggcattagagcgtcgtttccaaaaagtagcagttagtgagcctgatgttgaagatacaatttcaattttacgtggtttaaaagaacgatatgaagtgtatcatggtgtgcgtattcaagatagagccttagttgctgccgctgaattgtctgatcgttacatcactgatcgttttttaccagataaagcgattgatttagttgaccaagcatgtgcaacaattcgtacggaaatgggatcaaatccaactgaattggatcaagttaatagacgtgtcatgcaattagaaattgaagaaagcgcacttaaaaatgaatctgacaatgcgagcaaacagagattacaagaactacaagaagagcttgccaatgaaaaagagaaacaagcagcacttcaatctcgtgtagaatcagaaaaagaaaaaatagcaaatttacaagaaaaacgtgcgcaactagatgaaagtagacaagcgttggaagatgcacaaacaaataacaatttagaaaaagctgctgaactacaatatggaacaattcctcaattggaaaaagaacttagagaattagaggataatttccaagatgagcaaggtgaagatacagatcgaatgattcgtgaagttgtaacagacgaagaaattggcgatattgtcagccaatggacaggcataccagtttcaaaattagttgaaacagaacgtgaaaaattacttcacttaagtgacatcttgcataaacgtgttgtaggtcaagataaagcggttgacctggtttcagatgcagtagttagagcaagagcaggtattaaagatccaaacagacctattggtagtttcttattcctaggtccaactggagtaggtaaaactgaattagctaaatcattagctgcatcattatttgattctgaaaaacatatgattcgtattgatatgagtgaatatatggaaaaacatgcagtatcaagattgataggggcacctccaggatatattggacatgatgaagggggtcaattaactgaagcggttcgtcgtaatccatactcagttattttattagatgaggttgaaaaagcgcatactgacgtctttaatgtattattgcaaattttagatgaaggccgtttaactgattctaaaggacgtagcgttgattttaaaaatactattattattatgacaagtaatattggatctcaagttttattagaaaacgtaaaagagactggtgaaattacagaatcaacagaaaaagctgttatgacaagtttaaatgcatatttcaaaccagaaattttgaatcgtatggatgatatcgtattatttaaaccattatctattgatgacatgagtatgattgtagataaaatcttaacgcaattaaatataagattattagaacaacgaatctcaattgaagtttctgatgatgctaaagcttggctaggtcaagaagcttatgaacctcaatacggtgcaagaccattaaaacgttttgtacaacgccaaattgaaacaccattagcactgtctcttatacacatctga

SEQ ID NO: 421806 - DNA, 2850 bp, Staphylococcus aureus
atgtgtataagagacagatattgtactttacaagaaataaattttgatggcgataacaagaaggttagagatgctaaagaaagtttattaaaatatttaattagaatgtcaacacgtccaactccatttggattattaagtggtattaatttggggcattttgtaaatgaaccaacacgtcttaaagttggaaatagtattcaaaaatatgtgaaagtcgatggcgaatggttgtataaactggttagttatattgagagtattgatgaatattatcaaaatttgaaagttatttggaatagtaaagcacatattatcaatgatcgaatatatttaaatgaacaaagtgctatttatttaaacaacaataaagatacatctttttccattaaaaatagcgaattactcgtattcatcaaaaccactgtgacgaataataatattactttttcaaatttagctgaaaagataaatcaagaatttgaaattaatgatattactaaagtgaaagtatatatccataatcttgtctcaaaggaaattatatattcaacaatcagaccaccgttatcatatagcgataatttaaattatattttaaataaactttctttacataatgatgattttgtgaaaaaaattagagaaatccagaaattgatattagcttatgaaaaaactgaaattggatttggcgaggaattatataaagacattattcatcatatgaaggcactattcaaatgtaaaaactatcttcaaattgataccaaaattgacatgattaacaattatttacatcaagatatagcaacaaatatatctgaagcagcgtacttattgtggcttttatcaagaaataatattggattcacagatttgaaagttcttcacaaccgttttattgaaaagtatggatttgaacaactcgtgaatattaaagatttgatttcagatataacaggtttcgggacaacaatttttcaagaagaagaaaccgatggaaataatattgtaatgcttaagcaaaaatttttacatgccttgagaaataacgatgagatagtcataaatgaaaaagatgtagagtcattgattaacgataatgaaatcaatcattatcatgcgccaatgagtgcagatgtttatgctgaactttatttaggacgtttttacaatcagtacaatgagctcattgttattagtcctttaacggcgtcttttaatgctggcgctacatttgggcgatttcatcatttaattgatactgaaactttagcaaaattagaacatgaaaaaggacattattatcagaagatgatatgtgatgacaatgtagaaatgatttctataaataacataccgaaatatccgagaaatcataatgtattaactaatcatgactcatacgaatattcattgaatttaggaagtagtaatagttattcaaagtatgagcttaccttagatgatatttatgttggtgctacctttaacaaattatatttatattctagccaactaaataaaagggtactatttgaatcaaacaatatgtataactttttaaaagaatgtaatttatatcgattgttacgagaaatttcaatggaatctgtgaaatgcattgaacctatgaatgatgtgagtattgattcatttagttattcaccacgaatcagatataaaaatgtcattcttaaaccagcatattggaaaattaacgagatggtattacctttacctaaaaatgaagaatgggatcaacaatttttgaaatatcaagaacaattcaatatacctaatatcgtgaatttagtttatggagataacaagcttctactaaatttatcattagctaatcatagatatttattgatgaaagaatataagaagcataaacgtgtacgtttagtagaatcatttttacctcaatcaaagaatgatcatgtgtatgaaattgttacaccaatttataaaaaatcatcttatcgtggacccgaaatcgaaattccaaaatataaaaatacagatattgaatatgacaaagactggtttgcattacatattcatatcgataagccatcgcaagatacatttatcatcgacaatttgtatccatttgtaaaacatcttaaagataagggagatatagatcaatattttttaatgcgttatatcaaacaaggtgacattttaaagttgaggttattcaggaatgacgaaaattacgcagaaatatacagcatcttgaagaattggttaccacatgttcgacaaacgacagaagtttcagattatgaatttgtatcatacgagccagaattttttagatatggtggaaagaacacgattaatgaaatagaagccttctttgaatatgacacgaatttagctgtcaatattattgaaaatgattttaagtttgatcgaccatatattgttgctatttcaataatgtatttatttgagatgttttcaatttctaatgaagagcgtatggaaattgttaataactatgtacctacatcatttaaaagtaaagatattagaccttttaaaaatgaacttgtaactatatgtaatcctgctaataattttgaatatatggctaaacactatagtggtatttatcgaattttaaaagatggcaaccaaattttgagcaaattaaatgaagggcttaaaaaaactttaactactaaaaggtcaaggattattggcagcttaattcatatgcgctgcaatcgaatatttggcattgataaggatcaagaaacatttgttttatctattgtaaaagaaattgttaaaactcaaaagcattggtgtggtgacaaaaatgattga

SEQ ID NO: 421807 - DNA, 1908 bp, Staphylococcus aureus
gtgattgatggtgtctctgaacgtggtggacatccagtttatcgtaagccgatgaaacaatgggtacttaaaatcacagaatatgcagatcaattattagcagatttagatgatttagattggcctgaatctttaaaagatatgcagcgcaattggattggacgttctgaaggggccaaagtttcatttgatgtagataatacggaaggaaaagtagaagtatttacgactagaccagatacaatctatggtgcatcattcttagtcttaagtcctgaacatgcattagttaattcaattacaactgatgaatataaagaaaaagtaaaagcttatcaaacagaagcttctaaaaagtcggatttagaacgtacagatttagcaaaagataaatcaggtgtgtttactggtgcatatgcaattaatcctttatctggtgaaaaagtacaaatttggattgctgattatgtattatcaacatatggtactggagcaattatggcagtaccagcgcatgatgacagagattatgaatttgctaaaaagtttgatttgccaatcattgaagtcatcgaaggtggaaatgttgaagaagcagcatacactggtgaaggtaaacatattaattctggtgaacttgatggtttagaaaatgaagcggcaattactaaagctattcaattattagagcaaaaaggtgctggcgaaaagaaagttaattacaaattaagagattggttattcagtcgtcagcgttattggggcgaaccaattcctgtcattcattgggaagatggaacaatgacaactgttcctgaagaagagctaccattgttgttacctgaaacagatgaaatcaagccatcagggactggtgagtctccactagctaatattgattcatttgtaaatgttgtagatgaaaaaacaggtatgaaaggacgtcgtgaaacaaatacaatgccacaatgggcaggtagttgttggtattatttacgttacatcgatcctaaaaatgaaaatatgttagcagatcctgaaaaattaaaacattggttacctgttgatttatatatcggtggagtagaacatgcggttcttcacttattatatgcaagattttggcataaagtcctttatgatttgggtatcgtacctactaaagaacctttccaaaaattatttaaccaaggtatgattttaggagaaggtaatgagaagatgagtaaatctaaaggaaatgtaatcaatcctgatgatatagtacagtctcatggtgcagatactttacgtctttacgaaatgtttatgggacctttagatgctgcaattgcatggagtgaaaaaggattagatgggtctcgtcgattcttagatcgcgtatggcgtttaatggtaaatgaagatgggacattgagttcaaaaattgtaactacaaataataaatctttagataaagtttataaccaaactgttaaaaaggtaacagaagactttgaaacattaggatttaatactgctattagtcaattaatggtatttattaatgagtgttataaagttgatgaagtttataaaccttacattgaaggcttcgttaaaatgttagcacctattgcaccacatatcggtgaagaattatggtcaaaattaggacatgaagagtctattacgtaccaaccttggccaacttatgacgaagcactacttgtagatgatgaagtagaaatcgttgttcaagtgaatggtaaattgagagctaaaattaaaattgctaaagatacatcaaaagaagaaatgcaagaaattgccttatctaatgacaatgttaaagcgagtattgaaggtaaagacatcatgaaagtcatcgctgttcctcaaaaattagtcaatattgtagctaaataa

SEQ ID NO: 421808 - DNA, 1728 bp, Staphylococcus aureus; identical to SEQ ID NO: 406100

SEQ ID NO: 421809 - DNA, 198 bp, Staphylococcus aureus
atgcgtaggttattatattcatttcttttttatatgatcataggtttatttagtggctttttctatagagagctaacaaaagcatatgattttactggtacaacacaattatcacttgtacacacacatacacttattttaggtatgtttatgttctgtctcttatacacatctccgagcccacgagaccgaggctga

SEQ ID NO: 421810 - DNA, 1278 bp, Staphylococcus aureus
atgaatatatttaaaaataaattattatggattgcaccaatagcaactatgattatcttggtaatcttttctttagctttttatcctgcatataatcctaaaccaaaagatttaccaattggtatattaaacgaggataaaggtacaacgattcaagataaaaatgttaacattggtaaaaaattagaggataaattattagatagtgattctaataaaattaaatgggttaaggttgatagtgaaaaagaccttgaaaaagatttgaaagatcaaaaaatctttggagtagctattattgataaagacttttcaaaagatgctatgagtaaaacacaaaaagtagttatggatagtaaaaaagaagaaatgcaacaaaaagttgcttcaggtgaaattccgccacaagtggttcaacaaatgaaacaaaaaatggggaatcaacaagtagaggttaagcaggctaaatttaaaacgattgtaagtgaaggatcaagcttacaaggttcacaaattgcatcatctgtgttaactggtatgggtgataatattaatgctcaaattacgaagcaaagtttggaaacattaacgagtcaaaatgttaaagtcaatgccgcggacatcaatggtttgacgaatccagtaaaagtggataatgaaaaacttaataaagttaaagatcaccaagcaggtggtaatgcaccattcctaatgtttatgccaatttggataggttcaatcgtaacgtctatcttattgttctttgcatttagaactagtaacaatatcgtcgtgcaacatcgtatcattgcttcaattggacagatgatatttgcagttgttgcagcatttgcaggtagctttgtttatatttatttcatgcaaggcgttcaaggatttgattttgaccatccaaatcgtatcgcaatttttgtagcatttgcgattcttggtttcgtgggccttattttaggtgttatggtatggctaggtatgaagtcagttccaattttcttcattttaatgttctttagtatgcaacttgtaacgttacctaaacaaatgttgcctgaaagttatcaaaaatatgtatatgattggaatccattcacacactatgcaacaagtgtaagagaactattatacttgaatcatcatattgaattaaatagtacaatgtggatgtttatagggtttatgatttttggcgctgtatcaagtttagtttcagctattgttagaaaacatagcacaaaacgtactgaagtgccgtcataa

SEQ ID NO: 421811 - DNA, 333 bp, Staphylococcus aureus
gtggcaacactaaaagatgtaaagactggtaaaaaggaaattttgccatcaactgcaaaagataaaaatggtaaaaatgttacgttaatttattttgaaaaagacggtaaattaggtttttatgtgcagaaaacacaaaaagaacgtggagtagggaaatgcgtttctggtatagcgggtggcgcagtgacaggaggcactactttaggtcttgcaggtgcaggagtaggaacagttactattccagtaattgggacagttagtggaggcgtagttggagctgttggtggtgctgtcggcgggggtctaaccggtggagccacattctgctaa

SEQ ID NO: 421812 - DNA, 495 bp, Staphylococcus aureus
gtgcaacaaattgcagatttagctgatgttaaccgtagtacattttatacgcattattatgataaatatgatttgcttgaaaaattagaggaccagcagttggaggaaataagagacttcattcatgatgagaagttaaatggagcagttaagttatccacggataacatacatcaaattatgaccgttttaatagaaatgatagaaaaagacatcgcattttatcaattgatgtttcgtatgggtaaagattcaaatatccacgaaaaactttatgatttaattatgtgtcatttacaacgttataaaaatgaaaatgatcaaattaatggtataccattttcctatttcatgagttatgtttcaggtgcgggattgtctttgataagacattgggtagaagatccaaaccgtatagacaaagttgacttaataatgcattttaatacgattgtcaatcaagggccagcaacgataattaaaaatatacaataa

SEQ ID NO: 421813 - DNA, 450 bp, Staphylococcus aureus
atgacagcattattcccttatatcgcttttgaaaattcaaaagaagcccttgcatattacgaagaagtatttggtgcaactgacgttaaacgtttagaagttagcgaagaacaagcgtcacattttggtatgactaaggaagaagcgcaagaagcaactatgcatgctgaatttgaagtgcttggcgtaaaagtgctatgttctgattcttttggtcgcgctgacaaaattaataatggcatatcattattaattgattatgatgttaacaataaggaagatgctgataaagttgaagcattctatgagcaaattaaagatcattcttcaattgaaatagaattaccgtttgctgaccaattctggggtggcaaaatgggcgtctttaccgataaatacggtgttcgttggatgttacatggtcaagactatactgcaatccaacaataa

SEQ ID NO: 421814 - DNA, 621 bp, Staphylococcus aureus
atgattacactgacagatgacggctatactatatttgatttagaaaataatggtatttctttaaataaatcaaaaaaacgtaaaaagatttttgaagagcacctttcagcttacggtattaaatataacgataaaactcacgaaatttttgttcaaactaactttaaaaattttaataaatcgaaacataatttattacagtgccttatatttgttaatgatatgtacttactttctaatcctaagtcacagaacatatttacagaagatgttgcaaacaaattggatgaacataacatttattatggaagagatttacctattataggaagcagtggtgttgttcataatttcgacttttttattagcgctaagaaaaatcaaaaagaaaaatttatcaatgctatttctaatcctaataattctatgattattaagtcgaaaataacggatgctatgcaagcaaaaaaaataaaaagacacaggcaaaatgagtttatttttattttaaatgactcaaaaaaagaaataaatgaacataataaaaatcttcttcatgaaaactatattagtacaatagattatagcgaattagatgaaaagataggtttattgatttaa

SEQ ID NO: 421815 - DNA, 138 bp, Staphylococcus aureus
atgagacttcaaaaagcacctctagtaacgtcaggactagtcttaggattattaggcctgggtaatctattaaaagacttatctcttactttaaacgctgtttgcggaatctttgctttcttgattttccttttttaa

SEQ ID NO: 421816 - DNA, 948 bp, Staphylococcus aureus
atgagacttcaaaaagcacctctagtaacgtcaggactagtcttaggattattaggcctgggtaatctattaaaagacttatctcttactttaaacgctgtttgcggaatctttgctttcttgatttggattcaccttttatgtactatgatcaaatattttaataatgtgaaagaacaattaaacagtcctctagtttcatcagtgttcacaacatttttcatgtctggctttttaggtactacttatttaaatacattttttagtaacataacttttatcaatagcttaataacgcctatttggattttatgccttgtgggaattatgacgcatatgattattttttcaataaaatatttaaaagatttttcacttgaaaatgtttatccttcgtggactgtactttttattggtattgctatcgcaggattgacggcacccgttagcggatattttttcataggtcaattaacagtaatatatggctttgtagctacttgtattgtcttacctatagttttcaagcgattaaaagcatttcctttgcagacgtcaatcaaaccgaacacatcgacaatttgtgcaccattttctttagtcgctgcagcatatgttatagcctttcctaaggcgaatgcttttatcgtaattatatttttaatattagctcaaatattttatttttatatcattatacaattgcctaaattactaaaagaacctttttcgcccgtattttcagctttcacattccctttagtaatctcagcaactgctttaaagaacagtttgcctgtacttatgtttccagacatttggaaaggtcttttgtttatcgaagtgttattagccactgtaatagtacttagagtctttataggatatcttcacttctttttaaaaaaggaaaatcaagaaagcaaagattccgcaaacagcgtttaa

SEQ ID NO: 421817 - DNA, 942 bp, Staphylococcus aureus
gtggaagaatttaagcaacattataagggtttaattgatgaaagtttaacgtgccaagataaagtagaattgataaaaaagtgtgagaaatacactgacgaagtgattcgtaaggacgtcttgcctgaagacattgtcgatattcacaaaaactatatattgacgttaaacttaacgcgtgaagatgtgttcaagacattagatgtcttacaagaaatcgttaaaggctttggttatagttatcgagattatcaaagattggtagataaacttcaagttcacgataaagagatagacttagcttctagcttacaacaaacaatgcttaaaacagatattccacaatttgatagtattcaaattggcgttatttcagtggcggcacaaaaagtaagtggagattattttaatttaattgaccataacgatggcacaatgagctttgctgttgcagatgtcattggaaaaggtataccagctgctttagcaatgagtatgataaagtttggcatggattcttatggacactcacaattaccgagtgatggtttaaaacgtttaaatcgtgttgttgaaaagaatattaatcaaaatatgttcgtcacaatgttttatggtttatatgaagaaatgaaccatttattgtattgtagttcagctggtcatgagcctggatatatttatcgcgctgaaaaagaggaatttgaagaaatttcagttagaggtagagtgttaggaatcagttcacaaacacgatatcaacaacaagaaattccaatataccttgatgatttaattatcattttaacggatggtgtgactgaagctagaaatagtgaaggtacctttatagataaacaaaaacttttagaatatattaaaaaacataaacatatgcacccacaagatattgttcaaattctgtctcttatacacatctga

SEQ ID NO: 421818 - DNA, 819 bp, Staphylococcus aureus
atggaaaaaattaaaattatcgtagcttcagattctataggtgaaacggcagagttagttgctagggcaggtatttcacaattcaatcctaagcaatgtaaaaatgaattattaagatatccatatattgaatcttttgaagatgttgatgaagtgattcaagttgcaaaagatacaaatgctatcattgtttatacacttattaaacctgaaatgaagcaatatatgagtgagaaagtagcagaattccaattgaagtctgtcgatatcatggggccattaatggatttattatcagcttcggttgaagaaaaaccttataatgagccaggtatcgttcatagattagatgatgcatatttcaagaaaattgatgcgatagagtttgcagttaaatatgatgatggtaaagatcctaaaggattacctaaagctgatattgttttacttggtatttcgagaacttcaaagacaccattatctcagtatttagcgcataagagttacaaagttatgaatgtaccgattgtaccagaagtgacaccgccagatggcttatatgatattgatccaaagaaatgtatcgcacttaaaataagtgaagaaaaattaaatcgcattagaaaagagcgactaaaacaattaggactaggtgacacagctcgatatgcaacagaagcacgaattcaagaagaattgaattactttgaagaaatcgtaagtgaaattggatgtcctgtcattgatgtttctcaaaaagcaatcgaagaaacagcaaacgatataatccattatattgaacaaaataaatcgaaatga

SEQ ID NO: 421819 - DNA, 498 bp, Staphylococcus aureus; identical to SEQ ID NO: 406091

SEQ ID NO: 421820 - DNA, 186 bp, Staphylococcus aureus
atgatattaaattgcgataagttttttgtagaagagttacaaaaatatggttacgacattgattataaaaagataatggatatatataaggcgtctagaaattcagaaggttttaaaaaaagacaagctaaaaaagaaagagaatctattgaattacaaaagcatattactgaattttataactaa

SEQ ID NO: 421821 - DNA, 609 bp, Staphylococcus aureus; identical to SEQ ID NO: 421177

SEQ ID NO: 421822 - DNA, 1338 bp, Staphylococcus aureus
atgaagattttaaagaaagctttagaggattatgataataaagatgttaaagagaaaaaaatcaaagctaaagatgaaactagtgaggaagttaaaaaggctagtgaagctgttgataaacataatgaaaaagaagttaaagaaaaagagctaaaagcaaaagataaaacgacagaagaagcgaataaagcaaataaatctttagatgaatatattaataaaaaagttgatgaaaaagtattaaaacttaaagatgaaacgaaagaagctaaagacaaagccaaaaaagctattgaagattataacaatattaaagcagacattaagaaacttaaagccaaagacgaagcgtcagaaaagacgattaaagcaaaagaaaaaattatagactacaataaaaaacaagcagataaaaaaatactaaaagctgaagataaagtaagtgatttaacaaaaaaaataaagaaagctttagaacaaatagataaacttgagatacaagtgaaagaattaaaagctaaagatgaagcgtcagcaaaagcgtttgaagctaaaggtaagctagatgacttcaataacacaaaaatggccacgaaaaatttagaagcatccggaaacgctagtcctttcacagatgaagcgcaggataaacttaacatttttaattcgactggaattccaacaaaagtattatcagcaaccggaaatgctacaccttttactggtatagcacaaagtgccattaatttatttaatagtacaggtataccaaccaaacatttaccagctacaggtaatgcgaaagcatttactgatgatgcaaagcatgctgtagatcgttataactggactgatattccagaaaaaagcatccatgtttcatcaaatgcagttgagcaatctaattcagcaataggtgctttgaattccatccctcgttttattagatctacaattaacgttgtgcgtaatttctttaataatgaacatgcgcaaggtggacatatagatgcgtatgctgaaggtggtaatattcaatctcattctgtaccaggtacttatacaggaattgttggagaagcaggacccgaaatatttagtgttaacagagggaatgttacgatcacgccattaaacagtagggaaaaaatgcgaggtattgaaggtgtacttcaagattacacgggcggtaaaaattcaaacgctggcgttgttgttaatattaatttgaatgacatggttgttaaagaagaagcggatgaaaacagattaattaataagatggaacaacatttaaaacgaacccttgcagaacagcaaatgataggaggtgcataa

SEQ ID NO: 421823 - DNA, 756 bp, Staphylococcus aureus
gtgactcagactcagacagtgactcagattcagatagcgactcagattcagacagtgactcagactcagatagcgattcagattcagatagcgactcagattcagacagtgactcagattcagacagtgactcagattcagatagcgactcagactcagacagcgactcagactcagacagtgactcagattcagacagtgactcagattcagatagcgactcagactcagatagcgattcagattcagacagtgactcagattcagacagcgactcagactcagacagtgactcagattcagatagcgactcagactcagatagcgattcagattcagacagtgactcagattcagatagcgactcagactcagatagcgattcagattcagacagtgactcagattcagatagcgactcagactcagacagtgactcagattcagatagcgactcagactcagatagcgattcagattcagacagtgactcagattcagacagcgactcagactcagacagtgactcagattcagatagcgactcagactcagatagcgattcagattcagacagtgactcagattcagacagcgactcagattcagacagtgactcagattcagatagcgactcagactcagatagcgattcagattcagacagtgactcagattcagatagcgactcagattcagacagtgactcagatagagattcagatgcaggaaaacacacacctgttaaaccaatga

SEQ ID NO: 421824 - DNA, 285 bp, Staphylococcus aureus
atgaaattggattgtataagcttattagacaaaagagacaagttgtttaataacaacggtaaaccagtatttatagttataaaagactttgaaaacagaatcattgaagagggtgaacttaaaacctataattcagctggtagcgatttcgatttactagaagttgagcgacaagatttcaaagtatctgatttaccgtcaaacgatgaattgtatattaaacatacacttgtagaccttaaacaacaaattaaattggatttatatttaatgaatgaatactaa

SEQ ID NO: 421825 - DNA, 207 bp, Staphylococcus aureus
atgaaaacacgttgttacgatggtaaaaaatggcaatatgaatttaagcatgaaggaaaaagataccgtaagaaaggttttagaacaaagcgtgaagctaattctgctggactagacaagttaaatgagttaagaagtggttttaatatagataactatataactcttgaagaatacttcgaaaattggattaaaacgtataaataa

SEQ ID NO: 421826 - DNA, 1170 bp, Staphylococcus aureus
gtggatgaaaaggcgtacaaaactataaatgagagaattgaaattttaaagaaaagaaatatgaatatcagaggaaatgcaactagggaaataaaaatattaaatgaaaataactattataacttgataaatggatataaacatttgtttttagattataataaaatgaatcaaagtaaccatagagaagatatatttaaaaatgggacaaaacctagtgaattatacaatgtaatgcaatatgataacaatatgagaagtatatttttgcagtatcttttatatattgaagaaaaagttaagcatgctattgttcaagctttttacgaaaaaaataatcatgaaaatcttcataaagaatttgagtatttgaaagcgaaatattacaatacctcactaacttattttattacaagagtaaataaaaaaataaaccatcaatatacatatactagtcttactaatggtaatcctgtacgtactcaatttattgatgaatctgaatatttgcccctaaatcgagaagaaaaacacaaaacttttgagtcgaatgcgacagatgctataactgatcagcaaagtaaaaaagattcgataaaatcttataaaagaaaacatggatatgttcctttatggatattaactaatattttaacattaggaaatatcagtcatttatttgtgattttaaaagatgatgtcgcttttagagcaatggatatacttggtatatcacataataataatgaaatagatatatataatatgtatagagttctggggatattaactctatatagaaatatatgtgcacataatgataggtttatttgcacttctcatggaatcaatatagatgattattttatggattttggaaaatcgttaccattttatagagatccaaataatagaaattctaaattgaaaaaatatcaaagaaaaggaagaaaaaaatgcaggtacagattgttttcattggtattttgtatttcaattttcttaaatgattctactcgaaaagaatttgtaaataaaatagaaaaagaaaatgggaaaataaacaatagaataaatacgattaatatagatgttattaaaaaagatataggattaaaattagagttatcaaaacatgttgatttaataaaatacaataacattcaataa

SEQ ID NO: 421827 - DNA, 342 bp, Staphylococcus aureus
atggataaaaagcaaataaaagacttcgtttgtgattatcataagcgaactagaagtgatgtgttgatagatgatgaaataaataccgatgaattcttttcaataggtgatgaaaattctaatgaatggatggcagacgataacattgatgatcatattgtaaagaatcacttagaaatgattgttgaccaagtagctaatgataaagagttttatattttcgattctttaatacaaggacgtagttttaaagatattagcaatgtcttagagtgttcagaacaatctgtaagattatggtatgaaaccttattagataaaattgtggaggtgatagaatga

SEQ ID NO: 421828 - DNA, 927 bp, Staphylococcus aureus
atgaaaaagttcattggatcagttttaaccacgacattaattttagggggatgttccgcgatggaaaatgaatcaaataaagacacaaacacagaaacaaaatctgtaccagaagaaatggaagcttcaaaatatgtaggccaaggcttccaaccgcctgcagaaaaagatgcgattgaatttgcgaagaagcatcgtaaagaatttgaaaaagtaggtgaacaattctttaaagataactttggactaaaagttaaagctacaaatgttgtaggtaaagatgatggtgtagaagtttatgtgcattgtgatgatcatggcattgtatttaatgcaagtctacctttgtacaaagatgccatccatcaaaaaggatcaatgcgcagtaatgacaatggtgatgatatgagtatgatggtgggtacagtgctgagtggctttgaatatcgagcgcaaaaagaaaagtatgataacttatataaattcttcaaagaaaatgaaaagaaatatcaatatacaggatttacaaaagaagcaataaacaagacgcaaaacgtcgggtatcaaaatgaatatttttatattacatatttatcaagaaatttaaaagaatatcgtaaatattacgaaccattgatacataaaaatgataaagagtttaaagaaggtatgcaacgagctagaaaagagctaaactatactgctaatacaaatactgtagcaacgttgtttagcacgaatgatgaaaggaatagaaaagaaaagataaataatgtaatagatttatccgagaaaattgaaagaacaaaagatatgccaatcaagaatactataactactcaattaggaaataaacttattggcacaaaaaaagctcgttttgatgataagaaagtagtgtcgtttggagcatttgaagatgaataa

SEQ ID NO: 421829 - DNA, 153 bp, Staphylococcus aureus
atgaatcagctgagaattttattacatgacggtagtagtttgatattacatgaagatgaattatttaacgatagaaaaaattatggcagagaacttgtattgaacaaaggatatatagttggaattaatgttgaggaggcagacgatgattaa

SEQ ID NO: 421830 - DNA, 720 bp, Staphylococcus aureus
atgaataaaaatataatcatcaaaagtattgcagcattgacgattttaacatcaataactggtgtcggcacaacaatggttgaaggtattcaacaaacagccaaagccgaaaatactgttaaacaaattacaaatacaaatgttgcaccatacagtggtgttacatggatgggcgctggaacaggatttgtagttggaaatcatacaatcattaccaataaacatgttacctatcacatgaaagtcggtgatgaaatcaaagcacatcctaatggtttttataataatggtggcggactttataaagttactaagattgtagattatcctggtaaagaagatattgcggttgtacaagttgaagaaaaatcaacgcaaccaaaaggtagaaaattcaaagatttcactagtaaatttaatatagcatcagaggctaaagaaaatgaacctatatcagtcattggttatccaaatcctaatggaaataaactacaaatgtatgaatcaactggtaaagtattatcagtgaatggaaatatagtgtcatcggatgcaattattcagcctggtagctctggttcacctatattaaatagtaaacacgaagctattggtgtaatctatgcaggtaataagccatcaggtgaaagcacaagaggatttgctgtttatttctctcctgaaattaagaaattcattgcagataatttagataaataa

SEQ ID NO: 421831 - DNA, 333 bp, Staphylococcus aureus
atgtataaaaacaatcatgcaaatcattcaaatcatttggaaaatcacgatttagacaatttttctaaaaccggctactctaatagccggttggacgcacatactgtgtgcatatctgatccaaaattaagttttgatgcaatgacgatcgttggaaatctcaaccgagacaacgctcaagccctttctaaatttatgagtgtagagccccaaataagactttgggatattcttcaaacaaagtttaaagctaaagcacttcaagaaaaagtttatattgaaggttctgttgcaaagttaaaaaataagtgtctaaccttatgtttaaaataa

SEQ ID NO: 421832 - DNA, 1197 bp, Staphylococcus aureus
atggcaaaatcatgcttgcatatacttactaataatgaatatgcgacaacgcgttgccaagatggcatagtcttattttggccaattgacggggaaatcgaactacaaaaatttcgtaaaagtaaaataattgaagatgatatatatattattaatcatctggatgtatttagtattaagaataataaaaaaacgatcatgttgtatttgagtagcgattggtttgcggaattaggctttactttctttaattaccactatacagcaaagttgattaaatcatcctataatttgaaatgtctactattaaaattgacatatcgataccttgataatcagcctcttaatgacgctgatattagaaaattacaggatattattaaaatcattgcaaaagaagcaagtatggataaaaagattgcacaaaatcaatatcgatatgcctattatggtgatttgcgtgacgagctcgaatatatttatcaaaatgtaaatcaacgattgacattaaaaagtgtcgctgataaattatttgtctcaaagtcaaatttgtcatcacaattccacttacttatgggcatgggttttaaaaaatatattgatactttgaaaattggtaaatcgattgaaattctacttactactgatagtactattagcaacataagtgaacatttaggttttagtagtagctccacttactctaaaatgtttaaaagttatatggatataacaccgaatgaatatcgtaatttatcaaaatataataaatgtttaatgctaaagccagaaccactagtaggcaaaatggtgcaagaagtaaaagaaatcatattgaattatattgaacattataaaaatcacctaactgatgttatacatattgatgaagacaaatttgaaacacctaaattgtttcaaacggttattcaaataaatacttatacagaaatgaaattagttttcttagaaggaatctttaaaaccttattgaataagaacagtcaagttgtctttttcatcatgccatcgattctaaaaagtaaaaataccatgtccgaagaagaaaaattcacaatcattaaaacaataattgaaagtgatctaaagatagcatttaatataaatgatattgaaacaacttattttgctgtctcttatacacatctgacgctgccgacgactccttacgtgtag

SEQ ID NO: 421833 - DNA, 168 bp, Staphylococcus aureus
atgaatcatattgaaataagtaaagatgtaaagataccagtattaggtttcggagtatttcaaattcctcaagaacaaacagcagaagcggttaaagaagcaattaaagcgggttatagacatattgatacagcacaaagttatttaaatgaaactgaagtaggttaa

SEQ ID NO: 421834 - DNA, 1719 bp, Staphylococcus aureus
atgaataatgataatgaaagcacagattatttaaagcaagtagaagaattcgcaaatagttatcgacaaaaaattaaagatgcttctgttcttgatgaaaatgaatttagaagaaaatacaaaactaaaccttataattacaaaaacaaaacaattgtggcggatggtggtaattcggaaggtggtgcaggagcaaaatatcaaggagcgaaacatccgaatgaaaaagttgttgctactgactcagcaatgattccttatgctgcttggcagaaatttgctagaccacgctttgataatatgattagttttaatagtaccaacgatttattaacatggttacaagatccattcatcaaagatatgccaggaaaacgcgttaacattagtgatggtgtgcccaggttagatgctttaatagacagccatgtaggttataaaaggaagttaaatagaaaagataacacatacgatactgtaccactaatcaaaattaagtcggtaaaagatacagaaattaaaaatggaaaaaaagtaaaaaagactattaacataacattagatatggatgggcgaattccaataaatgtttggacaggagattcgattgcacgttccggaaaaggaactttaattaaacttaatttagaaaatcttgatgcgttgagtaaactgattactggtgaaacaagtggtatgttagcagaatgcgtaatctttttaaatgaaagttttaacatctcagaaaatgaaaataaaaattttgcagatagaaagaaacaattatcagaaggatttaaggataagattaacttatttcaattagaagaaatggaaagaactttaattagtaaaataaacgcacttgaagaagttgcagatgaaacaatagaaagtattagtgctgttaaacacttattacctgattttgcattggatgcattaaaagaaagaattaatgagttgtttaaaggtataaaatcttttatagaaaaagtgtatgatagtatagataatgaaattttagaaattttcaaaaatatagatcacgacttcagagatggagtatctgaagaaatgatgaaacatttgaaagtagtgaaacagaatatagagcaaataaaaaatcaaaatgatatttatggtaggcaaattgcagatattagaagtattatgaagcaacaagatgcaacaattttagatggaaattatcaaattaattatagcggtgaaaatatggtgcagggtctagctttaccttctaattatttaggaagaaaaatgaaaatattaaaagaccatatcgatgatggtattaaaaaaatagcagactatgttcaaggtatatatgatgaatatgcatcgaaaattgtcgatgtaataaaatatttgattaatacaattcccaaaatacgtaagaatttaagacatgcaattgaaatgttaaatgtaaaaaagaaagaatttttgtccctgattcctaatgtaacttgtaattatattaaaactaaattagaagaattagataatactttaggcaaatgggagccttttcttaatgatttaaaagcagtgtcaccaattttagataaccatttagatgatattgttaagaacatgaagcctttgattgtacaaatgatatttgaaccatcacattatgacgatatgtttatttcaagaaaagctttaacgccagtgttctcaagcgttttataa

SEQ ID NO: 421835 - DNA, 189 bp, Staphylococcus aureus
gtgaataaaataaatgatagggacatagcagaattgagcagttattgggtttatcaagatataaatgaaaaaaaagattttaaagtaaatggaaaacggttcaaacaaatagataattataatgataatagtaatgataatatgaatggtgctgctgatattaaaacatacgagttacttaatgattag

SEQ ID NO: 421836 - DNA, 174 bp, Staphylococcus aureus
atggaatcatcgaatggtctcgattggaatcatcatcaaatggaatcgaatggaatcaacatcaaatggaatcaaatggaatcatcatcatatggaattgagtggaatcatcgtatggactcgaatgtaatcatcagagactggaatcaaatggaatcattaaatggactctaa

SEQ ID NO: 421837 - DNA, 468 bp, Staphylococcus aureus
atgaatagtattaacaaaatcgaacattttatttttgagcaatataactatatacaaaatcatttatatgttcagttggagaataaaattatggatttagttagcaataaattcccagaattcgcatctctatcttcattgataattctattagtctatgtaatttctgtagttatatctattttattattagctactttatattatgttcctatttttataacaggctttattatagacttgcttttgaataaacattataaacacaaaaatatgtggaaaaaagatgatactaaggtaaactcaaataacgttgaacgtattgagcgatattatttaatatggcaacgaaatagattaaaagcactcaagaagtattctcatacaactgcaaataataataaatctatctataaatgggttttattcccgttcattagatccataacaacttatattaataagtaa

SEQ ID NO: 421838 - DNA, 693 bp, Staphylococcus aureus
atgaaaattaataaatggataatctgggttattttattttctagtttatttggtattgcaaacaaaggtattagtattattgcttttattttatcaatagttgctttaaccaaatttgtactagttgataaaaaatccattaatactaatgcagaaaacaacaatacaaaggttcaacaaccaaaacaaactagtaataaagaatttaaacaaaatgaacgtttaaggaagaaagaagaaaaaattaaagaaaaagagcgagctagagaacaagaaaaacaaattgctattcaaagatcacatgattatttcggtgtagattttattgatgctaatgtaacaaattcaaaagctacagcttactacaataaaattaaaactgatactgaacatgtaattgatgtagttaatgctagggctactaaaaatgtcaaaaattataaacgatatggctatcatctggaaacaactgataaaggtattttaattttaacaaccgaaaacatttatttcttaactgctcaaaatggctttgctaaaacggtttaccctattaaaaatgtaaatggtataaatacaagcatggctaacctttatatcacttatggtcgaactaaacacatttataacgttgagggttggaaaagaagtgacttattcatgaaaaattatattaaatatttctacagttaa

SEQ ID NO: 421839 - DNA, 957 bp, Staphylococcus aureus
atgaatgatcaaataaagtattttcatcatgtggaacacaggaagtttcaaagtaattctagacttacactttggctatcattaataattactttgatatttactattgttgaatttgttggaggaatatataccaattcactagctttactgtcagattcatttcacatgctgagtgacgtactagcattagggttgtctatgctagccatttatttcgcaagtaagaaacctactaaaaattatacttatgggtttttaagattagagattattgttgcttttctaaatggattagctttaattataatttctcttggaataatgtatgaaggaataataagaataattaaaccccaatctgttgaaagtggaactatgatgttcatagctatacttggtttaattgtaaatattgtgttgacattaattttagttagatcactaaaaaaagaaaataatgttaatatacaaagcgcattatggcactttatgggagatttactgaattcactaggcgttataattgcagtagttttaattcactttactggatgggaaattattgatccaattattagtatagtaatttctttagttatattaaatggaggatataaaattataaagaatgcttggaagatactaatggaaagtgttccagaagggtataatactgatgaaattattggtagtatgaaagagataaatggcgttattgatattcatgaattccatttatggaatataacaactaaccacagttcattaagcgcacatgtagttttaagtgacaaacttgttgattctccatacaaaactataaatgaagtttctaatttacttaaaactaaatatggtttagaacacgtaacattacaaattgaaaatattgaattaaatcatttagaagaggattatttcaaacagtataaagataaaaaaatagaaaattaa

SEQ ID NO: 421840 - DNA, 1392 bp, Staphylococcus aureus
atgaaagtagcaatttacactagagtttcaagcgctgaacaggcaaatgaagggtattctatccacgaacaaaaaagaaagttaatttcattttgtgaagttaacgactggaatcgatacgaagtattttcagacccgggcgtttctggcggttcaatgaaaagaccatcattacaaaagttgtttgatagattagaagaattcgatttagtactagtatacaaattagacagattaacacgtaatgttagagacttactggaaatgttagaagttttcgaaaaaaacaatatagcttttaaaagcgcaacagagttatttgacacaacttccgctataggcaagttatttataacaatggttggtgcaatggcagaatgggagcgtgagacaatacgagagcgctctttaataggagctcgtgcagcagttagaagtggtaagtatattaaagttcaacctttttgttatgacttagtagatcaaaaattaaaacctaatcaatacgccgaatatattcgtttcatagtggataagttactgagcggtaagagcgctaatgaagttgttaggctgttagaaagcaagaagaaaccacctggtataacaaaatggaacaggaagacagtgcttgggtggatgagaaacccgattttgcgaggacataccaaacatggagatttactaataaagaacacgcatgagccaatcataagcgaagatgaacattcaaagatgcttgatattattgataaaaggacacataaatctaaaacaaaacataattctatatttagaggtgttatagagtgtccgcaatgtcaaaacaaactctacctatttagctcgatacaaaaacgtgctaatggaggatcttatgaagttagacgttatacttgtgcaacatgtcataaaaacaaagaagttaaagatgtttcatttaacgaaagcgagattgaaagagagttcatcaatactttactcaaaaaaggaacagataacttcatggtaaatatacctaaaccaaaagattatgatattgaaaataataaagaaaaaatattagagcaacgcacaaattatacccgcgcttggtcattaggatatatcaaagatgaagaatattttgtattaatggacgaaacagataagttattgaaagatattgaagaaaaagaaagccctcgaattaatatagaattaaatgaacaacaaattaggacagttaaaaatttattgatcaaaggctttataatggcgactgcagaaaacaaagaggaattaattacaagtaccgtcgatttaattaaaatagattttatcccccgaaggttaaataaagaaagtaatattaacacagttaaaatcaatgaaatacatttcaaatattaa

SEQ ID NO: 421841 - DNA, 207 bp, Staphylococcus aureus
ttgaaggaactggattttaaaataagaaaaatgttagtcgaaaaatatagattgtataaaggcgcgtcagataaaggtagaatcgttattaatatgaaagacgaaaagaaatatgtaattgatttaagtgaaaaattaagttttgatcgtatgtttgatgtaatggatagtaagcaaattaaaaatattgaagtgaatttgaattaa

SEQ ID NO: 421842 - DNA, 486 bp, Staphylococcus aureus
ttgattgatgaaaaaatcgaacagaattatacaggcaaaagaaaaattagaacagacgcgattaaacacattgatggtttaattacatcagacaatgatttctttgataatcaaacgccagaagatacaaagcagttttttgaatatgctaaagagtttttagaacaagaatacggtaaagataatttattatatgcaacagttcacatggacgaaaaaacaccacatatgcattatggcgttgttccaataactgatgatggtcgtttaagtgctaaagaagttgtaggtaataaaaaagctttaacagcgtttcaagatagatttaatgagcatgttaaacaacgaggatatgatttagaacgtgggcaatcaagacaagtaacaaatgctaaacatgagcaaataagtcagtataaacaaaaaacagaatatcataagcaagaatatgaacgtgagagccaaaaaacagaccatataaagtaa

SEQ ID NO: 421843 - DNA, 570 bp, Staphylococcus aureus
atgcaagagtaccaaaaatcgttaaatacgcttaaaaagcctataaatgttccgtatgagcaagaaactgaaaaagtaggtggtttatttagcaaagaaatacaagaaactggaaatgttgtaataagccaaaaagatttcaatgaatttcagaaacagataaaagctgctcaagatatttcggaagattacgagtatataaagtctggtagagccttagatgataaagataaggaaatacgagagaaagatgatttattaaataaagcagttgagcgtattgaaaacgcagacgataattttaaccaactttacgaaaatgcaaagccacttaaagagaatatagaaatagcgttaaagcttttaaaaatcttactaaaagagttagaacgagttttaggaagaaatacctttgcggaaagagttaataagttaacagaagatgaaccaaaactaaatggtttagcaggaaacttagataaaaaaatgaatccagaattatattcagaacaggaacagcaacaagaacaacaaaagaatcaaaaacgagatagaggtatgcacttatag

SEQ ID NO: 421844 - DNA, 138 bp, Staphylococcus aureus
atggaattgcatggaatcatcataaaatggaatcgaatggaatcaacatcaaatggaatcaaatggaatcatcaaatggactcgaatggaatcatcattgaatggaatcgaatggaatcaacgaatggactcgaatag

SEQ ID NO: 421845 - DNA, 144 bp, Staphylococcus aureus
atggcagaagaaataaaaaaagaaaaagatttaccaactgatatagattttagtatacaattttcagacaataaaataaatacgattaaaccaaattataacggtgaaagcacttcagaatatggtgtgtttgatcaagaataa

SEQ ID NO: 421846 - DNA, 207 bp, Staphylococcus aureus
gtgatagggtacattatagcaatgttattttgcatgagttttatagggtcgattgtaagtttgtcagtttttatagttgacttgatagttaatgaacaactatctaaaaaaggaccatcattctttttcttgttgggaataatattaaatattatagctattctgatttatccaatcggcgtagattatggagtgttaaagaaatga

SEQ ID NO: 421847 - DNA, 381 bp, Staphylococcus aureus
atgagtaatatgcaaaataacgcaacatttggcgcgtatttagaattaacaaagaaacaacaagcctatatacaaataaaggcagacactggcgcaaaagatatggatattgcagaacaaattgacgtgaaccgcgccactatatcaaggtggaaagctaacgataaatttagagaagggtttaaaggatatcaagctgagcacttgcaaaaacaagtgcccaaagctttacaaacaatgattaatttattggacgctaagagtgagcttgtgaggttccaagcttctaaagatattttagatcgtacaggttataatcctgtcgacaaacaagaaataacaatgcagagtgcggtgacgtttaatgacgatatcgattaa

SEQ ID NO: 421848 - DNA, 1266 bp, Staphylococcus aureus
atgacgatatcgattaacttatctgacttgctacctaaacacttccacccattgtggaaagtgacaaaggacaaagaagtacttaatgtcgttgcaaagggtgggcgtggctcaggtaagtcatcagatatatcaatcatcattacacaacttattatgcgttatccgatgaatgcggttgttatacgtaagacagataacacattagctacatcagtgtttgaacaaatcaagtgggcaattgaagagcaaaaggtgtcacacttattcaaagttaaagtgtcgccaatggaaataacttatatacctagagggaaccgtattatctttagaggggcacagaaccctgagcgattgaagtcgttaaaagatagtaggttccctttttctattgcgtggatagaagagttggcagaattcaaaacagaagatgaagtcacaacgattaccaactcattattacgtggagaattagacgagggattattttataagtttttctttagttacaacccacctaaacgtaaacaatcgtgggttaacaaaaaatatgaaagctcattccaagctgataacacatacgtgcatcattctacatacttgaataacccgtttatatcaaaacagtttatacaagaggctgagagtgctaaaaagcgtaacgaacaacgttatcgatgggaatatatgggcgaagcgatagggagtggtgttgtgccgtttaataatttaagaatagaagaaatatcgcaaagacaatatgacacattcgacaacataagaaatgcggtcgattttggttatgctactgatccattagcttttgtacgctggcattatgataaaaagaaacgtgttatttatgcaatggacgagtattacggtgtgcagataagtaaccgtgagtttgctaattggcttaaaaagaaaggttaccaaagcgatgaggtatttgctgatagtgctgaacctaaatcaatagctgaattaaaacaagaacacggaatcaaaaagattaaaggtgttaaaaaaggtgctgacagtgtggaattcggagagcaatggcttgatgatttagacgctattgtaattgaccctagacgtacaccaaatattgctagagagttcgagaatatagactatgaaacggacaaagacggcaatgttaagcctaaattagaagacaaagacaatcacactatagacgcaacaagatacgcactagaacgtgatatgaggcaaaacaaactaagtatattgaggtag

SEQ ID NO: 421849 - DNA, 258 bp, Staphylococcus aureus; identical to SEQ ID NO: 405387

SEQ ID NO: 421850 - DNA, 144 bp, Staphylococcus aureus
atgattggatatgcaattgttaataaaaaagacgaagtcattacgagtactaaagatttaacagaaaatgatcaattgacattaacaatgaaagatggcttagtagatgcaaaagttacgaaagtaaggtgtaataatgactaa

SEQ ID NO: 421851 - DNA, 180 bp, Staphylococcus aureus
atggtggcattactgaaatctttagaaaggagacgcctaatgattacaattagtaccatgttgcagtttggtttattccttattgcattgataggtctagtaatcaagcttattgaattaagcaataaaaaaataaccatcgctaactttggttggtttcgatggttaaatggttattaa

SEQ ID NO: 421852 - DNA, 492 bp, Staphylococcus aureus; identical to SEQ ID NO: 421791

SEQ ID NO: 421853 - DNA, 279 bp, Staphylococcus aureus; identical to SEQ ID NO: 421776

SEQ ID NO: 421854 - DNA, 399 bp, Staphylococcus aureus
atgaatgaaattaaattgaaatatgatacgcaagtttcggtggtacattatgaaagtttagactcacgttcatttaagagcttttcaatgcctaaatggagtaagttggttaataaactgtctgtgcctatagaagcaaattataagtatgcacgtggtgttgctgtatatggtgatattaaagacaatacaaatgatcatggtgaaattatcaaaaagcatcgaaacgataaaaatgtcatatatagaaatgtgattgtacttgattacgatgaaataaatgatgtaaaacaactacatgacgcaatcagctcagttttaagcagtgttgcatggtattggcacacagttactcgcacacaactgaacaagctagaatacgcttgtatatccctctaa

SEQ ID NO: 421855 - DNA, 885 bp, Staphylococcus aureus
atggcaaaatcatgcttgcatatacttactaataatgaatatgcgacaacgcgttgccaagatggcatagtcttattttggccaattgacggggaaatcgaactacaaaaatttcgtaaaagtaaaataattgaagatgatatatatattattaatcatctggatgtatttagtattaagaataataaaaaaacgatcatgttgtatttgagtagcgattggtttgcggaattaggctttactttctttaattaccactatacagcaaagttgattaaatcatcctataatttgaaatgtctactattaaaattgacatatcgataccttgataatcagcctcttaatgacgctgatattagaaaattacaggatattattaaaatcattgcaaaagaagcaagtatggataaaaagattgcacaaaatcaatatcgatatgcgtattatggtgatttgcgtgatgagctcgaatatatttatcaaaatgtaaatcaacgattgacattaaaaagtgtcgctgataaattatttgtctcaaagtcaaatttgtcatcacaattccacttacttatgggcatgggttttaaaaaatatattgatactttgaaaattggtaaatcgattgaaattctacttactactgatagtactattagcaacataagtgaacatttaggttttagtagtagctccacttactctaaaatgtttaaaagttatatggatataacaccgaatgaatatcgtaatttatcaaaatataataaatgtttaatgctaaagccagaaccactagtaggcaaaatggtgcaagaagtaaaagattattcaaataaatacttatacagaaatgaaattagttttcttagaaggaatctttaa

SEQ ID NO: 421856 - DNA, 189 bp, Staphylococcus aureus
atgcaaggtactcgagaatatttaaaaactattacagacaaacaatatcaaaagtaccctaaaacgttcttaactaacgaaagctatatgaatgattatagcgaagagattaaagcagaagtaaataaccaatatgtcgatgcgttccagcgtgcatcgcaatcaagtatagaaaatttaccgttttaa

SEQ ID NO: 421857 - DNA, 159 bp, Staphylococcus aureus
atgattaccaaagaatttttaaaaactaaacttgagtgttcagatgtgtacgctcagaaactcatagacgaggcacagggagacgaaaacaagttatatgacctatttatccaaaaacttgcagaacgtcacacacgccccgctgtcgtcgaatattaa

SEQ ID NO: 421858 - DNA, 273 bp, Staphylococcus aureus; identical to SEQ ID NO: 409460

SEQ ID NO: 421859 - DNA, 255 bp, Staphylococcus aureus; identical to SEQ ID NO: 411712

SEQ ID NO: 421860 - DNA, 207 bp, Staphylococcus aureus; identical to SEQ ID NO: 421825

SEQ ID NO: 421861 - DNA, 741 bp, Staphylococcus aureus
atgacagttaaagtagaacagcttacaggtggatatggaaaacgccctgtaattaaagatataaattttgaattaaacaaaggcgaaatcgttggacttattggccttaatggcgctggtaagagtacaacgattaaacatatgctaggattgcttacacctatggaaggatctctatcaatttcagatatcaacattaatgatgacatagaggcttatagaagaaagttatcttatattccggaatcaccggttatttatgaagaactcacattagaggaacacattgagatgacagcaatggcatatgatattgatcgtgatgaagcgatgaatcgagcaatgccattattaaagacactccgtttagaaaatgaattgaaagtttttccgagtcatttttctaaggggatgaaacaaaaagtcatgattatttgtgcgtttatcgttaatcccgaattgtatattatagacgaaccattccttggcctagatccattaggaattcaatccatgttagatttaatggttgaaaagaaaaacgaaggtagaaccgttctaatgagtacacatattttagcaacagctgaacgttattgtgatcgttttatcatactagacgaaggtgaagtcgttgtatttggagatttagaagcattgagacaacaaactggcttacataaacaaacattagacgatatatatattcatgtgacgcaaggtggagatgtacatgcataa

SEQ ID NO: 421862 - DNA, 129 bp, Staphylococcus aureus; identical to SEQ ID NO: 420824

SEQ ID NO: 421863 - DNA, 627 bp, Staphylococcus aureus
atgtttcaaattacatttaaaattttaaactggataagaccatataaagcaagaatgattttaggatttagcatgtcatttttaaatgctatttttattgcgttacctatctttttagctgcaaaaatatttaataatgtgctatctcataaacctatttatatgaaagatatattgaatgttgtaattatcatggttttattagtgattggacgatttattacagcatatttcaaaagcaaaagccatgagagcatcgcttatgaaatgagtgcgaaagaacgtttagatataggggataaattgaaaaatgtaaggttaggttattttaattcgcatcattcaaatgagttaacaacaatagtaacaacagatttaacctttttagaaaactttgctatgaaaatggtggacgttgttgttaatggatacatattaattacagtactcatattgtctctacttgtagtttcgtggcaagtatcattattagcatgcattggcgtattactatcattttttgcgattcaattattagaaagaaagagtcgacaaaatgcgccagcgtatcataatgtacaaaaccaattagtggaaaaggtattggaggttattcgtggtatttaa

SEQ ID NO: 421864 - DNA, 690 bp, Staphylococcus aureus
atgattagtgatgatgacttctctattagaaacgccttttatagagtattcacgaaagaattaaggttgagcgatgcacatcattttatttgccaagttaacaagacgaaaagcagaaaacaatgcttaaaagaattcggacaagcaaaagcagaactgctcgattggggagatatcagaggattcaaaacaaagtttctacggactttggcatctcattatctaactgaattactaacaagtcatcaattccacgaagaggctattagtaaagatggagaaagatatcgcaaatatgccgataaccctatcaaacatccattagccactaaggataaaggattttattcagttgattgtagaacggatttatctgctctggaaccaaacgaaatcgcaaagatgctattaaatgttaatgaccattcgaccaatagctttattcaacagataagacgttatatatcatctcttgaaagaccattaacaacagctcgtggtgataagaagagctatatttacgctaacttcaatccgaagtatgctcaatttgcgattacaattctaagaacttactacaacttttgtcgcccttttaaatcagcggataaaaaggttttgacacctgctcaaagattagggattacagataaacaatttgattggaaagatataatttatttcaaatga

SEQ ID NO: 421865 - DNA, 204 bp, Staphylococcus aureus
atgaaacagattgattatcgaattaaaagttatttagtaaaaaaacaacagttatatactgaattctacaatggaaaaattgaaataagcatgttagatggaaaaaaacattttattgatttgagtacatactattatgatcctagcaactttacacttgattacacaaaaataagtcattttgatatatatatggaaaaatag

SEQ ID NO: 421866 - DNA, 219 bp, Staphylococcus aureus
atgaataatcaaatgttaacgcatcattatgatggttatacttcatgccctattgttactggatataataggttaatacttgcagagtttgattataataaaaatactaaagaaacaatgccgtttaatcaggccaaagaacgtagaagtatgtatatatttaagaaagatttattacctaaaatgtattggtacggcatgctaaaaggattaatataa

SEQ ID NO: 421867 - DNA, 591 bp, Staphylococcus aureus
gtgggctcggagatgtgtataagagacagatataatgtatactctatggaatttatgaatcgttttgagatatttacgaaagatatggtagaaaaagtgccgattatttatatattcactaaaagtaagattaaagatatattgaattttgatattaatctcgttaaaaaatttattgagacagataaccttaatgaaccttctgattttaaatgggaaaaagttaataatttctcattagagttaatagatgtttacgattatacaaaggcaatagaatatttagatttagctgagtatatattgcataaattagataacaaagataatgacaaacgttttattaatttaattaataaagctcaaataatgaaaagaaaaaatatagaagttaaagaaataatatctgaattgatagaattacatagtaaattaataagtgttgataaagaattagcttatctaaatatcaacgtaatagcaggcagtaaacaggaagctgaaactagatatcaaaatttagacaaaaacaatttgaaaaactttgaagactatccgatttttaagttgtatcaagatttagttaattaa

SEQ ID NO: 421868 - DNA, 429 bp, Staphylococcus aureus
atggtaagtaagaaaaaagcattagaaatgattgatgttatagcaaatatgtttccggatgcagaatgtgaattaaaacatgataatccgttcgaattaactattgctgtattattgtcagcgcaatgtacagacgttctagtaaatagagtaacaactgagctgtttaaaaaatacaaaacgcctgaagattatttggcagtcagtgatgaagaacttatgaatgatattcgttctatcggtctgtatcgtaacaaagctaagaatattaagaaactttgtcaatctttgattgatcaatttaatggagaaataccacaaacacataaggaattagaaagtttagcaggtgtaggacgtaaaactgctaatgtagtcatgagtgtagcatttgatgaaccttcattagctgttgatacgcatgtataa

SEQ ID NO: 421869 - DNA, 288 bp, Staphylococcus aureus
ttgaaatactttaaagcccaaattaatcaaaagctttctgaaccagaaacgaaaaaaatcaatagtcaaagaaaaattgatgtagagcctgtttttggatttgtgaaggctattttgggtttcactagaatgtcagttcgaggaataaataaagttaaacgagagctaggttttgtattaatggcacttaatataaggaaaatagcagctcaacgagctgtacattataaaatacatatcaaaaaagctgatttctatcaaataattaatagaaaacagcttttttaa

SEQ ID NO: 421870 - DNA, 981 bp, Staphylococcus aureus; identical to SEQ ID NO: 405974

SEQ ID NO: 421871 - DNA, 438 bp, Staphylococcus aureus; identical to SEQ ID NO: 405973

SEQ ID NO: 421872 - DNA, 1275 bp, Staphylococcus aureus
atggaaataacaatgcctaagttaggtgagagtgttcatgaaggtaccattgaacaatggttagtttctgttggtgatcatattgatgaatatgaaccattatgtgaagttataacagataaagtgacagctgaagtcccttccacgatatcaggaacaattacagaaattttagttgaagcggggcagacagtagctattgatacaattatctgtaaaattgaaactgctgatgaaaagacaaatgaaacaactgaagagatacaagcaaaagtggatgagcatactcagaaatctactaaaaaagctagtgcaacagtagaacagacatctactgctaaacaaaatcaacctcgtaataatggtcgcttttcacctgttgtatttaaactcgcttcagagcatgacattgatttatcacaagttgtaggtagtggatttgaaggtcgtgtaactaagaaggatataatgtcagttattgaaaatggtggtaccacagttcaatctgacaaacaagttcaaacaaaatcaacatcagtagatacatcaagtaaccaatcatctgaagacaatagtgaaaacagcacaataccagtaaatggtgtgcgtaaagcaattgcgcaaaatatggttaatagtgtaacagagattccacatgcatggatgatgattgaagtagatgctacaaatcttgtgaatacgagaaatcattataaaaacagctttaaaaataaagaaggatataatctaactttctttgctttctttgtaaaagctgtagcagatgctttaaaagcatatcctttattaaatagtagctggcaaggaaatgaaattgtcttacataaagacattaatatttcaattgctgttgctgatgaaaataaattatacgtacctgtgattaagcatgcagacgaaaagtcaatcaaaggtatagctagagaaattaatactttagcaacgaaagcgcgtaataagcaattgacagctgaagatatgcagggcggtacatttacggtaaataatactggtacatttggttcagtatcatcaatgggtattataaatcatcctcaagcagcgattttacaagtagaatcaatcgttaaaaagccagtagtaattaatgatatgattgcaattcgtaacatggttaatttatgtatttcaattgatcatcgtattttagatggtttacaaacaggtaaatttatgaatcatattaaacagcgtatcgaacagtatactttagaaaatacaaatatatattag

SEQ ID NO: 421873 - DNA, 984 bp, Staphylococcus aureus
atggctaaattatcttatttagaggcgatacgccaggcacaagacttagcattacaacaaaataaagatgtgtttattcttggtgaagatgttggtaaaaaaggtggcgtatttggtactactcaaggactacaacaacaatatggtgaagacagagttatcgatacgccattagctgagtcaaatattgttggaactgccattggtgcagctatggtaggtaaaagaccaattgcagaaattcaatttgcagattttattttacctgcgacaaatcaaattattagtgaagctgcgaaaatgcgttatcgttcaaataatgattggcaatgcccattaacgattcgtgcaccatttggtggcggtgttcacggaggactatatcattcacaaagtattgaaagtatatttgcttcatcaccaggtttaacaattgttattccttccacaccgtatgatgctaaagggcttttattatcatctatcgaatcaaatgatccagtattgtactttgagcataaaaaagcttatcgtttcttaaaggaagaagtgccagaagaatattacactgtacctttaggaaaagcagatgttaaacgtgaaggtgaagatttaacagtattttgttatggattaatggtcaattattgtttacaagcagcggatattttagctgcagacggtatcaacgttgaagtcgttgatttacgaactgtttatccattagataaagaaacaattattgatcgtgctaaacatacaggtaaagttttacttgtaactgaagataatttagaaggtagtattatgtcagaagtgtcagcgattattgcagagcattgcttgttcgatttagatgcaccaatcatgcgtttagctgctccagatataccatctatgccattttctcctgtattagaaaatgaaattatgatgaatccagaaaaaatcttaaataaaatgcgtgaattagcagaattctag

SEQ ID NO: 421874 - DNA, 993 bp, Staphylococcus aureus
atgattgattataaatcattaggccttagcgaagaagacctaaaagtaatatataaatggatggatttaggtagaaaaatagatgaaagactgtggttattgaaccgtgcaggtaaaattccatttgttgtaagtggtcaaggacaagaagcaactcagattgggatggcatacgcattagaagaaggtgatattacagcgccttattatagagatctagctttcgttacttatatgggtatctcagcgtatgatacgtttttatcagcgtttggaaagaaagacgatgttaactctggtggaaaacaaatgccatcacactttagtagtagagctaagaatattttgtctcaaagttcaccggtagcaactcaaataccccatgctgttggtgctgctttagctttaaaaatggatggtaagaagaaaattgcaacagcaactgttggtgaaggtagctcaaaccaaggtgacttccatgaaggtttaaacttcgcgggtgtacacaaacttccttttgtatgtgtcattataaataataaatatgcaatttcagtacctgattcattacaatacgcagctgaaaaattatcggatagagcacttggttacggtatacatggtgaacaagtagatggtaatgatccattagcaatgtataaagcgatgaaagaagcaagagatcgagctatttctggtcaaggttcaactttgattgaagcagtaacaagtcgtatgacagctcattcatcagatgatgacgaccaatatcgtacgaaagaagagcgtgaagcgcttaaaaaagcagactgcaatgaaaagttcaaaaaagagttgctttcagctggcattatcgatgatgcttggttggcagaaatagaagcggagcataaagacatcatcaataaagcgacaaaggctgctgaagacgcgccatatccaagtgtcgaagaagcctatgcatttgtgtacgaagaagggagtcttaactaa

SEQ ID NO: 421875 - DNA, 1422 bp, Staphylococcus aureus
atgtcagagaaacaatatgatttagtcgttctcggtggaggtactgcaggatatgttgctgcgatacgtgcgtctcaattaggtaaaaaagtggcaatagtagaacgacaactattaggaggtacttgtctccataaaggttgtattcctactaaatcgctgcttaaatctgctgaagtatttcaaacagtaaaacaggcagcaatgtttggcgttgatgtcaaagatgctaatgttaattttgaaaatatgttggcacgaaaagaagacattattaatcaaatgtatcaaggtgtaaagcatttaatgcaacacaatcacattgacatttataatggcacgggacgtattctaggtacatctatattttcacctcaaagtggcacaatttctgtcgaatatgaagatggtgaatcagacttattaccaaaccaatttgtattaattgcaactggttcttcgcctgcagagttgccattcttatcatttgatcatgataaaattttatctagcgatgatatattatcattaaagacgttaccatcaagtattggtattattggtggtggtgttatcggaatggaatttgcatcattgatgatagatttaggtgttgacgtaacagttatagaagcaggtgaaagaattttaccaactgaaagtaaacaagcttcacaactattaaaaaaatcattgtcagcacgtggtgttaaattctatgagggaataaaactttctgaaaatgatataaatgttaacgaagatggtgttacgtttgaaatttcctcagacataattaaagtagataaagtgttgctatcgattggtagaaaacctaacacatcagatataggtttaaacaacactaaaataaaactttcaacatcaggacatattttaacgaacgaatttcaacaaactgaagataaacatatttatgcagctggtgattgtattggaaaattacaattggcacatgttggatcaaaagaaggtgttgtggctgtcgatcatatgtttgaagggaacccaatcccagtaaactataacatgatgcctaagtgtatttattcacaacctgaaattgcttctatcggtttaaacattgagcaggcaaaggcagagggaatgaaagttaaaagttttaaagtaccatttaaagcaattggtaaagcagtgattgatagccatgacgcaaacgaagggtatagcgaaatggtgattgatcaatcaactgaagaaattgtgggtattaatatgattggtccacatgtaacagaattgattaatgaggcatcactgttacagttcatgaatggctcggcattagaattaggactaacaacacacgcacatccttccatctctgaagtgttgatggaattaggattgaaagcagaaagtagagctattcacgtataa

SEQ ID NO: 421876 - DNA, 1680 bp, Staphylococcus aureus
atgttacaaaccttatcaatcaagcaatttgctattattgaagagttagaaattcaattttctgatggtttaactgttttaagtggtgaaacgggttcaggtaagtcaattattatagatgcaattggacaattaattggaatgagagcttcatctgattttgtaagacatggtgaaaaaaaggctgtcatcgaaggtatatttgatattgacgagagtaaagatgctatacatatattgaaaaatatggatattgatgtagatgaagattttttattagttaaacgggaaattttcagctctggtaaaagtctttgtaaaattaataatcaaacagttactttacaagatttacgaaaagttatgcaagaattattagatattcatggccaacatgaaacgcagtctttgttgaaacaaaaataccatttaacattattggataattacgcagaatcacgttatcaagatttgttggataaatatcatcaaacttttcaaaattataaagccaaaaagcaagagttagaagatttagaatcagcagaccaagcattgctgcagcgtttagatttaatgaaattccaattagaagaattgtctgaagcacatctaaaagaaggcgaaatagagcaacttgaaatagatattaaacgcattcaaaactctgaaaaattaagcttagcgcttaataacgcacatatgacattaacggatgaaaatgctatcactgatcgtttgtatgaactaagcaaccatttgttaacaataaacgatatagttccaaacaaatatgacaaattaaaagaagatattgatcaattttactacattttagaagatgcaaaacatgagttatatgatgaaatggctaatacagaattcgacgaacaagtgttaaacgagtatgaatctcgtatgaatttgctgaataatttaaaacgtaaatatggaaaagatatttcagaattaatcgcatatcaagaaaagcttaataatgaaatcaataaaattgaaaactatgaacaaagtacatcgcagttacgagaagaaataaatgcattgtataatcaagttatagaggttggacaagcgttatcaaagcagcgtcgtatagtcgctagggagttaagagaccacattgtatcggaaattcaaaacttacaaatgaaagacgcaaatcttgagatttcatttaaaaaattagaagaaccgaatattgatggaatcgaatttgtagaatttttaatcagtccaaataaaggggaaccattaaaaagtttaaataaaattgcgtcaggtggagaactttctagaattatgttagcgttaaaaagtatttttgttaaatcgagaggtcaaactgcaattttattcgatgaggttgactcaggtgtatctggacaagctgcacaaaaaatggcagagaaaatgcgagatatagctgaatatatacaagttatttgtatctctcacttaccacaagttgcatcgatgagcgaccatcatttattaatttcgaaatcatcaaaagatgatcgtacaacaacacaagttcaagagttaattagcgatgataaagtagatgaaattgcacgaatgatttcaggtgcaagtgttactgatttaactcgagaaaatgcaagagaaatgatacaacacaatcaaagacgtagataa

SEQ ID NO: 421877 - DNA, 453 bp, Staphylococcus aureus; identical to SEQ ID NO: 405967

SEQ ID NO: 421878 - DNA, 882 bp, Staphylococcus aureus
atgacgaatctaccgatgaataaattaatagatgaagtcaataatgaattatcggttgcgataaataaatcagtaatggatactcagctagaagaaagtatgttgtattcattaaatgctggaggtaaacgcatccgaccagttctgttattactcactttagattcactaaataccgagtatgagttaggtatgaagagcgcaattgcactagaaatgattcatacatattcacttattcatgatgacctaccagcgatggataatgatgattatcgacgaggaaaattaacaaatcataaagtatatggtgagtggactgcgatattagcaggtgatgctttattaactaaagcatttgaacttatttcaagtgatgatagattaactgatgaagtaaaaataaaagttctacaacggctgtcaatagcaagtggtcatgttggaatggtcggcggtcaaatgttagatatgcaaagcgaaggccaaccaattgatcttgaaactttggaaatgatacacaaaacaaaaacaggagcattattaacttttgcggttatgagtgcagcagatatcgctaatgtcgatgatgcaactaaagaacatttagaaagttatagttatcatttaggtatgatgttccagattaaagatgatttattagactgctatggtgatgaagcaaagttaggtaaaaaagtgggcagcgatcttgaaaataataaaagtacgtacgtgagtttattagggaaagatggcgcagaagataaattgacttatcatagagacgcagcagtggatgaactaacgcaaattgatgaacaattcaatacaaaacacttattagaaatcgttgatttattttatagcagggatcactaa

SEQ ID NO: 421879 - DNA, 231 bp, Staphylococcus aureus; identical to SEQ ID NO: 405965

SEQ ID NO: 421880 - DNA, 1338 bp, Staphylococcus aureus
atgtcagattatttaagtgtttcagctttaacgaaatatattaaatataaatttgatcaagatccacatctccaatctgtattgattaaaggtgagctttcaaatttcaaaaagcattcaagtggtcatttatactttaatgtgaaagataaagaaagcgttataagtgccatgatgttcaaaggtagtgcttctaaattaaatttcgaacctaaagaaggagatgaagtcttattagaagcacgtgtttctgtttttgaacgtcgtggaaactatcaaatttatgtaaataaaatgcaattagatggtatagggaacttatatcaaaaattagaagcattaaagaaaaaattaactgaagaaggttgttttgataaagcgaataagaaatcaatacctaagtttcctaaaaaaattgcagttttaacagcgagtacaggtgccgcaattcgagatatccattcaacgataaatagtcgttttccattagctgaacaaatacaaattagtactttggttcaaggtgaaaaagcaaaggacgacattattgaaaaaattgaatatgcagatagtttaggtgtagataccattattgtaggtcgaggcggtggatccatagaagatttatggaattttaacgaagaagctgtcgtccgtgcaatatataattgtaagacaccgattatatcagcagtaggtcatgaaacagactttacattaagtgattttgctgcagacatcagagctgcgactccaactcaagctgctgttattgcaacaccagaccaatatgaattgctgcaacaaatacagcaatatcagtttacattgactcgtttcatcaagaaacatttagaacaacaacgtaaacatgttgaacatttgtcatcgtattacaagtttaaacaaccaactttattgtatgatcaacagatacaacgtcgagatgatttagaaaagagactgaaacaacaaattcaggcaacttttgaacaacagagacatcgattaatgctgttgcaacaacgttataatttaaaagcattactaagtagtgttaatcaagaacaacaaaataatcttcaattgacaaaccaacttgttaaattattgaattctaagatattaagttataaaaatgatttgaaaaataaagtagaaaacttaaacaatttaagtccaactaatacaatgttgcgtggatatgcaattgttaataaaaaagacgaagtcattacgagtactaaagatttaacagaaaatgatcaattgacgttaacaatgaaagatggcttagtagatgcaaaagttacgaaagtaaggtgtaataatgactaa

SEQ ID NO: 421881 - DNA, 390 bp, Staphylococcus aureus
atgagtcgtaaagaatcccgagtgcaagcttttcaaactttatttcaattagaaatgaaggacagtgatttaacgataaatgaagcgataagctttattaaagacgataatccagatttagacttcgaatttattcattggctagtttctggcgttaaagatcacgaacctgtattagacgagacaattagtccttatttaaaagattggactattgcacgtttattaaaaacggatcgtattattttaagaatggcaacatatgaaatattacacagtgatacacctgctaaagtcgtaatgaatgaagcagttgaattaacaaaacaatttagtgatgatgatcattataaatttataaatggtgtattgagtaatataaaaaaataa

SEQ ID NO: 421882 - DNA, 363 bp, Staphylococcus aureus; identical to SEQ ID NO: 405962

SEQ ID NO: 421883 - DNA, 1356 bp, Staphylococcus aureus
atgaaaaaggttttaattgcaaaccgcggtgaaatcgcagttaggattattcgcgcttgtcgtgatttaggcatccaaactgttgcaatctattctgaaggggataaagatgcgctacatactcaaattgctgatgaagcatattgcgtaggtcccactttgtctaaagattcatatttaaatattccgaacatcttatctattgcaacttctacaggttgtgatggcgttcatccgggttatggctttttagctgaaaatgctgattttgcagaattatgcgaagcatgccaattgaagttcattggaccaagttatcaatctatccaaaaaatgggtatcaaagatgttgctaaggcagaaatgatcaaagccaatgttccagttgttcctggtagtgacggtttaatgaaagacgtctcagaagctaagaaaatcgctaagaaaattggctatccggtcatcattaaagctactgctggtggtggcggaaaaggtatccgtgttgctcgtgatgaaaaagaacttgaaactggcttccgaatgacagaacaagaagctcaaactgcatttggtaatggtggactttatatggagaaattcatcgaaaacttccgccatattgaaatccaaattgttggggacagctatggtaatgtaattcatttaggagaacgtgattgtacaattcaaagacgtatgcagaaattagtggaagaagcaccttccccaattttagatgatgaaacacgtcgtgaaatgggaaatgccgcagttcgtgcagcgaaagctgtaaattatgaaaatgcgggaacaattgagtttatatatgatttaaatgataataaattttattttatggaaatgaatacacgtattcaagtagaacatcctgtaactgaaatggtaacaggaattgatttagttaaattacaattacaggttgctatgggtgacgtgttaccgtataaacaagaagatattaaattaacaggacacgcaattgaatttagaattaatgctgaaaatccttacaagaactttatgccatcaccaggtaaaattgagcaatatcttgcaccaggtggatatggtgttcgaatagagtcagcatgttatactaattatacgataccgccatattatgattcgatggtagcgaaattaatcatacatgaaccgacacgagatgaagcgattatggctggcattcgtgcattaagtgaatttgtggttcttggtattgatacaactattccattccatattaaattattgaataacgatatatttagaagcggtaaatttaatacaaactttttagagcaaaatagcattatgaatgatgaaggttaa

SEQ ID NO: 421884 - DNA, 465 bp, Staphylococcus aureus; identical to SEQ ID NO: 405960

SEQ ID NO: 421885 - DNA, 558 bp, Staphylococcus aureus
atgatttcggttaatgattttaaaacaggtttaacaatttctgttgataacgctatttggaaagttatagacttccaacatgtaaagcctggtaaaggttcagcattcgttcgttcaaaattacgtaatttaagaactggtgcaattcaagagaaaacgtttagagctggtgaaaaagttgaaccagcaatgattgaaaatcgtcgcatgcaatatttatatgctgacggagataatcatgtatttatggataatgaaagctttgaacaaacagaactttcaagtgattacttaaaagaagaattgaattacttaaaagaaggtatggaagtacaaattcaaacatacgaaggtgaaactatcggtgttgaattacctaaaactgttgaattaacagtaactgaaacagaacctggtattaaaggtgatactgcaactggtgctactaaatcggcaactgttgaaactggttatacattaaatgtacctttatttgtaaacgaaggtgacgttttaattatcaacactggtgatggaagctacatttcaagaggataa

SEQ ID NO: 421886 - DNA, 1062 bp, Staphylococcus aureus; identical to SEQ ID NO: 405958

SEQ ID NO: 421887 - DNA, 582 bp, Staphylococcus aureus
atgaaaaaattggtttcaattgttggcgcaacattattgttagctggatgtggatcacaaaatttagcaccattagaagaaaaaacaacagatttaagagaagataatcatcaactcaaactagatattcaagaacttaatcaacaaattagtgattctaaatctaaaattaaagggcttgaaaaggataaagaaaacagtaaaaaaactgcatctaataatacgaaaattaaattgatgaatgttacatcaacatactacgacaaagttgctaaagctttgaaatcctataacgatattgagaaagatgtaagtaaaaacaaaggcgataagaatgttcaatcgaaattaaatcaaatttctaatgatattcaaagtgctcacacttcatacaaagatgctatcgatggtttatcacttagtgatgatgataaaaaaacgtctaaaaatatcgataaattaaactctgatttgaatcatgcatttgatgatattaaaaatggctatcaaaataaagataaaaaacaacttacaaaaggacaacaagcgttgtcaaaattaaacttaaatgcaaaatcatga

SEQ ID NO: 421888 - DNA, 219 bp, Staphylococcus aureus; identical to SEQ ID NO: 405956

SEQ ID NO: 421889 - DNA, 831 bp, Staphylococcus aureus
atgactgaaacttggaattttattaatacaggaagtaaagacccatattataatatggcaatggatgaagcgttattaaattttgtctctagaggtgaaattgatccagttatacgtttttacacatggaatcctgcaacattatcaatagggtatttccaaaggctacaaaaagaaattgatattgataaggttaaagagaaaggttttggtctcgtaaggcgtcaaactggtggccgtggggtgctacatgataaagagttaacttacagtgtgattgtgcctgaatcgcatccgaatatgccttctacagttacagaagcgtacagagtgatttcacaaggattattagaaggatttaaaaacttaggatttgatacttattttgcggtacctaaaacgcctgaagagcgtcaaaaattaaaacaacctcgaagttcagtgtgttttgatgcaccaagttggtatgagctagttgttgaaggccgtaagattgctgggagtgctcaaacgagacaaaagggcgtaatcctccaacacggttcgattttacaagatattgatattgatgaactgtttgatatgtttatttataaaaatgaaagattaaaattaaaaatgaaagaggcattcgttgaaaaagcagttgccatcaatgatatttcagatgaacacattactattagtcaaatggaagaagctttcgagaaaggttttaagaaaggtttaaatatagaattaaagccacttgaattaacagaagctcaattggcagaagtggaagaattaactgaaaaatatcgttcagatgaatggatgtttagaaagtag

SEQ ID NO: 421890 - DNA, 387 bp, Staphylococcus aureus; identical to SEQ ID NO: 405954

SEQ ID NO: 421891 - DNA, 1473 bp, Staphylococcus aureus
atgactagtaaatcaagtccattaatttttgaaagatctcgtgaaggcagatatgcatattcattaccaaaaagtgatattaaaacaaattctgttgagtcattgttagatgataaatttattcgtaaaaacaaagcggagtttcctgaagttgctgaactagacttagtacgtcattatactgaactttcaaataaaaattttggtgtagacaacggattttatccattgggttcatgtacgatgaagtataaccctaaaattaatgaaaaggttgctagaataccaggatttagtgaatcacatccattacaagatgaagatcaagttcaaggttcattagaaattatttatagtttgcaagaagaattaaaagaaattactggtatggatgaggtgacattacaaccagctgctggcgcacatggtgaatggactgcattgatgatatttaaagcttaccatgagaataatggtgaaggtcatcgtgatgaagtcattgtgccagattctgcgcatggtacgaatccagcctcagcttcatttgcaggatttaaatcagttactgtaaaatcaaacgaacgtggcgaagttgatattgatgacttgaaacgtgttgtaaatgaaaatacagcagctattatgttaactaatccaaacactttaggtattttcgaaaaaaatattatggaaatccgtgaaatcgtccataatgctggtggtctattatattatgatggtgcgaatttaaacgctattatggacaaagttcgcccaggagatatgggatttgatgctgttcatttaaacttgcataaaacatttactggtccacatggtggtggcggtcctggttcaggtccagtcggtgtagtaaaagaactagcaagttacttaccaaagccaatggttattaaagatggcgacaaatttaaatatgataatgacattaaaaattctatcggacgtgtaaaaccattttatggtaactttggtatttacttaagagcttatacgtatattcgaactatgggagcaactggacttaaagaggtttctgaagcagcggttcttaatgcgaattatattaaagcacgtttatctgaacactttgaaataccttataaacaatattgtaaacacgagtttgtgttaagtggtgtgcgtcaaaaagaatttggtgtacgtactttagacatggctaagcgattattagatttcggtgtacatccaccaacaatatacttcccattaaatgttgaagaaggtatgatgattgaaccgactgagacagagtctaaagaaacacttgattattttatcgatacattaattagtattgctgaagaagctaaaaatgatcctgataaagtgctagaagcaccacatacaactgtgattgatcgattagacgaagctacagctgctcgtaaaccaatattaaagtttgaaaatcttaaacaggaaaaataa

SEQ ID NO: 421892 - DNA, 1347 bp, Staphylococcus aureus
gtgagtcatcgttatatacctttaactgaaaaagacaagcaagaaatgttacaaacaattggtgcaaaatctataggagaattattcggtgatgtaccaagtgacattttattaaatagagatttaaatattgctgaaggcgaagcggaaacaacgttacttagaagattaaatcgcattgcaagcaagaatatcactaaagaaacgcatacatcatttttgggtgctggtgtttatgatcattacgcgccatcagttgtggatgctatgatttcaagatcagaattttacacagcatatacgccatatcaaccggaaatttctcaaggtgaattacaagccatttttgagttccaaactttaatttgtgaattaacagatatggatgtagcaaattcttctatgtatgatgggatgactagctttgctgaagcatgtatcttagcatttagtcaaacaaagaaaaataaaattgtagtctcaaaaggtttacattatcaagcattacaagtacttcatacttatgctaagacgcgtaaggaattcgaagtagtggaaatcgatttagatggcactgttacagatttgaaaaaattagaaacagcagtggatgatgaaacagcagctgttgcagtacaatatccaaacttttacggttcaattgaagatcttgaaaagattcatagctttattgaagataaaaaagcattatttatcgtatatgcaaatccattagcattgggattacttacacctccaggttcatttggtgcagatattgttgtaggtgatactcagccattcggaattcctgctcaattcggtgggccacattgtggatattttgcaacgacgaaaaagttaatgcgtaaagtgccaggtagattagtcggtcaaacacaagatgatgaaggtaatcgtggctttgtattaacattacaagcacgtgaacaacatattcgacgcgataaagcgacatctaatatttgttctaaccaagcattaaatgctttagcgtcatcaattgcaatgtcagcacttggtaaacaaggtatctatgatattgcagttcaaaatatagaacatgctaactatgctaaacaacaatttattaaaaaaggttttgaagtattagatggtacatctttcaatgagtttatagtcaaatttgacaaaccaattcaacaagttaacgaggaattagtgaagtacaatattatcggtggttttgatttaggtgttgtttcagacgactttaaaaatcacatgttaatagctgtaactgaattaagaacaaaagatgaaatcgatacatttgtagaaaaggctggtgagttaaatgactag

SEQ ID NO: 421893 - DNA, 1092 bp, Staphylococcus aureus
atgtcaagtgatttaaaacaaacacctttatatcaaaattatgttgatagaggtgcaaaaattgtggaattcggaggatgggcgatgcctgttcaattttcaagtattaaagaggagcataatgctgttcgatacgaaattggcctgtttgatgttagtcatatgggtgaaattgaagtaacaggtaaagatgctagtcagtttgtgcaatatttattatcaaatgatactgataatttaactacttcaaaagcattatatactgctttatgtaatgaagaaggcggtattattgatgatttagtaatatataaattagctgacgacaattatttattagttgttaatgctgctaatactgaaaaagattttaattggattttaaaacacaaagagaaatttgatgttgaagtacaaaatgtatcaaaccaatatggtcaattagcaatacaaggaccaaaagctagagatttaattaatcaattagttgatgaagatgtaactgaaatgaaaatgtttgaatttaaacagggtgtcaaattatttggagcaaacgtcattttatctcagtcaggttacacaggtgaagatgggtttgaaatttattgtaatatcgatgatactgaaaaaatttgggatggtttattagagtataatgttatgccatgtgggttaggcgctcgtgatacattaagattagaggctggattgccattacatggacaagatttaactgaatcaattacaccatatgaaggtggtatcgcttttgcaagtaaaccattaattgatgctgattttattggtaaatctgtattaaaagatcaaaaagaaaatggtgcaccaagaagaacagtgggattagaattacttgaaaaaggaattgcaagaactggttatgaagttatggatttagatggaaatattattggagaagtaacttcaggaactcagtctccatcatcaggaaaatcaattgcacttgcaatgataaaaagagatgagtttgaaatgggtagagagttgcttgttcaagttcgtaagcgtcaattaaaagcgaaaattgttaagaaaaatcaaattgataaataa

SEQ ID NO: 421894 - DNA, 525 bp, Staphylococcus aureus
atgaatcatgataaatcaccaataattttaattggtttcatgggtaccggtaaatctacgattggtaaatacgttgcagatgagcaaaatttatcatttattgatatagattcatatatcgaagagaagtataagttaacaataccagaaatatttagtaaacatggtgaacaatatttcaggaatttagagttcacatgtttgcaagaatgtattaacactgcagatataattgctactggtggtggtattattgagagtgaagaggcatttaattttttgaaaaatcaaaaaaacattatttggttagattgtaatattgatattatatatagtcgaatcaatgatgacccacatcgacctaatgcaaataataagacaatcaagcagttaaatgacttgtattgctcgcggaatttaagatataatgaaatcgcattcaagaaatttgatagtcatttgctatcaatttcagaaatatattatgaattgctaaatttaataaaagcgagtgatcagtattag

SEQ ID NO: 421895 - DNA, 375 bp, Staphylococcus aureus; identical to SEQ ID NO: 405949

SEQ ID NO: 421896 - DNA, 300 bp, Staphylococcus aureus; identical to SEQ ID NO: 405948

SEQ ID NO: 421897 - DNA, 435 bp, Staphylococcus aureus; identical to SEQ ID NO: 405947

SEQ ID NO: 421898 - DNA, 312 bp, Staphylococcus aureus; identical to SEQ ID NO: 405946

SEQ ID NO: 421899 - DNA, 1071 bp, Staphylococcus aureus
gtgaaactacaatggataaatacatttaaactacattctaagaagcgacaattaagtaaggcccaacaaatcgacttactttcaaatttatgtaatttgttgaaatatggtttcactctgtatcaaagttttcaatttttaaatcttcaaatgacatataaaaataagcaattaggtaccaccattctaagtgaaatttcaaatggtgcaccatgcaatcaaatattatcactgataggttatagcgatactatcgtcatgcaagtatatttggcagaaagatttggcaatattatagacgttctagaagaaaccgtaaattatatgaaagtgaatagaaagtcagaacaacgattgttaaagacactgcaatatcccttaatactagtttctatctttattgctatgattattatattaaacctcacagtaattccacagtttcaacaattatatacttctatgaatattcaactatcttcttttcaaaaaacattgtcttttttcattaccagcttacctactataattgtagtaatgctcataatagtatctatgttggctattattatgaaattaatttataacaatttaaatatgctcaataagataaactttgtgatgaaactaccgctaatatcaggctatttccaattatttaaaacttattttgtaactaatgaattagtgttgttttataaaaatggtattacacttcaatcaatagtagacgtttatattaaccatagtagtgatccatttagacagtttctaggtaaatacttattaacttattcagaaatgggatatggtttgcctcatattttagaaaaactaaaatgctttaagcctcaattaattaagtttgtgctacaaggtgaaaagagagggaagctagaagtagaactaaagttatattcgcaaatattagtaaaacaaatagaagataaagcgataaaacagactcagtttttacagcctattttatttttgattttaggtttatttattgtcgcaatttatttagtaattatgttaccaatgtttcaaatgatgcaaagtataaaataa

SEQ ID NO: 421900 - DNA, 975 bp, Staphylococcus aureus
ttgaagattctatttcaagaaataattaataaagcgatagaaatgaaagcgagtgatgtacattttattccagttaaaaatgaagtaagtattaaatttagaattaatgataacttggagcagtatgaacaaattgggaatagcatttatcaaaagttattagtttatatgaagtttcaagctgggcttgatgtttctacacagcaagtcgcacagagcggtcgatatagttaccttttcaataaaatatattttttgagaatatcaactttaccattgtcacttggccaagaaagttgtgttatcagaattgtacctcaattttttcaaccacagaaatcaacttataaattcaatgattttaaacacctcatgaataagaaacaaggattactattgtttagtggaccaactggttcaggaaagagtacattaatgtatcaaatggtctcatacgcgaataaagccttgaatttaaatgtaatttctatagaggatcctgtagagatgcaaattcctggtatcgtccaaattaatgtgaatgataaagctggcataaactatgtaaattcgtttaaagctattttaagatgtgatcctgatgttattttaataggtgaaatcagagataaagatgttgccaagtgtgttatacaggctagtttaagtggtcaccttgttctgactacattgcatgcaactgattgtaaaggtgctattttaaggctattagaaatgggcatttctgtacaagaattgatacaggcaactaacttaattataaaccaacgacttgtaactactattaagcaacagcgacaattagtatgtgaaattctatctcagcaacaactccgatatttcttttcccataatcattcattaccatcatcatttaagaacttagaagataaacttgatgatatgacaaaagcaggtgtcatttgtgaaactacaatggataaatacatttaa

SEQ ID NO: 421901 - DNA, 624 bp, Staphylococcus aureus; identical to SEQ ID NO: 405943

SEQ ID NO: 421902 - DNA, 330 bp, Staphylococcus aureus; identical to SEQ ID NO: 405942

SEQ ID NO: 421903 - DNA, 987 bp, Staphylococcus aureus; identical to SEQ ID NO: 405941

SEQ ID NO: 421904 - DNA, 1464 bp, Staphylococcus aureus
atgaacatagacaaacaattttggaaaacaatatattattggattaggtacttgaattttgatattgtcagtagggaaaaagatgaccaagaaatttggttagcccataaaagaaaaaaacaagtagtcatttttaaacaacatatcaagtctacccaagaaatacgttttgacaaagcgaaagtgcttgaacacaaagatgaaatagcaaattttatttctttcgaaccacaaagttttgaattttattattttacagaatcggaattttcagaagaacaattaaatgaagtttcgccaattagaattaaattcaatgttataagacacacaaaagatttgataaagcatatgccgaatatatttttggctagacttatttcagaagataatgataaaaagacatatatgttctataaacgcaaagtattaaccgataactttttagataaatatatgcagaaattttcaccggcaacatatacaataatatttgtaaatgtcttaatatggttatgtatgattttatatttaaataatttttcggatgtaaaattattagatgttggcgggttagtgcattttaatgtcgtacatggtgaatggtatcgaattgttacatcgatgtttttacattttagttttgaacatatacttatgaatatgctttcattatttatttttggtaaaatagtcgaagcaattattggttcatggcggatgttaactgtatactttattgcagggttgtttggaaactttgtatcactatcatttaatacgactacaatttcagttggggctagtggtgctatatttggtctgattggatcaatttttgcgatgatgtatgtttcaaaaacatttaacaaaaaaatgttaggacagttattaattgcattagtgatattagttggtgtttctctgtttatgtcaaatataaatattgtggcgcatattggaggattcattggtggtttattaataactttaattggctattactataaagtgaatcgtaatattttttggattttactaattggtatgcttgttatatttattgcacttcaaattagaatttttacaattaaagaagataatatttataataaattgatcaaagatgatatgactagtggtaattatgataatgctcaaaatattgtgaagcagacaataaataaaaattatgccgatgatcaaacatattatttaagtggtatgattatggctactatcaattctaagtctgaaggtatgacagaatgggagcgaggacttagaatgtttcctaaatcaggtttattaaattttgagttagcgatagcaaatcgttcattaaatgatgatgaaaaagcattaaaatatgtgcgtaaagcattaaatgcagaccctaaaaatacagattatattaacttagaaaaagagttgactaaatcaaatgagtcgaaaaataaataa

SEQ ID NO: 421905 - DNA, 585 bp, Staphylococcus aureus
atgacatgtattgttattaacgatataatagaattgaataaagtgggtgataatgtgactaaaaatgagattagaaaatacattttacataaaatgaagaattttaataaagctgaaaagcgaaaagcagacacatggttaagaaatcaattttttgcaactgaagaatacaaagaagcaaacgcaattgcgctagttctttcttttaatcatgaagtagatactttttctattattgaacaagccttaatggatcataaacgtatttttgtaccgaaaatggattatttaaatcatcaaatggcttttaaagaaatatttaatctcaaagatattgatgtcgataataaggggatttactatccaacttcaaaaggtgaaacaacgaataacctagatttaattgttgttcctggtgttggatttcaagacgatggatatagaattgggtatggtggtggctattacgacaggtttttagctaattatcagacaaagacaataagcttattatacgattttcaaataacatcatttgaaccggaatcattcgatcaaccagtcgataaattgattatatattaa

SEQ ID NO: 421906 - DNA, 150 bp, Staphylococcus aureus; identical to SEQ ID NO: 405938

SEQ ID NO: 421907 - DNA, 2076 bp, Staphylococcus aureus
ttgttaaaaagactaaaagaaaaatcaaatgatgaaatcgttcaaaatacaattaacaagagaattaactttatatttggtgtgattgtatttatttttgcagtactagtactacgtttaggttatttacaaatcgcacaaggctcacattataaacaaattataaaaaatgatgaaaacattacagtgaatgagtctgtgccaagaggtcgtattttagacagaaatgggaaagttttagttgataatgcttctaaaatggctattacatatactaggggtcgaaaaacaacacaatcggaaatgttggatacggctgaaaagttatcaaagctaatcaagatggatactaagaaaattacagaacgtgataagaaagatttctggattcagttgcatcctaaaaaagcaaaagcaatgatgacaaaagaacaagctatgttagcagatggaagtattaaacaagatcaatatgataaacaactgttatcgaaaatcggaaaatcacaattagatgaattgtcttctaaagatttacaagttttagctatttttcgagagatgaatgcaggaacagttttagatccacaaatgataaaaaatgaagatgtcagtgaaaaagagtatgcagcagtttctcagcaactttccaaattaccaggtgttaacacgtctatggattgggatagaaaatatccatatggcgatactttaagaggtatattcggagatgtatcgacacctgctgaaggtattccaaaagaattgacagaacattacttatccaaaggatattcacgcaatgatcgtgttggaaaatcttacctagaatatcaatatgaagatgtattgcgtggtaagaagaaagaaatgaaatacacaacggacaaatctggtaaagttacatcttcagaagtgttaaatcctggcgctcgcggtcaagatttgaaattaacgatcgatatagatcttcaaaaagaagtagaagcattattagataaacaaattaagaagcttcgcagccaaggtgcaaaagatatggataatgctatgatggttgtacaaaatcctaaaaatggagacattcttgcgcttgccggaaagcagattaataagagtggtaaaatgactgattatgacattggtacgtttacttctcaatttgcggttggatcttctgtaaaaggtggaacattattagctggttatcagaataaagctatcaaagttggagaaacaatggtcgatgaaccattacatttccaaggtggtttgacaaaacgatcatacttcaataaaaacgggcatgtatctattaatgataagcaagctttgatgcattcatcaaacgtatatatgtttaaaacagcattaaaattagcgggagacccttattattctggtatggctttaccttcagacataagttcacctgcccaaaagctaagaagaggattaaatcaagtaggcttaggtgtgaaaacagggatagatttaccaaatgaaacaagaggtcaaatcgaaccattaacaaataatccaggtaattatctagatttatcaattggtcaatatgatacctatacaccattacaattatcacaatatgtttcaactatagcgaatgatggttatagaatacagccacacattggattaacgattcatgaatcaactaataaagatgaggttggtccactcaagaagaaaattaatggcactgtcttgaacaaggttaataatactgaaaaagaaatcaaacaaattcaagaaggattcaaaatggcatttaatgataaagatggtacaggatatgttagttttaaagatacagtagtacctactgctggtaaaacgggtaccgcagaagtgttccaaaacggagagccaagagttaactctacttatataggatacgcgccaattgatgatccaaaattagcgttttcaattgtatatacaaatcagcctgtaccaccaccatggttaacaggtggagacttaggtagagatgtaattaattactactttaagcagttaggtaaagatgataaaaataaagacaaagacaaataa

SEQ ID NO: 421908 - DNA, 600 bp, Staphylococcus aureus; identical to SEQ ID NO: 405936

SEQ ID NO: 421909 - DNA, 411 bp, Staphylococcus aureus; identical to SEQ ID NO: 417600

SEQ ID NO: 421910 - DNA, 873 bp, Staphylococcus aureus
gtgtcacaattgatagatgcattattgaattttgattttatgaggtactctttaattagtggtatcttgataggttttattgcgcctctaatcggtgcttttatcgttgttagacgactatcacttatagctgatgctctaagtcatgtaactttaggtggtatatccttcggtatgtttttacttactattatgccaacactagtatttattaatccaatgtggtttggaatcttattcgcaatagtaggtgcgcttctaattgaaaaattaagaacgtcatacactgcttaccaagaaattgctattccaattataatgagtgctggtatcgccttgagtgcaatctttatttcattagctgatgggttcaatcaagaaattgttggattgctatttggctcaataagcgcagtgaatataagtgatttaacaacgattattgtcattgccatcatagttgttctgtttattacattgttttataaagaattatttatattgtcatttgatgaggaatatagtaaagtcattggtattcctaaatggattcaatttttatttattgttattgtagcgatggttatttctgcctcaatgcgtgttgtagggatactgttagtaagtgctttaatcacgttaccaattgcaataagtatgcgaataacaaaaagttttaagcaattgatattactaagtgtatttttaggtgaattatcagtaatattaggcttagtcctagctttctatatggacatttctccgggtggtgtaattgtagttctactagttattttacttatggttacaatggcttatcagaaaatgcgaatgaagtttaaaaagggagctaatatcaatgaatacaaatga

SEQ ID NO: 421911 - DNA, 786 bp, Staphylococcus aureus; identical to SEQ ID NO: 413484

SEQ ID NO: 421912 - DNA, 891 bp, Staphylococcus aureus; identical to SEQ ID NO: 413485

SEQ ID NO: 421913 - DNA, 1347 bp, Staphylococcus aureus
atggcaaaacatccattcgaacaatttaatctagaatctagtttaattgacgctgtgaaagaccttaattttgaaaaaccaactgaaattcagaatcgaattattccaagaatactaaagagaacaaatttaattggtcaatctcaaacgggtacagggaaatctcatgcatttttattaccattaatgcagttaattgatagtgaaataaaagaaccacaagcaatcgtagttgcaccaacaagagaacttgcacaacaactatacgatgcagcgaaccatttaagccaatttaaagctggtgtttcagttaaagtttttattggtggtacagatatagagaaagatagacaacgttgtaatgcacaaccacaattgattataggcacccctactagaattaatgacttagctaaaacgggacatttacatgtgcacttagcatcatatttagttattgatgaagcggatcttatgattgacttaggattaattgaagatgtagattacattgctgcaagattggaagataatgcaaatattgcggtgtttagtgctacaattccacaacagttacaaccatttttaaataaatatttaagtcatccagaatatgtagctgtcgacagtaaaaaacaaaataaaaagaacatcgaattctttttaatacctactaaaggtgcagctaaagttgaaaagactttaaatttaattgatatactaaatccatacttatgtattattttctgtaatagtagagataatgcaaatgatttagcacgttcactaaatgaagctggtattaaagttggtatgattcatggtggcttaacgccacgtgaacgtaaacaacaaatgaaacgtatacgtaatttagaattccaatacgttattgccagcgatttagcatctcgtggtattgatattgaaggtgttagtcatgtcatcaatttcgatgtgccaaatgatattgacttctttacacatagagtcggccgaactggccgtgggaattataaaggtgtagcaattacgctttatagtcctgatgaagaacacaatatttcattaatagaagatcgcggttttgtattcaatactgttgatattaaagatggtgagttaaaagaagttaaagcgcacaatcagcgtcaagcaagaatgcgcaaagatgaccatttaactaatcaagtgaagaacaaagttcgaagtaaaattaaaaacaaagttaaaccaggttataagaagaaatttaaacaagaagttgaaaaaatgaaacgtcaagagcgtaaacaatttagtaagcagcaaaatagacaaaaacgtaagcaaaacaaaaaaggttag

SEQ ID NO: 421914 - DNA, 1101 bp, Staphylococcus aureus
atgaaaatagctgatttaatgacattgttagatcatcatgtgccatttagtactgctgaatcttgggataatgtaggattgttaataggtgatgaagatgttgaagttactggtgttttaacagcattagactgtacgttggaagtagtaaatgaagcaatcgaaaaaggttataatactattattagtcatcatcctctaatctttaaaggcgtaacatcattaaaagctaatggttatggtttgatcattagaaaactaattcaacatgacattaatttaatagcgatgcatacaaatttagatgtaaatccgtatggtgtcaatatgatgttggcgaaggcgatgggtttgaagaacatttcaataataaataatcaacaagatgtatactataaagttcaaacatatatacctaaggataatgttggaccatttaaagataagcttagtgaaaatggattagcgcaagaaggtaattatgaatattgtttctttgaaagtgaaggaagagggcaattcaaaccagttggtgaagctaatccaacaataggacaaattgataaaattgaatatgtagatgaagttaaaattgaatttatgatagatgcatatcaaaagtcaagggctgagcaattaattaaacaataccatccatatgaaacaccggtatttgattttattgagataaaacaaacatccctttatggacttggcgttatggcagaagtggataatcaaatgacattggaagatttcgcagctgatattaaatctaaattaaatatcccaagtgtccgttttgttggtgagtctaatcagaaaattaaacgtattgcaattattggtggttcaggtattggatatgaatatcaagctgtccaacaaggcgcagatgtctttgtaacaggtgatattaaacatcatgatgccttagatgctaaaattcatggtgtgaatttaattgatattaatcattacagcgaatatgtgatgaaagaaggtttaaaaacgttactaatgaattggttcaatacagaaaaaataaatatagatgttgaagcatctacaattaatacagatccatttcaatatatttaa

SEQ ID NO: 421915 - DNA, 678 bp, Staphylococcus aureus; identical to SEQ ID NO: 417606

SEQ ID NO: 421916 - DNA, 1107 bp, Staphylococcus aureus
atgtctgataacacagttaaaattaaaaaacaaacaattgatccgacattaacattagaagatgttaagaagcaattaattgaaaaaggtaaaaaagagggtcatttaagtcatgaagaaattgctgaaaaacttcagaattttgatatcgactctgatcaaatggatgatttctttgatcaattaaatgataatgatatttcactagttaatgaaaaagatagttcagatactgacgagaaactgaatccaagtgatcttagtgcccctccaggtgttaaaataaatgacccagttcgtatgtaccttaaagaaattgggcgtgttaacttattaagtgcacaagaagaaatcgaattagccaaacgtattgaacaaggtgatgaagtagcaaaatcaagacttgcagaagcgaacttacgtttagttgtaagtattgctaaaagatacgtaggtcgtggtatgttattccttgatttaatccaagaaggtaatatgggtcttattaaagctgttgaaaaatttgactttaacaaaggatttaagttttcaacatatgcaacatggtggattagacaagcaatcactcgtgcaattgctgaccaagcacgtacgattcgtatccctgtgcatatggtagaaacaattaataaattaattcgtgttcaacgtcaattattacaggacttaggtcgagatccagcaccagaagaaattggtgaagaaatggatttaccagcagaaaaagttcgtgaaattttaaaaattgcgcaagaacctgtttcattagaaacaccaattggtgaagaagatgatagtcatttaggagactttattgaggatcaggaagcacaaagtccttcagatcatgcagcttatgaattattaaaagagcaattagaagatgtgcttgatacattaactgatagagaagaaaatgtattacgattaagatttggtcttgatgacggcagaacaagaacacttgaagaagttggtaaagttttcggtgttacacgtgaacgtattcgacaaatcgaagcaaaagcacttagaaaattaagacatccaagtcgtagtaaacgtttgaaagactttatggattaa

SEQ ID NO: 421917 - DNA, 1800 bp, Staphylococcus aureus
ttgcgaatagatcaatcgatcattaatgaaataaaagataaaaccgacattttagacttggtaagtgaatatgtaaaactagaaaagagaggacgcaattatataggtttgtgtccttttcatgatgaaaagacaccttcatttacagtttctgaagataaacaaatctgtcattgttttggttgtaaaaaaggtggcaatgtttttcaatttactcaagaaattaaagacatatcatttgttgaagcggttaaagaattaggtgatagagttaatgttgctgtagatattgaggcaacacaatctaactcaaatgttcaaattgcttctgatgatttacaaatgattgaaatgcatgagttaatacaagaattttattattacgctttaacaaagacagtcgaaggcgaacaagcattaacatacttacaagaacgtggttttacagatgcgcttattaaagagcgaggcattggctttgcacccgatagctcacatttttgtcatgattttcttcaaaaaaagggttacgatattgaattagcatatgaagccggattattatcacgtaacgaagaaaatttcagttattacgatagatttcgaaatcgtattatgtttcctttgaaaaatgcgcaaggaagaattgttggatattcaggtcgaacatataccggtcaagaaccaaaatacctaaatagtcctgaaacacctatctttcaaaaaagaaagttgttatacaacttagataaagcgcgtaaatcaattagaaaattagatgaaatcgtattactagaaggttttatggatgttataaaatctgatactgctggcttgaaaaacgttgttgcaacaatggggacacagttgtcagatgaacatattacttttatacgaaagttaacatcaaatataacattaatgtttgatggggattttgcgggtagtgaagcaacacttaaaacaggtcaaaatttgttacagcaagggctaaatgtatttgttatacaattgccatctggcatggatccggatgaatacattggtaagtatggcaacgacgcatttactacttttgtaaaaaatgacaaaaagtcatttgcacattataaagtaagtatattaaaagatgaaattgcacataatgacctttcatatgaacgttatttgaaagaactgagtcatgacatttcacttatgaagtcatcgattttgcaacaaaaggctataaatgatgttgcgccatttttcaatgttagtcctgagcagttagctaacgaaatacaattcaatcaagcaccagccaattattatccagaagatgagtatggcggttatattgaacctgagccaattggtatggcacaatttgacaatttgagccgtcaagaaaaagcggagcgagcatttttaaaacatttaatgagagataaagatacatttttaaattattatgaaagtgttgataaggataacttcacaaatcagcattttaaatatgtattcgaagtcttacatgatttttatgcggaaaatgatcaatataatatcagtgatgctgtgcagtatgttaattcaaatgagttgagagaaacactaattagcttagaacaatataatttgaatgacgaaccatatgaaaatgaaattgatgattatgtcaatgttattaatgaaaaaggacaagaaacaattgagtcattgaatcataaattaagggaagctacaaggattggcgatgtagaattacaaaaatactatttacagcaaattgttgctaagaataaagaacgcatgtag

SEQ ID NO: 421918 - DNA, 819 bp, Staphylococcus aureus
atggaaaaaattaaaattatcgtagcctcagattctataggtgaaacggcagagttagttgctagggcaggtatttcacaatttaatcctaagcaatgtaaaaatgaattattaagatatccatatattgaatcttttgaagatgttgatgaagtgattcaagttgcaaaagatacaaatgctatcattgtttatacacttattaaacctgaaatgaagcaatatatgagtgagaaagtagcagaattccaattgaattccgttgatatcatggggccattaatggatttattatcagcatcggttgaagaaaaaccttataatgagccaggtatcgttcatagattagatgatgcatatttcaagaaaattgatgcgatagagtttgcggttaaatatgatgatggtaaagatcctaaaggattacctaaagctgatattgttttacttggtatttcgagaacttcaaagacaccattatctcagtatttagcgcataagagttacaaagttatgaatgtaccgattgtaccagaagtgacaccgccagatggcttatatgatattgatcctaagaaatgtatcgcacttaaaataagtgaagaaaaattaaatcgcattagaaaagagcgattaaaacaattgggactaggtgacacagctcgttatgcaacagaagctcgaatccaagaagaattgaattactttgaagaaatcgtaagtgaaattggatgtcctgtcattgatgtttctcaaaaagcaatcgaagaaacagcaaacgatataatccattatattgaacaaaataaatcgaaatga

SEQ ID NO: 421919 - DNA, 540 bp, Staphylococcus aureus
ttgaatttaacaagagcaacgcttagaccagatttagcgatattaacaatgtcaggttttttagaagcgcgtccccgagttggatattattattcaggtaaatcaaaaggcaaattttttaatgaaaaacttcgacaatttgaggttaaggactatatgtctcaacctgttgtgctaagagagaatacaacagtttatgacgctatttgtacaatttttttagaagatgtaagtacattatttattattaatgaagataacgattttgttggtgtgtgttcaagaaaagatttattaagagcttcaatgattggagcagatattcatacagtacctatcagtgtaaatatgacacgtatgcctaatgtcacttatttagaggaaagcgaattagtcatatacgcagcagatagaatgattgaaaaagaaattgattcgattccaattgtaagaaaaaaagataatcaaaagtatgaagtaattggaagaatttccaaaacaacaatagctaagttattagtagcattatataaagaatag

SEQ ID NO: 421920 - DNA, 1392 bp, Staphylococcus aureus; identical to SEQ ID NO: 412769

SEQ ID NO: 421921 - DNA, 747 bp, Staphylococcus aureus
atgcgccaaaaagggattatcatcaaagcagttgattatggtgaatctgataaaattatcacgattttaaatgagcatggtgcaaaagtaccacttatggcaaggcgtgctaaaaaagttaagacgggtttacaagcgcaaacgcaattgtttgtttatggtttgtttatttacaatcagtggcgaggtatgggaacgttaaattctgtagatgttattagtcaacattataaattacaaatggacctttacgtaagcagttatgcctctctggcagctgaaactattgagcgctcaatggatgaaggtgacattgcaccatataactatcaattattacaatttgttcttgaaaaaatagaatcaggtacatctgcacagttaatgtcagtcgtagttatgttaaagtgcatgaaacgatttggttttactgcatcatttaatcgctgtgctgtgagtggtaatgacacacaagcagatttaataggttatagttttaagtttgacggtgcgatttcaaggcaagaggcttctaaagatgtacatgcagttatattatcgaataaaacactatatttattagatgtattacaaaaattaccgatagataaaatgaattcattgaatatccatcaagaaattattgatgaaatgtcagatatcattttaatgttatatcgtgaatatgcaggtatgttttttaaaagtcagaaactaatcaaccaattaaaaagattggaacaataa

SEQ ID NO: 421922 - DNA, 900 bp, Staphylococcus aureus
atgacagaacataaatcaggatttgtttcaattataggtagaccaaatgtagggaagtcaacatttgttaatagagtgatcggccataaaatagcaatcatgtccgataaagctcaaacaactagaaataaaattcaaggtgttatgacaagagatgacgcgcaaattatattcattgatacgccaggtattcataaacctaaacacaaattaggtgactatatgatgaaagtcgctaaaaatacattatctgagatagatgcaatcatgtttatggttaatgccaatgaggaaattggacgaggcgatgaatatattatagaaatgttgaaaaatgttaagacaccagtatttttagtattaaataaaatagatttagtgcatccagatgaattaatgccaaagattgaagaatatcaaagttatatggactttacagagattgtacctatttcagcattagaagggctaaatgtagatcattttattgatgttttaaagacgtatttacccgaaggacctaaatattatccagatgatcaaatttcagaccatcctgaacaatttgtagtgggtgaaatcattcgtgaaaaaatccttcatcttacaagtgaagaaatccctcatgcgattggtgttaatgtggaccgtatggttaaagaaagcgaagatcgtgttcatatcgaagcaactatatatgttgaaagagattcgcaaaaaggaattgtcattggaaaaggcggtaaaaagttaaaagaagtagggaaacgtgcgagacgtgatatagaaatgcttctaggctctaaagtttacttagaattatgggtcaaagttcaaagagactggcgaaacaaagttaactttattcgccaaattggttatgttgaagaccaagattaa

SEQ ID NO: 421923 - DNA, 405 bp, Staphylococcus aureus
atgagttatcaacctcattattttcaagaagttagaaaagcacaacaagaatcatattcgccatacagtcaatttaaagtaggggcttatttaaaaacgaaagacggtagaactttttatggtaccaatgtagaaaatgcttcttatccattatcgatatgtgctgaacgagctagtttggtatcggcaatttctcaaggatacagaccaggtgattttgaatcaataactgtaaccgtagatgcagataaaccgtcatcaccttgtggtgcatgtcgtcaagttttaaaggaattatgtgatgatgatatgcctgtgtatatgacaaatcataaaggagatatggttatgatgacagtcgcagagttactaccatttggattttcaggaaaggatttagaataa

SEQ ID NO: 421924 - DNA, 345 bp, Staphylococcus aureus
atgaaaaggtttaaatatgcacttgatgggctgaaaatcttaattcaaaaagactataaatttcttttacatgtgtttgcaatgattgttgctattgtctttggtctcgtactaaatattaatcggattgagtggatatttatactcattgctattgcattagttctcactgttgaagctttaaacactgctattgaatatgttgtcgatttagtgaccgttgaatatcatgatttagctaaatacgcaaaagatatagcggcttttagtgtacttatagtttcaatattagcatttattataggtttaatagtatttttaccacattttatagcgttattttag

SEQ ID NO: 421925 - DNA, 468 bp, Staphylococcus aureus; identical to SEQ ID NO: 405919

SEQ ID NO: 421926 - DNA, 948 bp, Staphylococcus aureus
atgcctggaattatacaaatagacgatatgaaccaatctcaagctttaattggaaataatgatgaacatttaaaagcaattgaagagagtttcgatgttgtcatccatgcaagaggacaagaagttgccgttaaaggtacaaaaatagaaaacgtagaaaaagcggaatcagtattaatcaatttgctgaaggttattgatttaggtaataatattacaattaaagatgttgaagcagctattaaaatggcgcataataacacaattcaacatctgttagatttatatgatgaagagataactaaagatgcatttggtaagacgattcgtgcgaaaacgatggggcaacgtatatatgttaatgccatgaaaaataatgatttagtatttggtataggtcctgctggtacaggtaagacattcttagctgtagtttatgcagcaaagcaactccgtaaaggtgctgttaaacgtattgtattaacaagacctgctgttgaagcaggagagtcacttggatttttaccaggagatttgaaagaaaaggtagatccatatttaagacctttatatgatggtctatatactgttcttgggcgtgaacaaacagagcgatttattgaaagaggcattatcgaaatagcgccacttgcatatatgcgcggacgaacattagaagatgcatttgtaattcttgatgaggcgcagaatacgacacatgcgcaaatgaaaatgtttttaacaagactaggttttggctcaaaaatggtagttactggtgaccaaactcaaatcgatttacctaaaggtgttaaaagtggacttaaggaagcggtcagtaggttacacaacgttaaaggtataagtatattgaaattagatcagagcgatgtagtaagacatccattggtaagtaagatcattgaacattatgaaggagagaattaa

SEQ ID NO: 421927 - DNA, 699 bp, Staphylococcus aureus
atgagtgtcggtattctaatttttgtcatatcagtgatcatttctatcattactactatgcgcgaaaatagtcataaagatagacaaaatcaaaagccacctcaaaaaacatctaccgataatgaaccaaaaaaaggtggcttttttgaagaaattgagcgaacgtttaaagaaataagtgaagaattaaatgaagaagaaaagaaatcatcgaaacgaaaatatgatgatacgttaccacctttattcgatgaacttccaaaagaagagcctaaatcgaaacctgttgtagaacctatggcacctaaaaaacaaccagaaacaaaaccgatgacagagaaaccaattacagtgcctaaagcagaaccggtggagcagaaacatagaccttctagacaagataattctgacgaaattagacgtcaattagaaaaatcacttagagatgatattaaaacgattcgtactgacattgatagagaaaaagaaaagcaaattgctaaaatggaaaaacgtgctagagatattattgaggataaatacttatctgaacgtacaaagcgtttgaaattaaagcagttgcttaattctcaaaatgtcgaaaaagatttgactaaatcagcgttccaatttgataaagatgaagtaatcaatggtatgatatggtcagaaattttagctaaaccaaaacaattataa

SEQ ID NO: 421928 - DNA, 990 bp, Staphylococcus aureus
atgtttagtttaagttttatcgtaatagcagttattatagtagttgcattacttattttattctcatttgtacccattggtttatggatttcagcgttagcagctggcgttcatgttggtataggtacattggttggtatgcgtttacgtcgtgtatctccaagaaaagttatagcgccattaattaaagcgcacaaagcaggactagcattaacaacaaaccaattagaatcgcattatctagcaggaggaaatgttgacagagttgttgacgctaatattgctgcacaacgtgctgacattgatcttcctttcgaacgtgctgctgcaattgaccttgcaggacgtgacgtattagaagcggttcaaatgtctgttaatcctaaagtcattgaaacaccatttatcgcaggtgtagcaatgaacggtattgaagtgaaagccaaagctcgtatcacagttagagctaatattgcacgacttgttggtggtgctggtgaagaaacaatcatcgcacgtgttggtgaaggtatcgtttcaacaattggttctagtaagcatcatacagaagtacttgaaaacccagataatatttctaaaacagtattaagcaaaggtttagattcaggtactgcatttgaaattttatcaattgatattgctgacgttgatattagtaaaaatattggtgcagacttacaaactgaacaagctttagcagacaaaaatattgcacaagcaaaagctgaagaacgtagagctatggctgtagcaactgagcaagaaatgaaagcgcgtgtacaagaaatgcatgctaaagtagttgaagccgaatctgaagtaccattagctatggctgaagcattacgttcaggtaatatcagtgttaaagattattataatttgaaaaatatcgaagctgatacaggcatgagaaatgcaattaataaacgaactgatcaaagtgatgatgagtcacctgaacattaa

SEQ ID NO: 421929 - DNA, 708 bp, Staphylococcus aureus
gtgagttataataattttttacaaatgacaactatcttggaatcaacggctggagatacttgggttgaacaagttagtaatataattgttcaacctatttttacgttaatattaacctgtttgacattcttaggatttgtatatcaactttactctaaaaaaatcaatgcagctggtattatcgccacattatcattacttattttatttttgggatttctaatccaaggaaatgtcaatatgcattctatcttaatattctcaattggcgttatattagttgtaattgaattatttgtagttggtgcagtaattggtattattggcatgatactgataactataagcataacaacgctcggtgataatttgctatttatgcttgcgaatgttatcgttgccttgattttaacgattgtagaatgggtgatattagtgaagattttcaacagaaagattccgtttttggataaagttatcttaaaagattcaactaattctgagtcaggttacaattctcatgataaccgctcgcacctcgtaggaaagactgctcaaacagttacagatcttcgacctgcagggattattttttgtgaaaacgaacgtattgatgctgtttcagatggcaactttattttacgcaataaaacggtgaaaatccttgaagttgaaggaacaagagtagttgtgagggaagtagattaa

SEQ ID NO: 421930 - DNA, 177 bp, Staphylococcus aureus; identical to SEQ ID NO: 405914

SEQ ID NO: 421931 - DNA, 1347 bp, Staphylococcus aureus
atgtcaacagttgcgtttcacacattaggttgtaaagtaaaccattatgaaactgaagcaatctggcaattatttaaagaagcaaactatgagcgcgttgactttgaagcgaatgctgatgtatttgttattaatacttgtacagtaacgaatacaggtgataaaaaaagtcgtcaaataattagacgtgcaataagacaaaatcctgatgctgtaatctgtgtatcaggttgttatgcgcaaacttcatcagctgaaattatggaaattcctggtgtcgatgtagtagttggtacacaagatagacataaactattaggttacattgatgaattccgtaaagaacgccaaccaattaatggtgttggaaatatcatgaaaaatcgtaaatatgaagaattagatgtcccatattttacagatagaacacgtgcgtcattaaaaattcaagaaggttgtaacaacttctgcacattctgtattattccatgggctcgtggcttaatgcgttcaagagatccggaaaaagtagttgaacaagcgacgcaactagtgaattcaggatataaggaaattgtattgacgggaattcatacaggtggatatggtcaagatttaaaagattataacttggcccaattattacgtgatcttgaaacgattaatggattagaacgaattcgaatttcttcaattgaagcaagtcaacttacagatgaagtaattgacgttttagaacgttcaacaaaagttgtgcgtcatttgcatattccattacaatctggttcagatacagtattaaaacgtatgagacgtaagtatacaatggatagattttcagaacgattaacaaaattgcataaagctttaccagacttggcagttacgagtgatgtaattgttggtttcccaggtgaaactgaagcagagttccaagaaacatatgattttatcgtaaagcataagttctctgaactgcatgttttcccttattctcctagaattggcacgccagctgcaagaatggatgaccaaattgatgaagaaattaaaaatgaacgggtgcataagttaattacgctaagcaatcaactcggaaagttatatgcgtctaaatttgatcaagatgtgcttgaagtaattcctgaggaacagggtgacacagaaggcacattagttggatatgcagataattatatgaaagtacaatttgaaggtgacgaatcactcataggtcaaattgtaaaagttaaaattacgcaagcaaattatccattaaatgaagggcaagcaattaaagttgttgatttcgcaacaaataaatctgatagagaagttttagtttaa

SEQ ID NO: 421932 - DNA, 753 bp, Staphylococcus aureus
gtgcaacgttatttcatagaccaaaacgctgatgtaagtcagcgtttttttattacaaaaaaagaagatattcatcatataacaaatgtaatgagatatgatgttggtagtaaaattattttaacttttaatgatcaaacagtttatttatgtgaaattgctgacataacaagtgataaaattgcagttgatttaaaagaaaaacaaaatattaatacagaattgccagttgatgttacgatttgcagtggactaattaaagctgacaaatatgagtggttgctacaaaaagctactgaattgggtgcttcatcatttatagctgtgagcatggaacgctcaattgttaaattaaacgaggcgaaagttgccaaaaagatagagcgttggcaaaaaataattaaagaagctgctgaacaaagctatcgtttagtgattccatctattcaattcgagtcgaatttaaaattaatttgtgatactattgataattatgactatattcttattgcatatgaagaggaagcaaaagatggtgagttaagcaatttcaagcaaactttacaacaattcaaggctcaggataaagtgttgatgatttttggtcctgagggtggtttgtcagaaaatgaaatttcattatttagtaatactagtacagttgttggtcttggaccgagaattttacgggcagaaactgcgccattgtatgcgttaagtgcaataagttatgaaaaagaattaatggggtga

SEQ ID NO: 421933 - DNA, 939 bp, Staphylococcus aureus; identical to SEQ ID NO: 411044

SEQ ID NO: 421934 - DNA, 1140 bp, Staphylococcus aureus
gtggccaaaagagactattatgaagttttaggcattagtaaagatgcttcaaaagatgaaatcaaaaaagcgtatcgaaagctttcgaaaaaatatcatccagatattaacaaagaagaaggtgcagatgaaaagtttaaagaaatttctgaagcctatgaagttttaagtgatgataataaacgcgcaagctatgatcaatttggacatgatggtccaaaaggttttggtggacaaggattcaatggctctgactttggcggttttagtggcttcggtggcggcggttttgaagatatctttagctctttcttcggtggcggcagacaaagagatccaaatgcaccgcaaaaaggtgatgatcttcagtatacaatgacattaacatttgaagaagcggtatttggtacaacaaaagaaatttcaatccgtaaagatgtaacatgcgaaacatgtcatggtgatggtgcaaagcctggaacaagtaaaaagacttgtagttactgtaatggcgctggtcatgtagctgtagaacaaaacacaattttaggtagagttcgtactgaacaagtttgtcctaaatgtaatggaagtggtcaagaatttgaagaagcttgtccaacatgtcacggaaaaggtactgaaaataaaacagttaaattagaagtgaaagtacctgaaggtgtcgacaatgaacaacaaattagattagctggtgaaggctctccaggcgtgaatggaggacctgctggtgatttatacgtagtatttagagttaaaccatctgaaacatttaaacgtgatggtgatgatatttattacaaattaaatgttagcttcccacaagcagctttaggcgatgaaataaaaataccaacattaaataatgaagttatgttaacaatccctgctggtacacaaacaggtaagcaattccgcttaaaagaaaagggtataaaaaatgttcatggctatggatacggagatttatatgttgatattaaagtagtaacgcctactaaattaacagatagacaaaaagaactaatgaaagaatttgcccaattaaatggtgaagaaattaatgaacaaccttcgaattttaaagatagagcaaaaagattctttaagggagaataa

SEQ ID NO: 421935 - DNA, 1833 bp, Staphylococcus aureus
atgagtaaaattattggtatagacttaggtacaacaaattcatgtgtaacagtattagaaggcgatgagccaaaagtaattcaaaaccctgaaggttcacgtacaacaccatctgttgtagctttcaaaaatggagaaactcaagttggtgaagtagctaaacgtcaagctattacaaacccaaacactgttcaatctattaaacgtcatatgggtactgattataaagtagatattgaaggtaaatcatacacaccacaagaaatctcagctatgattttacaaaacttaaaaaatacagctgaaagctatttaggtgagaaagttgacaaagctgtaattacagtacctgcatactttaacgacgctgaacgtcaagcaactaaagatgctggtaaaattgctggtttagaagttgagcgtatcattaatgaaccaacagctgcagcattagcatatggtttagataaaactgataaagatgaaaaagttcttgtttttgacttaggtggcggtacatttgacgtatctatcctagaattaggtgacggtgtattcgaagtactatcaacagccggtgacaacaaacttggcggtgatgattttgaccaagtaattattgactacctagttgcagaattcaaaaaagaaaatggcgtagacttatctcaagataaaatggcattacaacgtttgaaagatgctgctgaaaaagctaaaaaagacttatcaggtgtatcacaaactcaaatctcattaccatttatctcagctggtgaaaacggtccattacacttagaagtaaacttaactcgttctaaatttgaagaattatcagattcattaattagaagaacaatggaacctacacgccaagcaatgaaagacgctggcttaacaaactcagatatcgatgaagttatcttagttggtggatcaactcgtattccagcagtacaagaagctgtcaaaaaagaaatcggtaaagaacctaacaaaggtgtaaacccggacgaagtagtggcaatgggagctgcaatccaaggtggcgttatcacaggtgacgttaaagacgtagtattattagacgtaacaccactatctttaggtattgaaattttaggtggacgtatgaatacgttaattgaacgtaacactacgattcctacatctaaatctcaaatctattcaacagcagtagataatcaaccatcagtagatgtacacgtattacaaggtgaacgtccaatggctgcggataataaaacacttggtagattccaattgactgatattccaccagctgaacgtggtaaacctcaaattgaagtaacgtttgatatcgataaaaacggtattgtaaatgtaactgcaaaagacttaggtacaaataaagaacaaagaattacaattcaatcaagttcttcattatcagacgaagaaatcgaccgtatggtaaaagatgctgaagttaacgctgaagcagataaaaaacgtcgtgaagaagtagacttaagaaacgaagctgacagtctagtattccaagttgaaaaaactttaactgatttaggcgaaaatattggtgaagaagataaaaaatctgctgaagagaaaaaagacgctcttaaaactgctttagaaggtcaagatatagaagatattaaatctaaaaaagaagaacttgaaaaagtgattcaagaattatcagcaaaagtatatgagcaagcggctcaacagcaacaacaagcacaaggtgcaaatgctggtcaaaacaacgatagtactgtagaagatgctgaatttaaagaagtaaaagacgacgacaaaaaataa

SEQ ID NO: 421936 - DNA, 627 bp, Staphylococcus aureus
atgacaaataaagacgaatcagttgaaaaaaacactgaatcaacagttgaagaaacaaacatcaaacaaaatattgatgattcagttgaacaagctgaagaaagtaaaggtcatttacaagatgaagcaatagaagaaacgtctgacgagaatgttattgaagaaatagatccaaaagatcaaaaaattaatgaacttcaacaattagcagatgaaaacgaagagaaatatttaaggctctacgctgagtttgaaaattataagcgtagaattcaaaaagaaaatgaaataaataaaacatatcaagcacaacgtgtgttaacagatattttaccagcaatagacaatatagaacgtgcacttcaaattgaaggtgatgatgagacttttaaatctcttcaaaaaggtgtacaaatggtgtatgaaagtttgattaacgcactaaaagataatggtcttgaagttattaaaactgaaggtgaagcatttgatccaaatattcaccaagctgtagttcaagatgataaccctgattttgaatctggcgaaatcactcaagaactacaaaaaggatacaagcttaaagatagagtattaagaccatcaatggtcaaagtaaaccaataa

SEQ ID NO: 421937 - DNA, 978 bp, Staphylococcus aureus
atgattacagataggcaattgagtatattaaacgcaattgttgaggattatgttgattttggacaacccgttggttctaaaacactaattgagcgacataacttgaatgttagtcctgctacaattagaaatgagatgaaacagcttgaagatttaaactatatcgaaaagacacatagttcttcagggcgttcgccatcacaattaggttttaggtattatgtcaatcgtttacttgaacaaacatctcatcaaaaaacaaataaattaagacgattaaatcaattgttagttgagaatcaatatgatgtatcatcagcattgacatattttgcagatgaattatcaaatatatctcaatatacaactttagttgttcatcctaatcataaacaagatattatcaataatgtacatttgattcgtgctaatcctaatttagttataatggttatcgtattttcatcaggtcatgttgagcatgtacatcttgcttcagacataccgtttagtaatgataaactaaatacaatatcaaattttgttactaacaaactaactgagtttaatcagaatttacaagatgatattgtctcttttgttcaatcagagcaggaagaaatatttatcaataaattgataaatacgatgaataatcatatttctaatcaaagtaatagcatttatatgggtggaaaggttaaacttattgatgcattgaatgaaagtaatgtatcttcaattcagcccattctacaatatatagaatcaaatagaattgcagaattattacaagatatatcttcaccaaatattaatgtaaaaattggtaatgaaattgatgacagcttaagtgatatttcaattgtaacaagtcaatatcattttgatgaaacgttaaaaggtcaaatcgctgtgattggacctacagctatgcattatcaaaatgtcattcaattattaaatagaatttggtaa

SEQ ID NO: 421938 - DNA, 1158 bp, Staphylococcus aureus
ttggataaacagtctgagaagcggggcattaaaatgacggtacaaagtgcatatatacatattccattttgtgtaagaatatgtacatattgtgatttcaataaatattttatacagaatcaacctgtagatgagtacttagatgcactaataacagaaatgtctacagcaaaatataggaacttaaagaccatgtatgtaggtggcggcacaccaacggccctttctattaatcagttggaaagattacttaaagcaatacgtgatacgtttacaatcacaggcgagtatacatttgaagcaaatcctgatgagttaactaaagagaaagtccaactattagagaaatatggagtaaatagaatttcaatgggcgttcaaacattcaaaccggagttattgtctgttttaggtagaacgcacaatactgaagatatttacacttcggtgttaaatgctaaaaacgcaggtattaaatcaatcagtttagatttaatgtatcatttaccgaaacagacgattgaagattttgaacaaagtttagatctagctttagatatggatattcaacatatttcgagttacggcttaatacttgaacctaaaacccaattttataatatgtatagaaaagggttgcttaaacttcctaatgaggatttaggtgctgacatgtatcagttgttgatgtctaagatagaacaatctcctttccatcaatacgaaatatctaattttgcattagatggccatgaatcagaacataataaggtttactggtttaatgaggaatattatggatttggagcaggtgcaagtggttatgtagatggtgtgcgttatacgaatatcaatccagtgaatcattatatcaaagctataaataaagaaagtaaagcaattttagtatcaaataaaccttctttgactgagagaatggaagaagaaatgtttcttgggttgcgtttaaatgaaggtgtgagtagtagtaggttcaaaaagaagtttgaccaatctattgaaagtgtctttggtcaaacaataaataatttaaaagagaaggaattaattgtagaaaagaacgatgcgattgcactaacaaagcgagggaaagtcataggtaatgaggtttttgaagctttcctaataaatgattaa

SEQ ID NO: 421939 - DNA, 987 bp, Staphylococcus aureus; identical to SEQ ID NO: 417887

SEQ ID NO: 421940 - DNA, 693 bp, Staphylococcus aureus
atggcaaaattagttactgaaaacatttcgaagcggtttaaaaatcaagatgtattaaagcatattaatatcactttagaaaataacgaagtttatggattacttggtattaatggagccggtaaaacgacacttatgaaaattatatgtggcatacttcaacaagattcaggggaaattaaattagataatagaccaatgacacgaaatgatttgcacaaagttggttcgcttattgaaacacctgcgacatataatcatttaagtgcacaagataatttgaaaattgtgtgtttaaatgaaagcgttgatttcagcgaaattaatagtgttttaagcttagtcaatttaaatgtcgataaaaagaaaaaggttaaggacttttctttaggtatgaaacaaagacttggaattgcaatggcattaattaaaaagccagaaattttagtattagacgaaccatctaatggtttagacccatatggaatccaagaacttagagaacttctaaaattattaacagaacaaggtactagtattattatttcaagtcacattttatctgaaatccaagttttagcagatcatatcggtattattcatgagggtgagctaaaatatcagcaaagaaataacaaagatgaaaacttagaagagatattcttcaaaataacgaaaggagattacaaatga

SEQ ID NO: 421941 - DNA, 255 bp, Staphylococcus aureus; identical to SEQ ID NO: 414747

SEQ ID NO: 421942 - DNA, 447 bp, Staphylococcus aureus
atggaacaaatcacattaactaaagaagagttgaaagaaattatagcgaaagaagttagagaggctataaacggcaagaaaccaatcagttcaggttcaattttcaacaaagtaagaatcagccataacgattttgatgaaattaataaaaagtttgcttatacagaacgtttaagaggtgctgacaatctcggcttaggacatccattatctttgaagaaatatcaacacggaataggatgttatgaaaattacaaagcatacgctagtgaaattcacgaccacattagaaaacttacattatcagcttttggtgtaacgcttaattctgatttgaaagagagtgaatacaacctagcagcaaaagtttatcgagaaatcaaaaactattatttatacatctatgaaaagagagtttcagaattaactatcgatgatttcgaataa

SEQ ID NO: 421943 - DNA, 852 bp, Staphylococcus aureus
atgcaacaatttaaatggattaatattctaaaaggttttgctatgggaacgagtgacttggtacctggtgttagcggtgggactatcgcattattgttaggtatatacaatcaatttatctcttcaattagcggcatattctcacgacgtttttggccaagttttacatttttaatccccattataattggaatgttactggcaatgggatcactaagtaatctttttaattatttattaagccaacaccatattccaactatgtttttctttggtggattaatcattggtatcgttccatatttattgaaaatttctaactataaaacgtcatttacaactaaacattacatgatggttatagctggtatcgctatcttaattgttattacattaatgaataatggcgataaacatgctggagaaacacttactctatcaactagtcttattattaaatattttattgcaggtatgtgtgcatctagtgctatgttactcccaggtatttcagggtcatttatgttattagtatttggcgtctatggcacagtcatgctagcaatatctgaagttgttaaacttaactttgccggtcttcctatattacttgcagtcggatttggcgtgcttgctggattcattatttcaagcaaaattatccagtatttcctaacacatcataaactaatgacttttgcattaatcattggttttgttgttggctccctctttgcagtatttccaggtttaccaactaatatcgtgatgtggttcgtttcattagtagtatttatcatcggttttattgtaagtttgactttaggtcgaattaccgctgaaaatgaataa

SEQ ID NO: 421944 - DNA, 465 bp, Staphylococcus aureus
atgaattttgaaggtaaattaattggaaaagatttgaaagttgcaatcgtagttagtcgatttaatgattttatcactggaagattacttgaaggtgcaaaagatactttgattcgacatgatgttaatgaagacaatattgatgtagcatttgtgccaggtgcgtttgaaattcctttagtagctaaaaaattagcctcatcaggaaattatgatgcaataattacattaggatgcgtaattcgcggtgctacgtctcattatgattatgtttgtaatgaagtcgcgaaaggtgtttctaaagtaaatgatcaaactaatgtaccagtcatatttggtattttaacgactgaaagtattgaacaagctgtggaaagagcaggtacgaaagctggcaataaaggtgcggaagcagcagtaagtgcaattgaaatggctaatttattaaaatctataaaagcatag

SEQ ID NO: 421945 - DNA, 402 bp, Staphylococcus aureus
atgattatcaccttacgacccttaggtcgtaaggcaactgatatagaaaacgctctacactcaatgttttcatctttaccttctcatatatttaaatcaattacttttgattgtggtaaggagttctcaaactggaaaacaatatgtaactgtcacgatatatttatattttttgctgatccaggcacgccatcacagcgaggtttaaatgaacattctaacggaatacttagacgcagtggattagataaagaactagatttcaatttagtaacagacgatcatatcatcagtgttgctcaaaaaatcaatcatcgtcctagaaaatctttaggttatagaacaccattggaagtatttatgagtttcatcgaagatgataaactgtccagcttaatttga

SEQ ID NO: 421946 - DNA, 411 bp, Staphylococcus aureus
atgattatcaccttacgacccttaggtcgtaaggcaactgatatagaaaacgctctacactcaatgttttcatctttaccttctcatatatttaaatcaattacttttgattgtggtaaggagttctcaaactggaaaacattatgtaactgtcacgatatatttatattttttgctgatccaggcacgccatcacagcgaggtttaaatgaacattctaacggaatacttagacgcagtggattagataaagaactagatttcaatttagtaacggatgatcatatcatcagtgttgctcaaaaaatcaatcatcgtcctagaaaatctttaggttatagaacaccattggaagtatttatgagtttcatcgaagatgataaacttgtccagcttaatttgacaatctaa

SEQ ID NO: 421947 - DNA, 264 bp, Staphylococcus aureus
atgtcatctgacacaaacagtttagcacatacaaaatggaattgtaagtatcatattgtctttgcacctaaatacagaagacaagcgatatatggaaaaataaaaaaagatatagggattatattacgtcaattatatgaaagaaaaggtgtagagataattgaagcagaggtatgtaaagatcatatccatatgttagtaagtataccacccaaacttggggtatcatcatttgttggctatttaaaaggaaaagtaatttaa

SEQ ID NO: 421948 - DNA, 222 bp, Staphylococcus aureus; identical to SEQ ID NO: 409020

SEQ ID NO: 421949 - DNA, 345 bp, Staphylococcus aureus; identical to SEQ ID NO: 407362

SEQ ID NO: 421950 - DNA, 255 bp, Staphylococcus aureus; identical to SEQ ID NO: 414747

SEQ ID NO: 421951 - DNA, 681 bp, Staphylococcus aureus; identical to SEQ ID NO: 421709

SEQ ID NO: 421952 - DNA, 411 bp, Staphylococcus aureus
ttgcaaggcttaaataaagatgatgctagaaaagaatttggagaagaacaagtacatatttggcgtcgttcttatgatgtgaaaccgcctgctgaaaccgaagaacaacgtgaagcttacttagctgatcgtcgatataatcatttagataaacgtatgatgccttattctgaaagtctgaaagatactttagttcgagtgataccattttggacagatcatatttcacaatatttgctagatggtcaaacggtattagtttctgcacacggaaattcaattcgcgcattgattaaatatcttgaagatgtgtcagatgaagatatcattaattatgaaattaaaacaggtgcaccgcttgtttatgaattaacggatgatttagaagttatagataaatactacttataa

SEQ ID NO: 421953 - DNA, 219 bp, Staphylococcus aureus
atgaaaacaaaatataagttgaataatactaaaaaggtcgcaaatgcatttggcttaaatgaagaagatacaaatctattaataaatgcagttgatttggatattaaaaataatatgcagaatatttcaagtgagttacaacaaacagagcggtctaagcaaaaacaatataatgaagagctacaaaatttagctaagcaaaaccgaattattaaatag

SEQ ID NO: 421954 - DNA, 1479 bp, Staphylococcus aureus
atgagagaaaattttaagttacgtaaaatgaaagtcggtttagtatctgttgcaattactatgttgtatataatgacaaacggacaagcagaagcatctgaaggtagccaaactgttaagaatccaaaggtaaatgcaactgaagaaatcaaagctgaatcgcaaccggttcaaaacaatcaagaagtaagttcggaccaaacaaaaaagaattttgttaatttagatcctattaaacctggagctcaaaaagtaacaggtactacattaccgaatcaattaatcttgttaagtattgataaaaaagacgtgagttcagttgatagtgaaggaagcgaatttataacatctaaagatgatggaacgtttgaatatcctctgaaaaacagaaaaattgtacataatcaagaaattgaagtgacttcatcatcaatggaaggattagaggaagaagacgaagagacagaagtagaagaacaagaaagcaatgatgctactcaaaaagttacaactcctcgatatgagaaagcgtataaaataccggaagatcgattaaataaagcaaatggacaccatcaagttttcattgaacctattacagaaggatcaggcattattaaaggtcatacgtctgtaaaaggtaaagttgctctatctattaataataaatttattaattttgaagaaagagctaaagatggaattagtaaagaagatactaaagctagttccgatggtatttggatgcctattaatgaaaaaggatattttgattttgatttcaaaaaaaatccttttgataacttagagttaaagaaaaatgatgagatctcattaacatttgcacctgatgatgaagatgaagcattgaagtcattaattttcaaaactaaagtaacgagtttagaagatatcgataaagcagaaacaaaatacgaccatgcaaaagtgaaagaagttaatgttttgaaagatgttaatgaagagttacatgtagatgaaatctatggcagtttgtatcatacaaaacaaggtaaaggtattcttgataaacaaggaacaaaagagattacagggaagactaaattcgcgaatgcagtagtaaaagtatattcagagttaggtgaagcacaactgtttcctgatattcaagtagatgaaaatggtaaatttagctttgatgctgaaaaagctggtttcagattgcaaaatggagagacattgaattttgcagtagttaaacctattactggtgacctattacatcaaggatttgtctctaaatatattgatgtatatgaatctccggaagaaaagaaagaacgtgaatttgaagaaaaacttgaaaacacgcctgcatatcataaattacatggtgataaaattgtcggctatgatgttcaaggtaatccatcaacttggttttatccattaggtgaaaagaaagttgaacgtaaggcaccaaaattagaaaaataa

SEQ ID NO: 421955 - DNA, 1707 bp, Staphylococcus aureus
atgaaagtcgaagtttataaaggagcgcaaggtaaacataaccttaaagattatgaagaaacatataatacttttgattggaaagacgtagaacaagcattttcttggagtgaaactggaaaaatgaacatggcatatgaatgtatagatcgccatgtagatcaaggattaggggataaaatagcgttaaattacaaagatgagtacagaaaagaatcgtatacttataaagatatgcaacggttatctaataaagcagcgaatgttttgtctgaacatgcagaagttgacaaaggtgacagagtatttatatttatgtcgcgtacacctgaactatattttgcgttgttaggtgttttaaaaattggtgcaattgttgggccgttatttgaagcatttatggaaaaggcagttgcggatagattagagaacagtgaagctaaagtgttaattactaataaggcattgttacctcgagtacctgtagataaattaccgaacttgaaaaaaattgttgtcgtagatgaggatgtagaagacaattacatagacttcattagtttgatggaaactgctagcgatgaatttgacattgaatggttaaagtcggatgatggtttgattttacattatacatcaggttctactgggcaacctaaaggtgtattgcatgttcaacaagcaatgttagtgcactatatttctggaaaatatgtattagatttacaagaagatgatgtttattggtgtacagcagatccaggttgggttacaggaacatcttatggtatttttgcaccatggttaaatggcgctacaaattgtatagctggtggtcgcttttcaccagaacagtggtatagtatgattgaagattttaaagtgacgatttggtatacggcaccaacagctttaagaatgttaatgagtgctggtgacgatattgttgagaaatatgacttgtcatcgttacgttcgattctatcagtaggtgagcctttaaatcctgaagttataaaatgggcgaaaaaagtatacggtttaacggtgttagatacttggtggatgacagaaacaggtggacatatgattgttaactatccaacgatggacgtcaagcttggctcaatgggcaaaccattacctggtattcaagctgcaattatcgatgatgcaggtaatgaattaccaccaaatcgaatgggcaaccttgctataaaaaaaggctggccatcaatgatgtatcgtatctggaagaatccagaaaaatataaatcatattttattggagactggtatgtatctggtgattcggcatataaagatgaagatggttacttctggttccaaggacgtgttgatgatgtaattatgacagctggtgaacgagttggaccatttgaggttgagtctaaattggttgaacacgaagcagttgccgaagcaggaattattggtaaacctgatccggttcgcggtgaaataattaaggcgtttgttgcactgagaaaaggatatgaaccaacagacgaattaaaagaagaaattcgtttatttgttaaagaaggtttgtcggcacatgcagcaccacgtgaaatcgaatttaaagataaattacctaaaacacgctcaggtaaaattatgagacgtgtattaaaagcttgggaattaaatttagatgcaggggatttaagtacaatggaataa

SEQ ID NO: 421956 - DNA, 735 bp, Staphylococcus aureus; identical to SEQ ID NO: 407375

SEQ ID NO: 421957 - DNA, 789 bp, Staphylococcus aureus; identical to SEQ ID NO: 410948

SEQ ID NO: 421958 - DNA, 357 bp, Staphylococcus aureus; identical to SEQ ID NO: 408993

SEQ ID NO: 421959 - DNA, 444 bp, Staphylococcus aureus; identical to SEQ ID NO: 421160

SEQ ID NO: 421960 - DNA, 171 bp, Staphylococcus aureus
atgttaagttatggtggattgcttaaacaaaagcataaaattttaaatttagatgatgttgaagatggtaatttaattaatacaagttacgaagataaaacaacagacgaagagaaaaagcacattcaattgcagcaatttggaatttcgaaaagcaaaattattatttaa

SEQ ID NO: 421961 - DNA, 213 bp, Staphylococcus aureus; identical to SEQ ID NO: 408503

SEQ ID NO: 421962 - DNA, 213 bp, Staphylococcus aureus; identical to SEQ ID NO: 408503

SEQ ID NO: 421963 - DNA, 159 bp, Staphylococcus aureus
atggatgcgatgagccgcattgagaccgcaggtctcttttttttatgtctaaaacgtcaaaataaaagcaaacacaaagaaagatggcttggcgaagtgaaaacgtttgaatctgacgaaacaagaaaagagcgcaacgagtttagtagagctaaatga

SEQ ID NO: 421964 - DNA, 927 bp, Staphylococcus aureus
atgttaccttttaagaatttagatattaagtcagacactttttatataatcaatgaaatttctaaaggtggtacattttggatagatacagtcaaattaaatgtaaaaccttttaaaatagacatttataggattaaaaaagacttagacaaattaaatgttaagctagtagagtatagcaatttaattcctaaaaacattaatttaaaaccagacagctttataaagcagatgagagaaatagttggattatacgaattgttagaaaataaagatttcgaaggttttaaaatgaatagtaataatttttataaactaaatttttgcggtaaaaaattattattatataagtataattcggaattatataatgtatactctatggaatttatgaatcgttttgagatatttacgaaagatatggtagaaaaagtgccgattatttatatattcactaaaagtaagattaaagatatattgaattttgatattaatctcgttaaaaaatttattgagacagataaccttaatgaaccttctgattttaaatgggaaaaagttaataatttctcattagagttaatagatgtttacgattatacaaaggcaatagaatatttagatttagctgagtatatattgcataaattagataacaaagataatgacaaacgttttattaatttaattaataaagctcaaataatgaaaagaaaaaatatagaagttaaagaaataatatctgaattgatagaattacatagtaaattaataagtgttgataaagaattagcttatctaaatatcaacgtaatagcaggcagtaaacaggaagctgaaactagatatcaaaatttagacaaaaacaatttgaaaaactttgaagactatccgatttttaagttgtatcaagatttagttaattaa

SEQ ID NO: 421965 - DNA, 405 bp, Staphylococcus aureus; identical to SEQ ID NO: 412910

SEQ ID NO: 421966 - DNA, 453 bp, Staphylococcus aureus
atgaaagaacgttacttaatcattgatggatacaatatgataggacaatcaccaacgctaagcgccattgcaaaagagaatttagaagaagctagaatgcaattaatagatgcaattgcaaattataatgcagttatttcagatgaaattatttgtgttttcgatgcttatgaccaatcgggtgttgaaagagaatacatgtatcatggcgttaaaacgatttttaccaaggaaaaagaaacagctgatagtttcatagaacgttatgtttatgaactttatgacaagcatactaagcatattacagttgtaacaagtgatatgagtgagcaacatgctatctttggatcaggtgcatatagaatatcatctcgcgaaatgtggagagatttaaaagaaaatgaaattgatgtgagtaaatcattagatgatataagtgaaaacaagccatga

SEQ ID NO: 421967 - DNA, 744 bp, Staphylococcus aureus
atgaaaagtgttaaaaggttgagtgaagaattaggggttagtaagcaaacgatttttaataatattaagcgattgaatatagagacaataaaacaggaaaacacttcgtttattaaagaagataccgatatagaaaaaatcattcaaagagtaaatgaaaataaaaagaaatatggttttgaaagtactactgaagacaaacaaaaaacaggatcggataatattaattttgaatcgaaaagcgatgctcaaatagtagaaatccttaaaaatcagattgatactttaaataatcaaattgaaaaacaagaaagtcgtcatgaaacaacaattgaattttacagaaaagagttgcaagaaagatcaaaattgcttgaaaatcagcaagttctggcattagagagtaataaaaagattcaaaaattagaaaatcaattagaaaaagaaaaacaccttaattatccctttgatacatctactaacactagacaaaacgttgatgcacaagaaaaaacatatactactaatcctgtaaatattaaccgagatcaggaagaaactaaagaaacagagattcaatataaggatatatctagaagtcaaagcgacgaaagtacacaaggtgaagaagcacaaagagaagacgttccagctaatctaaataacaatgatagtgatatagaagaaaagagtgaagaaacggaacctaaaaaggggttttggagtcgtttgtttggtagctaa

SEQ ID NO: 421968 - DNA, 681 bp, Staphylococcus aureus; identical to SEQ ID NO: 421622

SEQ ID NO: 421969 - DNA, 267 bp, Staphylococcus aureus
gtggatataagtgggcgcccatacctatcattcaatgcatcattaagtaaagaaaaagttggtacgtttgatacggagttagtagaagaattttttagagcggtcgtaatcaatgcaagattaacaacgcatattgatttaattcgtggaggtaatacacaccatgaaattgaagctatattcaaagcgttttcccgtgcattaggcatagcgctaactgcaactgatgatcagcgtgtgccgtcatcgaaaggtgtgattgaatga

SEQ ID NO: 421970 - DNA, 300 bp, Staphylococcus aureus
atgatttatcaaaaacaacgaaacacagctgaaacacaactaaatatttcaatatcagatgaccagtcaccatcgcatattaatacaggtgtgggctttttaaatcatatgttaacattgtttacattttatagcggtctgtcattaaacattgaggcacaaggtgatattgacgtagatgatcaccacgtaactgaagatatcggcattgtcattggccaattgttacttgaaatgattaaagataaaaagcatttcgttcgttatggaacgatgtacattccaatggaggaacattag

SEQ ID NO: 421971 - DNA, 156 bp, Staphylococcus aureus
atgatgacaacagataaaccaaaagatgcggatatacttgaacgcgtcaaagatatacttaataaaaaagaaagaaaaaaaataataatggctcgctcctgtaaattattacgggggcgagttttaatttgtgtaacattttgcagaaatctgtaa

SEQ ID NO: 421972 - DNA, 174 bp, Staphylococcus aureus
atggtaatttcacaaacaaaaatttcagcaaaatcagtgactaattttttagacactgcccatctacatgcaaatttaaaaattagcataaaaaatgggcaaccatgccggttgaacgctatagttcctgcaggggcaaaaaagcttaaaaaaacgctagctttgataagctaa

SEQ ID NO: 421973 - DNA, 336 bp, Staphylococcus aureus
ttgctggaagtaaataaatacgtaaagcactacattgatttattcaaagagggcaaagtattatttaataaagaacgtattcaacttatagattatttagagaaatatatttttcctagagatgatatttactttgacgatgaagcaattgaaaatttgtgtaatttcgcaagagaattctattttgaattagacgattttcaaaaatttattagtgcttttttatttctatactacaaggaagataatgaaaatttttacgaccaattttttataatgggtggtcgtggtgttggtaagaatggccttgtatctgtatgggcacactatttttaa

SEQ ID NO: 421974 - DNA, 402 bp, Staphylococcus aureus
atgaaaatcaaagttaaaaaagaaatgagattagatgaattaattaaatgggctcgaagtaatccggagttatcaaagggcaaaaatttttttacaacaggtaacggcgatgacatcgttcgttttcaaaaggacacaaatgagtgtacgacatcagtctgtgtgccacttgacgcttcttttgaagtcgaatttgaagaagtagtaaccaaagatacggtatttgataagttgtttgaagtgtacgagtttcaagaaggagattataccgctatatcacacgctaatattagtataaacaaacgtttagatgaacattgtttccctatcaaagcattctatattttaaacgacgacctaactatgacgttaatttggaaagatgggagattggtagaatga

SEQ ID NO: 421975 - DNA, 348 bp, Staphylococcus aureus; identical to SEQ ID NO: 416921

SEQ ID NO: 421976 - DNA, 348 bp, Staphylococcus aureus; identical to SEQ ID NO: 416921

SEQ ID NO: 421977 - DNA, 348 bp, Staphylococcus aureus; identical to SEQ ID NO: 416921

SEQ ID NO: 421978 - DNA, 255 bp, Staphylococcus aureus
atgatagctacaacaagagaaatagcaaaagctacaggaacaagtctacaaacagtaataacaacacttaaaatcttagaagaaggaaatattataaaaagaaaaactggagtattaatgttaaaccctgaactactaatgagaggcgacgaccaaaaacaaaaatacctcttactcgaatttgggaactttgagcaagaggcaaatgaaaaacaagaaaatgcattatctgattattattctttcaaggagtag

SEQ ID NO: 421979 - DNA, 720 bp, Staphylococcus aureus
atgagcaaaaacataataatgaagagtattttagctttcactgttttaacaacaatcggcggaatcgaaacacaaattaacaaacacgaatatactgctaaggcttatgaagatgatagagttttggtgaacgacgtttctaaaagtccttacaatgctatagtagctattggtaataacagacacggaggaacaggttttgttattggaaagaatacaattcttactaataagcatgttattaatcatggtggcgttataagggttgttccaatggcaactaaaaactccaatggtggattatatgaggtggaaaaagtaataccatatccagggaatgaagatttagctgtattacatgttaaggaaaataccgtggaacctcctaataaaaaatttagtgaaaattcaggtatatttactttgaatgaagaaaacagtataaaaaatggaagtgctgtacacacggctgggtatccaggtaataagccggtaggtacaatgtggaaatcagatggaacagttacttcgatatctggaacacattttgttatgagtttatattcaacaaaaggacaatctggatcaccgatatatgataatcaaaatcgagttgtcgggatattaaaaggcggacctgacaacgacttaagtgttacaacaggtgtattatttgatgataaaatcagaagttttattaaaagtaatataaaaaaatag

SEQ ID NO: 421980 - DNA, 282 bp, Staphylococcus aureus; identical to SEQ ID NO: 415785

SEQ ID NO: 421981 - DNA, 471 bp, Staphylococcus aureus; identical to SEQ ID NO: 421022

SEQ ID NO: 421982 - DNA, 339 bp, Staphylococcus aureus; identical to SEQ ID NO: 412838

SEQ ID NO: 421983 - DNA, 282 bp, Staphylococcus aureus; identical to SEQ ID NO: 415785

SEQ ID NO: 421984 - DNA, 282 bp, Staphylococcus aureus; identical to SEQ ID NO: 415785

SEQ ID NO: 421985 - DNA, 624 bp, Staphylococcus aureus
atgcgtattgaatttaatccaaacaaacttacacgagatgaaatgatttggttaaaacaaaatataataagctacatggaagatgacggttttacaagattagatttagcctttgattttgaagatgatttgagtgactactatgcaatgtctgataaagcagttaagaaaactattttttatggtcgtaatggtaagccagaaacaaaatattttggcgtgagagatagtaatagatttattagaatttataataaaaagcaagaacgtaaagataatgcagatgctgaagttatgtctgaacatttatggcgtgtagaaatcgaacttaaaagagatatggtggattactggaatgattgctttagtgatttacatatcttgcaaccagattggaaaactatccaacgcactgcggatagagcaatagtttttatgttattgagtgatgaagaagaatggggaaagcttcacagaaattctagaacaaaatataagaatttgataaaagaaatttcgccagtcgatttaacggacttaatgaaatcgactttaaaagcgaacgaaaaacaattgcaaaaacaaatcgatttttggcaacatgaatttaaattttggaaatag

SEQ ID NO: 421986 - DNA, 555 bp, Staphylococcus aureus
atggtggttgtagctagaaatattacaagaaaaaaacaaggcaaagcctttggttttataggatcaattgtagctttaggtgaagggttaggtccttcaatagggggaataatagcacattatattcattggtcttacctacttatacttcctatgattacaatagtaactataccttttcttattaaagtaatggtacctggtaaatcaacaaaaaatacattagatatcgtaggtattgttttaatgtctataagtattatatgttttatgttatttacgacaaattataattggacttttttaatactcttcacaatcttttttgtgatttttattaaacatatttcaagagtttctaacccttttattaatcctaaactagggaaaaacattccgtttatgcttggtttgtttgctggtgggctaatattttctatagtagctggttttatatcaatggtgccttatatgatgaaaactatttatcatgtaaatgtagcgacaataggtaatagctgtctcttatacacatctccgagcccacgagactag

SEQ ID NO: 421987 - DNA, 477 bp, Staphylococcus aureus
atgtctgataaagcagttaagaaaactattttttatggtcgtaatggtaagccagaaacaaaatattttggcgtgagagatagtaatagatttattagaatttataataaaaagcaagaacgtaaagataatgcagatgctgaagttatgtctgaacatttatggcgtgtagaaatcgaacttaaaagagatatggtggattactggaatgattgctttagtgatttacatatcttgcaaccagattggaaaactatccaacgcactgcggatagagcaatagtttttatgttattgagtgatgaagaagaatggggaaagcttcacagaaattctagaacaaaatataagaatttgataaaagaaatttcgccagtcgatttaacggacttaatgaaatcgactttaaaagcgaacgaaaaacaattgcaaaaacaaatcgatttttggcaacatgaatttaaattttggaaatag

SEQ ID NO: 421988 - DNA, 282 bp, Staphylococcus aureus; identical to SEQ ID NO: 415785

SEQ ID NO: 421989 - DNA, 282 bp, Staphylococcus aureus
gtggattactggaatgattgctttagtgatttacatatcttgcaaccagattggaaaactctccaacgcactgcggatagagcaatagtttttatgttattgagtgatgaagaagaatggggaaagcttcacagaaattctagaacaaaatataagaatttgataaaagaaatttcgccagtcgatttaacggacttaatgaaatcgactttaaaagcgaacgaaaaacaattgcaaaaacaaatcgatttttggcaacatgaatttaaattttggaaatag

SEQ ID NO: 421990 - DNA, 282 bp, Staphylococcus aureus; identical to SEQ ID NO: 415785

SEQ ID NO: 421991 - DNA, 1062 bp, Serratia marcescens
atgagtgaaatgtttgatgtcaatgcggcggtgtatcccttcccgcctaaaccggtaccgctggacgtagccgaaaaagccttttatcgcgagaagatcaaaaccctgctcaagcagcgcaatgcggtgatggtcgcccactattataccgatccggaaatccaggcgctggcggaagaaaccggcggctgcgtggcggattcgctggaaatggcgcgcttcggcagcgcccatccggcttccacgctgctggtggccggcgtgcgtttcatgggggaaaccgccaagatcctcagcccggaaaaacaggtgctgatgccgacgctgtttgccgaatgttcgctggatctgggctgcccggaagaggagtttcatgcgttttgcgacagccatcccgatcgtaccgtggtggtctatgcgaacacctcggcggcggtcaaagcgcgcgctgactgggtggtcacttccagcatcgccgtcgagctgatcgaacacctggacagcctgggcgagaagatcatctgggcgccggatcgccatctcggcagctacgtgcaaaagcagaccggcgccgacgtgctgtgctggcaaggcgcctgcattgtccatgacgagttcaagactcaggcgctgcggcgcatgaaggcgctctatccgcaggcggccatcctggtgcatcccgaatcgccacaggcggtggttgaattggcggatgcggtgggatcgaccagccaactgatccaggcggcgaaaacattgccgcatcaacagctgatcgtcgccaccgatcgcggtatcttttacaagatgcagcaggcctgtccggacaaggagctgttcgaagcgccgaccgccggagaaggggcgacctgccgcagctgtgcgcactgcccgtggatggcgatgaatggcctgaaggcgattgccgaagggctggagcaggggggcgcgcagcatgagatccacgtggacgccgcgctgcgtgagaaggcgctggtgccgctgaaccgcatgctggatttcgccgctcagcttaaaatgcaggttaaaggcaacgcttaa

SEQ ID NO: 421992 - DNA, 726 bp, Serratia marcescens
atgagcttcttcagtaccagcaatattctggtgcacattccgcttggcgcgggcggttacgatctgtcgtggatcgaagccatcggcacgctgttcgggttgctgtgcatctggtacgccagcaaggaaaaaatcatcaactacctgttcggcctgatcaacgtcacgctgttcgcggtgattttcttccagatccagctgtacgccagcctgctgctgcagctgttcttcttcggcgccaacatttacggttggtatgcctggagccgccagacccaggataatcaggctgagctgcagatccgctggctgccgctgccgaaagcgttggcctgggcggcggtctgcgtcatcggcatcggcctgatgaccttcaatatcgaccgcgtgttcgcctggctgacgcagatcgcggtggcagtgatgcaagggctggggctgaacgtgcagatgcctgagctgcagccggacgcgttcccgttctgggattcggcgatgatggtgctctccatcgtggcgatgattctgatgacgcgcaagtacgtggaaaactggctgctgtgggtggttatcgatgtcattagcgtggcgatcttcgcctaccagggggtgtacgcgatggcgctggagtatgtcattctgacgctgattgccctgaacggctcctggctatggatcaagagcgccgggcgcaatggttccaacccgctctcttccgcaccttaa

SEQ ID NO: 421993 - DNA, 963 bp, Serratia marcescens
atgtcggacactccacacgtacacctgccgaaagacagtaatagtaaacgcctactgaccgcttttttagtcaccgccgtctttatggtggccgaggtggtcggcggcctgttgtccggctcgttggcgctgttggccgacgccggccacatgctgaccgatgccgccgcgctgctggtggcgctgatggcggtgcacttctcccagcgcaagcccaacgcgcgccacaccttcggctacctgcgcctgaccaccctggcggccttcctcaacgccgcggcgctgctggtgatcgtggtattcatcctgtgggaggcgatacggcgtttcttcgagccgcagccggtgatgggtaccccgatgctgatcatcgccgtagcggggctgctggcgaacctgttcgccttctggctgctgcatcgcggcagcgaagagaaaaatatcaacgtgcgcgccgccgcgctgcatgtgctgggcgatctgctcggctcggtgggcgccatcgtcgccgccatcgtcattcttgccaccggctggacgccgattgacccgatcctgtcggtgctcgtctcctgtctggtgctgcgcagcgcctggcggctgctgaaggagagtttccacgagctgctggaaggcacgccgcaggaggtcgatatcgccaagctgcaaaaagacctgtgcctgaatatcccggaagtgcgcaacatccatcacgtgcacgtctggcagatcggcgaacagaagctgatgacgctgcatgcgcaggtgatcccgccgcatgaccacgatgggctgttgcaacgcattcaggcttatctgttggaacactacaagattggccacgtgaccattcagatggagtaccggcactgcgagacaccggactgcggtatcaaccgggtaccggagccgagtgaacactcacatgccgaagcccactcccatctgggacatcgccactaa

SEQ ID NO: 421994 - DNA, 3201 bp, Serratia marcescens
atgatgcgccgcgccctgctgctgctgttcctgtggtgcggtctggcgcaggcggcggagccggtgcgctatcagctggtcagcaatctgaatacccccgagaatatgctgatcgtcggcgagaaaaacccctggcgcgaccgtacgctgcgcgtcggcatcgtcagtgagaacaccagcccgtacaacatcatcgtggatgacgatctgtatgggctgaatgccgactacctcggctatatccagcaggtgaccggcattcgcttcgccatttacggctttgccgatctgacgcagctggagcaggcgctgcacgacggcaagatcgatctgctgtacggcatcccgcagagtgaggcgctgcacggcctggcgatctctcagccctattacgtcagcaacctgcgcgtattgcgcgatcgcagcaacgatcggccggtgatgctcaactccgccaacgcccgcgtcgcgatcggcgcgctgaccgacatgcagtccggcggcgctctgcaggcggtcgcgtcgcagatccagcgctacgacaacaatctgcaggcggtctactcgctgctcaacggcagcagcgactactttatcgccgacgaggccagcgccagctttatcatcgatcagctgcagctcggccagctctatcagattgaaagcaacgagaacctgggcaacctgtccttcgtgttcgccgccgacgactcgcggctgatagacacgctggacaccgccatcgccgacgcgccgatggagctgatgaacgccctgcagggccgctggagcaagaagatccccagctacctcgacaccggcaatgccgatctgacgacgatggagaagaattgggtggcgagccaccgcgtggtttactacgccgccatcgaaaacaacttcccgttcgcctaccgcggctccgacggccagccgcgcggctacgccatcgacattctcaacatcatcgcgcaaaacaccgggctgcgtttcgcgccgctgtgggcgcgcaacgccgagcaggccgatctgctggtgcagtccggccaggccagcttccgcgccgccctgccgctggcgcgcggcgtcaaggcgcgctacggcgccagcatgccgatccaccgttcgctgtggggggtttacgtcggccagcacgccaacggcatttccacctggagcgatttggccggcaagcgcatcggcgtgctgcagggcgatttggcgcaggggctggtgccggaacaggagcaaaccatcagcttcgccgacagcaagtcgatgtacgacgcgctggccaacggccagctggatgcgctggtggataacgtcatctccgccaactttttggcgctgtcgcgctattccggcgccatcaagctggcctttgccgccaacaacatcccctacccggtggccttcggcgtgcgccgcgatcaacctcttctgttggcgatccttgataagaacctgatgcagatcccggcggacaccctgcaatcgctgcgcgacgagtggatcgtcgatcgcagcaacctgatcgacgcggtgaacgacaaccgcatgccgccgcagaccacctggctgctggcgctgctggccgccgccaccgtgctgctgctggcgctgacgctgcgccgtttcatgctgcagcgccgtgaaaaacgcgaacgcgaagaactcgagcacgcgcgccgccgcgccgaagcggaaaaccgcatgaagagcaaattcctcgccaccgtcagccatgagctgcgcacgccgatgcacgccatcctcggcctgctggagctggagctcaaacgccaacccgcgccggaaggcctgccggtgatatacagctcggcctcatcgctgctcaacctgctcaacgacctgcaggatcacgcgcggttggaaaccggctcgctgacgctggcaccgaaaccggtggtgctgcgcccctgggtagcgcgcatcgacgccctctaccggccgctgatcggcgagcggccgttgacgctgagcgtggtggcggatccggcgctgccggaggcggtgattattgatggtgagcgtttacttcaggtggctaacaacctgataaacaacgcgataaagtttacgccgcgcggcgccattcaggtcgagatcggctggcgcgcgcaggatgagcggcagggggaattgcatctgacggtgaacgacagcggctgcggtatcgccgccgatgaaatagacaagctgttccaaccgttttaccgcgcgcgcggcgcgcaacgcatctcggtgcagggcaccggtttagggctgtcgatctgcaaagagatcgtcgaacagatgggcggccgcatcgagctgcgctcgcagccgggcgtcggcacccgcgtcgaggtcgcgataccggtcgagctgagcggcgcggcgccggttgccgccccggaggaaagcccctttgctatgccgtcttccgccttgcgtaccgcgctgatcgacgatcatcccaccaatctgttgctgatggaacgccaactgcgccacttcgggctgcaacccgcccgcttcgaacaaggctatacgctgttgaaggcccagcgccgtcaaccgttcgatctgctgtttatcgactataacatgccgcgcccggacggcctgacgctggccaggctgatccgccgcgacgaacagcggctgcaacgctcgccttgccgcatcgtgctctgttcggcagacgtgcaggagtttacccgcattcctccggggctggtggcgatcgaccacttcctgaccaaaccgatttcactggcggcgatcggccaggtgttggctcagcaaccgcaggtgcaggaagcaaagtcagtccttactgacctgcgacaaacgctggccgaaatggcgggtggcgatcgcgccatgctgcagcggctggcgcagacgctcggcgatacgctgcggcaagaccggcagcggctcgcggacgccgtcgccgcgaacgactggccgcgcctggagcaggcggcgcaccgcatcaagggcagcctgctgatgctgcaactgccggaagccgcgcagctgtgccagcagctggtggaaaccgcacgtcggggcgcgcttgccgccgccgcttatactaaattaaaggcgttagtggcgcagatagtgccggagctggacgctctgctcgccgccgccccctctttggctatgcataaggatgaataa

SEQ ID NO: 421995 - DNA, 606 bp, Serratia marcescens
atgccctctctgttattagttgatgaccacccggtggttcatgtcgcactggaagcggcgctaatgaaatcatcccgcccctaccgcctgcaggcggcgcaggacgacgtccaggcgctggccctgctggccgaggccgctttcggcctggtgatcctggatatcggcctgccgcaggtcgacgggctgcagctgttgaaaaaaatccgccgccgctacccgcagcagccgatcctgatctataccgcgcaggaggccgaggtctatgcgcgcatggcgcatgccgccggcgccaacggtttcgtcaacaaaggcagctcgttggcagagttgttgcaggcgatcgagcaggtgctggacggtgaaacccacttccccgccgccgcgctggctgaagaggcgccgacggcggacggcgggctgctcacccccaaagagctcgaggtgctgggcttgttgagccaggggctgtccaacctgcagatcgccgatcggctgcacatcagcaacaagaccgtcagcacccacaagaagaacatccagcgcaaaaccggcgccggcaacctgctggagctggtggcggtgtttaaagagctggcgccatga

SEQ ID NO: 421996 - DNA, 1053 bp, Serratia marcescens
atgaattaccaaaacgacgatttacgcattaatgatattaaggaactcctgccgccggtggctttgctggagaaattcccggccactgaacgcgcagcaaagacggtgtcccaggcccgcagcgcaattcacaatatcctccgcggcagcgacgatcgcctgctggtggtgattggcccttgctctatccacgatacgaaagccgccaaagagtacgcggggcgcctgctggcgctgcgtgaagaactgagcggcgagctggaagtggtcatgcgcgtatacttcgaaaaaccgcgcaccaccgtgggctggaaaggcctgaacaacgatccgcagatggacaacagcttcaacatcaacgacggtctgcgcctggcgcgcaagctgctggtggagatcaacgacagcggcctgccggccgccggcgaattcctcgacatgatcacgccgcagtacctagcggatttgatgagctggggcgccatcggcgcgcgcaccacggaatcgcaggtgcaccgcgagctggcctccggcctttcctgcccggtcggcttcaagaacggcaccgacggcaccatcaaggtggcgatcgacgccatcaacgccgccggcgcgccgcactgcttcctgtcggtgaccaaatggggccactcggcgatcgttaacaccagcggcaacggcgactgccacattatcctgcgcggcggcaaagagccgaactacagcgcggcgcacgtgaaggacgtcaaagccggcctgagcaaagccgggctgccggcgcaggtgatgatcgacttcagccatgccaacagcagcaaacagttcaaaaagcagatggacgtgagtgctgacgtttgcgggcagattagcggcggtgaaaaagcgatcatcggcgtgatgatcgaaagccacctggtggaaggcaaccagaacctcgaaagcggcgaaccgctggtttacggcaagagcgtgaccgacggctgcatcggctggcaggacaccgaaaccgtgctgcgcgatctggcggcggcggtgaaagcgcgccgcggataa

SEQ ID NO: 421997 - DNA, 1221 bp, Serratia marcescens
atgacctattcctttcaggacgaaagaattatgacaagcaatacctcgcagccgctggggctgcaccggattaaattccatgggaaaggcggcgagtacttcgcgatttggttggttaacgcattattgaccatcgtgacgctgggcatctattccgcctgggcgacggtgcgccgccgccgctatttttacggcaacacggaattggacggcgatcgtttcgactaccatgcgcagccgctgcaaattctgaaagggcggctgttggtgatcggcggcctcatcgtattttatatcctgttggcggtaacgccactgctggggctgctggctttgctggtgttgcttgccctgctgccgtggatcgttatccgcagctggcgctacaatgcgattatgtcgagctatcgcggcgtgcgttttaattatgtttgccgcaccgggcgcgcttattgggcgttactgttctgcccgctgttactgattatcgggctttatgtcgccttaatcattttgctcagcattggcagcggttttgacagcatcaacgccatcggcctgatgttggtgttgacgctgctgttggccgtgccggcattcgccgccgtcaacggtattattagcgcgctgcagcacgatctgtacgttaataacctgtttttcgggaatacgccgtttattgccgagctgaaaaagtcggcctttatcaaatttgccttgatcggcctgctcattttcctgccgtttatgttggcggcgctggtgtgtatggggtcgttcattctgtcgctgtaccaaatggtattgatgggcatgctgacggatgaaaccgccgatttgctggtgttggaaaatattggcagtctgctgctgatgatggtggtgctgctgattggcgccttgatcgccggcagctatcaggtcgtcgcccaacgcaactatctgtttaatcaggcgacgctgaacggcaacgttaaactgcgctcttccatgcaaacgctgccgtatatggggctgttgatcaccaataccctgatcaccctgttctcgctcggtttcgccgtgccggtggcggaagtgcgccacgcccgttatctggcggagtgcacggcggttgaaggcgatctggcgttgctggacatcgcggcacatcaggaaaccgccaacagcgcggtggccgaagaagcggtgcaggcgctggatctgggcggcagcttctga

SEQ ID NO: 421998 - DNA, 1035 bp, Serratia marcescens
atgatcctcgagggcgcctatcagttgccggggcgggccgcacgtgaggcggctcgcctgctggtgaacgaaagcggcgagggcgtgacgctgcagcggcaggatgagcaacgttacatccccttggccgacattaccgtctctgcggcgctgggcaatatcccgctgacgctgaccttcaaggatggcgcgcgctttgtgccggatgacgatgcggcctttcgccgctggttctatcagcgtcgttcgccgggctgggtgcatcgcctggagcgccacaaacgcggcgtcgccgtggcgctgctgatgacgctgctggcggtcgtggcctacgttaacgtcgtgctgccgtgggcgagcagcgagatcgccatgcgcatccctacctcggtggaacagacgctgggcgaacacacgcagacgtttttgagccaaagcggctttgaaccctccgcattgccggccgagcggcagcaggcgttgcagcagctgttccggcaggtgatgccggccgagatgcgccaggagcgtacgccgctgtcgttgaagctgatggcggcgcccggtgcgccgaacgcctttatgttgccggacggcacgctggtgctcagcgatgggctggtcgccctgtcgaaaaacgacgatgggctggcggcggtgatgctgcatgagatggggcatcacgcttatcgccatccgatgcgcatgctggtgcgttcgtcactggtggcgttgacgctgatgtggatgaccggcgacgtcagcggcatcggcgacacgctgctgcagtctgcgtccttcgtgaatgagatgcagttttcccgcggcatggagcgtgaggcggatgcgtttgcgatagcggaaatgcagcgccaggggcgttcgctggcgcaaatggcggcgatctaccgcgcgttggcgcaggcgcctgaacgcgaaacggctgacggctgggcgctgccggcctggctcagcacccatccggcgatgcaggaacggctggacgcggtgaacgaggcgatggcgcagcagtaa

SEQ ID NO: 421999 - DNA, 753 bp, Serratia marcescens
atggctgtaactaagctggttctggtgcgtcacggcgaaagccagtggaaccaagaaaaccgcttcaccggttggtacgatgttgatctgtccgacaagggccgcaccgaagcgaaagcagcaggcaagctgttgaaagaggaaggtttcactttcgacttcgcttacacctccgtactgaagcgcgcgatccacaccctgtggaacatcctcgacgagctggatcaggcctggttgccgaccgaaaaatcctggaagctgaacgaacgtcactacggcgcgctgcagggtctgaacaaagcggaaaccgccgaaaaatacggcgacgagcaggtgaaacaatggcgtcgcggcttcgcggtgaccccacctgagctgaccaaagaagacgaacgttaccctggccacgatccgcgctacgcttcgctgaccgagcaagagctgccgctgaccgaaagcctggcgctgaccatcgatcgcgttattccttactgggacgaagagatcctgccacgcatcaagagcggcgagcgcgtgatcgttgcggcgcacggcaactcgctgcgcgcgctggtgaaatacctggataacctgagcgaagacgaaatcctcgagctgaacatcccaaccggcgtgccgttggtgtatgagttcgacgagaacttcaagccaatcaaacgttactacctgggtaacgccgacgagatcgctgcaaaagcggccgccgtggcaaaccagggtaaagcgaagtaa

SEQ ID NO: 422000 - DNA, 348 bp, Serratia marcescens
atgcgtctgattactgcacttccattgctggcgggcttaatgctgagcaccaatctgatggcggccgacgcgacgacggcgacgaaaacgccttcgccggcgcaggcggctcaacagaaacgcatgaccgactgcaaccagcaggcatccaccaaatcgctgaaaggcgccgatcgttccaccttcatgagcacctgtctgaaatccgaaggctccgccgcgacgggcaaaaccctgacgccgcagcagcagaaaatgaagaactgcaacgccgacgccaagaccaaagatctgaagggcgacgcgcgtaaaaccttcatgagcaactgcctgaaaaaatcggcctga

SEQ ID NO: 422001 - DNA, 1044 bp, Serratia marcescens
atgctgaccgcaacctcggcagtcgcccccgatgggcaaccttatcagctgacgcagctgcaaaacgccggcggcatgacagtgacgctgatggactggggcgccacctggctgtccgccgtcttgccgctcaaatccggcgaaagacgcgagttgctgctcggctgccgcagcccggcggactacccgcgtcagggcgcctatctgggcgccaccgtcggccgttacgccaaccgcatcgccaacgccagtctgctcatcgacgggaacccccatgcgctggccgccaatcagggcgcccaccagctgcacggcggccccgacggttttcatgcccgccgctggcgccgggtacagcatgatgcgcagcaggtctgctatgtgctgcactcggcggagggcgatcagggctttcccggcaatctcgacgtgcaggtttgttaccgcctgactcatgacaatcgcctggaaatcagctatctggcgcaggtcgatcgaccctgcccggtcaacctgaccaaccacgcctatttcaacctggacggcgccggcaccgacgcccgcgcccagcggctgcagctgttcgccgatcgctatctgcccgtcgacgccgagggcattccctgcgccgatctgacgccggtggacggcagcggcatggattttcgccagccgaaaacgctgctgcaggatttcctgcgcgacagcgaccagcagcgggtaaaaggctacgatcacgcattcctgctgcatcgtacctgcggggcgctggagagcccggcggcccatttgtggtccgccgacgggcaagtgcaaatgagcgtgttcaccgacgcgccggcgctgcaactctacagcggcaattacctggccggcacgccggcgcgcgatggcggcagctacgccgaccatgccggcgtggcgctggagagcgagttcttgccggacagcccgcaccatcccgagtggccgcagccggactgctggctgcagccggggagccgctatcgcagcgccacgcattatcagttttatcctatctga

SEQ ID NO: 422002 - DNA, 1152 bp, Serratia marcescens
atgagcctgaaaccgcttacccattccctgtttaccgaacacttcggctacgcgccggcgttgaccatccaggcgccggggcgggtgaacctgatcggcgagcataccgattacaacgacggcttcgtgctgccctgcgccatcgattaccaaaccgtcatcgcctgcgccaagcgcgacgaccgccagatccgcgtgctggccgccgattatcagcatcagcaggatcaattctcgctcgacgatccgatcgtcagccaccccgatcagcgctggtcggactatgtgcgcggcgtggtgaagcaccttcagcgccgcaacaccgacttcggcggcgcggatctggtgattgccggcaatgtgccgcagggcgcggggctcagctcctccgccgcgctggaagtggcggtgggccaggcgctgcaggcgctctatcagctgccgctggacggcgtagcgctggcgctgaacggccaggaagcggagaaccagttcgtcggctgcaactgcggcatcatggaccagctgatctccgcgctcggccggcgcgacagcgcgctgctgatcgactgccgctcgctggaaacccgtgcggtgccgatgccggacaacgtcgcggtggtgatcgtcaactccaatgtgcaacgcgggctggtggacagcgaatacaacccccgccgcaaacagtgtgaagacgcggcgcggttcttcggcgtcaaggcgctgcgcgacgtcagcctggaacagttcgaagcgcgtcaacatcagttggatccgctggtggccaaacgcgcgcgccatgtcatcagcgagaatgcccgcacgctggcggcggccgacgcgctggcggcaggcgatctgcaacgcatgggccagctgatggcggagtcccacgcctcgatgcgcgacgactttgaaatcaccgttccgccgatcgataagctggtcgagatcgtcaaagcggcgatcggcccgcgcggcggcgtgcgcatgaccggcggcggctttggcggctgtgtcgtcgcgctgatgccgcaggatctcgtggagacggtgcgtgccgccgtggcgcacgagtatccgcggcaaaccggcggattacaggaaaccttctatgtctgccaggcttcgcaaggcgccggcctatgctga

SEQ ID NO: 422003 - DNA, 1053 bp, Serratia marcescens
atgacagaatttaaccctatcgatcatccgcaccgccgctacaacccgctgagcggccaatgggtgctggtctcaccgcaccgcgccaagcgcccctggcagggccagcaggaggccgtcccgacggaaacgctgccggcgcacgatcccgactgtttcctgtgcccgggcaacgcgcgcatcaccggcgatcgcaatccggattatcgcggcacctacgtcttcgccaatgatttcgccgcgctgctgagcgatacgccgccggcgcccgacagccaggatccgctgatgcgcagccagagcgcgcgcggcgtcagccgggtgatctgcttctctcccgatcacagcaagaccctgcccgaactgacgctgccggcgctggagcaggtgatcgccgcctggcaggcgcaaaccgatgagctgggcaagcactacccctgggtacagctgttcgaaaacaaaggcgcagcgatgggctgctccaacccgcacccgcacgggcaggtctgggccaacagttttctgccgaacgaggccgaacgcgaagatcgcctgcagtacgagtattttcaagaacatgcctccccgctgctgctggactacgcgcagcgcgagctggccgccggcgaacgcatcgtggtgaacaccgagcactggctggcggtggtgccctactgggccgcctggccgtttgaaacgctgctgctgccgaaagcggcggtgcagcgcattaccgatctcagcgcggcgcaaagccaggatctggcgctggcgctgaagaagctgaccagccgctacgacaacctgttccagtgctccttcccctattcgatgggatggcacggcgcgccgttcaacggcgccgacaaccgacactggcagctgcacgcccatttctatccgccgctgctgcgttcagccagcgtgcgcaaatttatggtcggttacgagatgctggcggaagcccagcgcgatctgaccgccgaacaggccgcagagcgtctgcgcgccgtcagcgatattcattaccgtgaagccggagcccaagcatga

SEQ ID NO: 422004 - DNA, 819 bp, Serratia marcescens
atgtggggcgtactggctgcttcgttatttttcttgccgtttaaccggctgatagcctgggttatcctggccgcctcggcgggcatggggctttatcatggggtgttgacgccgctcagcctgggttgcctgttggccatcgtggcgctggcggggctgcgtcaccattttcgcgagcggcgtagtctggcgatcgcgttcgaagggttggtggtcgccggctgcgtggcgctgttcttgcacctggtgccgggcatccacaatcaactgatgatcgacggtgaaaaagccggcccgctcagcgcgccgttcactatgtattacaacttcgacaaggcgatggtgcccttcctgctgttcgcctgcttgcccacgctgttttccgctgaacgcggcggcaacgtcggcaaagcgggctggattgcgctgctgctggccgtgccggcgctgttgctgctggccgtggcgctgggcggcttaaaaatcgagctgcatgcgcccgcctggatcctgcctttcgtgatggcgaacctgttcttcgtctgtatggccgaagaagcgctgtttcgcggctacctgcagcagcgcctcagccagtggctgggcgcctggccggcgctgatcgtcgcttctctggtgttcggcgccgcgcatttggctggcggcatgctgatggtaatcttcgcgacgctggccggggtgatctacggcctggcgtggatgtggagcggccgcctgtgggtgccgattctgttccatttcgggcttaatctgacccatctgctgttctttacctacccgctgtatcagcatccttaa

SEQ ID NO: 422005 - DNA, 573 bp, Serratia marcescens
atgtccgctgcgttgattatcatcgacctgatcgaggatctgatcgggcccaaagggcgcgccaaccactgccgcgaacaggtgacggcaagccacctgctcgccaacgtcaatgccgccgcggcctacgcccgggtgcgaaaaatcccggtgatttgggtgcggacgggatttgccgacgattatcatgacatcccgctccactcgccgctgttcaaccatttgaaacagataggcgcgctgcggctaaacggcccgggctgccgctgggcgcccgatctgcatcaggaggagaccgatctgcagtttgataaaacggcggtcagcgccttctccggtaacaatttgttagcctggctgcggcaacatcggtgccatcatctgctgctggcgggcgtcagcacgtcgctcgccatcgagagcaccgcgcgtcaggcgcacgacgccggcttccaggtgaccgtgctgcacgatctgtgcgcagcccccacgcaggagctccaccagcagagcctggacaccctgcaaaacctggcggaagtcgcccgttcgcaggcctggatgcaaggctga

SEQ ID NO: 422006 - DNA, 1488 bp, Serratia marcescens
atgtcgtcgttgcacatttcgcaaggttcattccgcttaagcgatacccgcaccctgacgctggacgcgctggaaatccaggccggcgacagctgggccttcgtcggcgccaacggcagcggcaaatccgccctggcgcgcgcgctggccgacgaactggttctgctgagcggtgagcgccgcagcgactttcagcacgcggtgcgcatctccttcgaacagctgcaaaaaatggtcagcgacgagtggcaacgcaacaacaccgatctgctcagcgcggacgaggacgacaccggccgcaccgcggcggaaatcattcaggaagaggtgcaagacgccgcgcgctgtgagcggctggccgcgcagttcggcatcaccgccctgctgacgcgccgcttcaaatacctctccaccggcgaaacgcgcaaaaccctgctgtgccgggcgctgatgcccgagcctgacctgctgatcctcgacgaacccttcgacggtctggacgtgcactcgcgcgcgcagctcgccacgctgctgagcgagctttccgcccagggccagaccgtggtgctggtgctcaaccggttcgacgatatcccggattttgtccggcaggtgggcgtactggcggactgtaccctgaccaaccgcgggccgcgccgccaggtgatggcggacgcgctggtggcgcagctggcgcacagcgaaaacctcagcgggctggcgctgccggaggaggaggatccaacgcaaaaggtgtcgctgccggcggatcggccgctgatcgtcctgcgcgacggcgtagtcagctataacgaccggccgatcctcaatcatctcgactggcaggttaaccccggtgaacattggcagatcgtcggcccgaacggcgccggcaaatccacgctgctcagcttgatcaccggcgatcacccgcagggctacagtaacgatctgacgctgttcggccgccgccgcggcagcggggaaaccatttgggagatcaagcgccatatcggctacgtcagcagcagcctgcatctggattatcgcgtcaacaccagcgtgcgcaacgtggtgctgtcggggttcttcgattcgatcggcatttatcaggcggtttcggatcgtcagcggcagctgaccgagcaatggctggcgctgctcgggctcgacggcgcgcgcggcggcgccccgttccacagcctttcctggggccaacagcggctggcgctgatcgcccgcgcgctggtgaaacacccggcgctgctgatcctcgacgagccgctgcaagggttggatccgctcaatcgccagctggtgcgccgcttcatcgacgtgctgatcggccagggcgccacccagctgctgttcgtctcgcaccatgccgaagatgcgccgcagtgcatcacacaccgcctcagcttcgtgcccgacggcgagggcggctacggctaccaacagcaacggctggagcagacctccgcctga

SEQ ID NO: 422007 - DNA, 792 bp, Serratia marcescens
atgcaggccgaaattcttctgactctcaaactccagcaaaagctgttcgccgatccgcgccgcatcgcgctgctgaaacaggtgcagcacaccggctccatcagccagggcgccaaactggcgggcatcagctacaaaagcgcctgggacgccatcaatgagatgaaccagttggcggaacaaacggtggtggaacgcgccaccggcggtaaaggcggcggcggcgcacagctgacgcactatggccagcggttgatccagctgtatgacctgctgggccaggtgcagcaaaaagctttcgacgtgttgcagcaggacgatctgccgctcgacagcctgctggcggccatctcgcgcttctcgctgcaaaccagcgcgcgcaatcagttcttcggtaccgtcatcgaacgcgatcatcagcaggtgcagcagcacctggcgattttgttgaatgacggcaccactcgcctgacggcggccgtcacccagcaaagcgccgaccggctgcagctgacgccgggcaaagaggtgctggcgctgatcaaggcgccctgggtgcggttaagcgtcgataccgcggagcatgccggcgcggataacgcgctggcgggcgtggtggccggcattcagccgggcgccgaacacagcgaggtgctggtgacgctggcgggtggcgaaaccctgtgcgccaccctgacgacggcggagctgcagcgcctgcagctgagcgtcggcaccgccgtacacgccctgttcaacgccgatcgcgtgattgtcgccacgttgtgttaa

SEQ ID NO: 422008 - DNA, 2163 bp, Serratia marcescens
atgagtacgacacgccggcgtcttgtcacgcccagaaaatcgttatgccttgccgccgcctgggtcggcggcgcactgacggcgccgttggctttcgccgccgactgcgataaatcccgcaatgccacgggatgcgaagaacagctcaccgtggaggcggcggcccccgccgggcgctacgatgcgttgagcgccgtgagccgcagcgcttcgcagcttgggctgaccgctcgggagacgccgcgcagcgtcgatatcatcagcgcaagagcgatccaacagcggggcgatcgctcgctggccgccgccgtcgagcacgccactggcctgtccggcgtcgcttcgccgacgctgtccaacaacttttccgcgcgcggtttccggccgatcgcctggctgtataacggcgtggagatgcccggcagcacgctgcagctgggcgatccggcgcattacgacagcatcgagatactgcgcgggccgggatcggccttgaacggcctgagcgccgcgggcggcagcgtcaacctgatctcgcggcggccgaccttcagccgccagccgcttgagctcgattatggcttcggcagctaccgcagccagcgtctgcatctgggggccggcggcgcgctggtggacgatgcggtggcgtaccggctggacgtcagcggcaacgacagcggcagcaacgtgcagtacgaacgcgatcggcagaagcgggtttccggctcgctgctgtttaagctgacggacgatgcgctgttgacgctgagcctggaccgcatgctcaaccgcaccaacaacccttactacggcacgccgctgctggacgggcgcattgccggcgagctgcgcgacatcaattacaacaacctgaccgacagccgcatccagagcaacgccaccgcatttcaggccagtctggactggtttatgacgcccgaagtggagtggcataaccaattctattactacagcggctttcgcgagtggcgcaacgtcgaacgctttcgcgtcgcggcggcggcccggcccggcgacgtcaaccgcgactccttcggcgccctggcgcacgacgacgatctgatcggcaaccgcagttcgctggtgttcgatcgcgccatcgccggtttcgataaccggttgctggtcggcctcgatctgagcaagcggcattttcagtactactccaacggcttccccggatccgaagacgtgccgcttggcgcgccgccccgagagccgttcgcccagggaaccgaccgccaacgcgcgccggtgcgccacgttacccagaaccagtacgccgcctttcttgaagatcgcttcagcctgaccgagcgtttagcgctgctgggccagctgcgctacaaccatatgaacatggactggcgcttccaggggccgcaggaagagagccgcgcgcatacctacgttttcagcacctggagcctgggccccagctatgcattgaccgataacctcacgctctacgccaactacaccaccggccaggagccgggcaacgatctgttcttcctcagcccaacgcagaccgatctgccgctgacgcgagcgcgccagtgggaggccggcgctaaagggcagttctggggtaacaaaggcgaggcaacgctggcgctgtacgaactgcgcaaggacaacctgtttgtgcccgacgcgcagcggccggatgcgttgaacgcggtaggcaggcagacgtcgcgcggcatcgagcttggcgtggtgctgcgtcccgacgagcgctgggagctggccggcaacgccgcctacacgcatgcccgctacgacgactatcgcggcggcagcccgctgcgcagctacaacggcaatcgcccggcctatatcccggactggactgccaacctcagcgtgcattatcaggcgacggagcgcctggggctggcttcttcgctgcgctacgtcggcagcagttacaacgacgacgccaaccggcgcaagatgcgcgcgtacaccacgctcgatctggcggcggactatcagctgacgccgatcgtcgatgtcggttttcgcattcgcaacgccaccaaccagctgtacgcctaccagcgcacttacccggatcaggcgctgatcgcgccgccgcgcagttatgaaaccttcgtgtcggtcaggttctga

SEQ ID NO: 422009 - DNA, 990 bp, Serratia marcescens
gtgaaacgctggcttgctctgctgttgtgcgccttgggattgggcgggggcgcgccgctgcgtgccgatgcggccagcctgcaaaattgcggggtaacgcacgattacccgcagccgccgcagcgggtgctggtttacgccaacccggcgctggaaaacctgctggcgctggggctggccgcccgcgcgatcggcgtggtcgggtatgaccgcgcgcgcgatcccgcgccgacggccgatgcgctgcaggcgcccaccagcccggcgccgcccacggcggaagcgttgctgctgatgcggccggattttgtctattcggccagctattactggctgcacagcccggaaacgcccgatcgggcgcggctggcagaatggggcatcggcacttatctctcacccggcgcctgcagcggccagcaaagcgcgatcgccgccgcgctgacgtttgaagacattttcaccgagctgcgggagctggcgcgcattttcaacgtcagccgcgccggtgaagcgctggtcgaacggctgcgcgggcagctgagggcgctcgaaccacagcgtgctcagctgccgcatatgcgcctgctgtggtggtatgccggcgcgcaaacgccctatgtggcgggctgctgcggcgcgccaggtttgctgagccgcagcgtcggcagcgagaacctgttcggcgatcggcccgagctgtggccgacggtgtcctgggaaatcatcgccgcccgcgatccggatgcgatcgtgcttggcgatctgccgcgtggcggcctcggcgacagcgcggcggacaagatcgcctttctggagcatcacccgctgaccgcgacgctgcgcgccgtgcgtcagcggcgctacgtgatcctccccggttacgacatggacccttccgcccgcaccgtggcggcgttgggccgtttgattcggggcctggcggccttgccgccgcaggcgccgactttttccaacaaggaaccttga

SEQ ID NO: 422010 - DNA, 756 bp, Serratia marcescens
atgactgccgtttcattctcttcgctgctggactcctgggatcgccagcaggcggcctacatcgccgagcgggaagcgcgttttaacgcccagctggacgtgctggcgctggccgccggtcaggattttcacgtggtggatctggcctgcggcccgggctcgctgagcctgcgcattttgcagcgctttccgcaggccagggtgaccgccatcgatctcgatccgctgctgctggcagtggcgcgcggcgcgctggcggcgtacggcgatcggatccgcattctgcaggccgatctggcggatccggcctgtttttccgcactgtccggccccgcgccgcaggcggcggtgtccagcacggcgctgcactggctgatgcccgagcagcagctggcgctgtaccgcaacgtcgccgggctgctggccgacggcggcgtgttcctgaacgccgatcatcagcgctatgaccagcgccagccgcggctgaaagcgttggcggagcggcacgacgagcagacccaacagcgcgcctgggacaacggcgttgaggattgggatcgctggtttgcgggcgcgctgcaatcgccggcgttggccgcttatcaggccgagcgtgaagcgctgttcgccggccgcccggtgccgccgccgacgccggtggatttccagctcgcggccctcaggcaggccggtttcagcgaggcggggacggtgtggcagctgctggacgactatgtgatcgcaggctggaaatag

SEQ ID NO: 422011 - DNA, 1026 bp, Serratia marcescens
atgatccggcggttactgcccggccgtgaggccggctggctgctgttgctggcggcggcgctgccgctggccctgctgggcgccaccctgtcggggcccgcgccgatcgcgtggcacgacgcctggcgcatcgtgcttggcgtcagcggcggtgcggcgaccgacgccgatgtgtatcagcgcatcatctggtcgctgcggatgccgcgcgcgctgttggcggcgctggccggcgccggattggcgttggcgggcaccgtgctgcagtcgctgacccgcaacccgctggccgatccctgggtgctgggcatctcctccggcgccggcgtgggggcggtaacggtgctggtattggggctgggcggcggcctgttgtcggtgtccggcggcgcgtttatcggcgcgctgggggcgtttgcgttggtgatgctgctggccgggcgttcgctgcagggggagtccacgctgtttatcctggccggggtggcggtgacgcagttgctctccgcgctgacttcgctgatcaccctctggcaggcggacgccaacgccacgcgcggcgtgatgttctggctgctgggctcgttcagcgacgcgcgctggccgcaggtcgggctgtgcgggttggcgctggcggcggcgctgctgctgtgttggctgcgggcgggtgagctagacgcgctggcgtttggcggcgtgaccgccgcttcgctgggggtagcggtggctccgctgaagctgctgctgtatgtggtgaccaccgcgctgacggcggcgatcgtcgcgttcagcggtgcggtgggatttatcgggctgacggtgccgcacgtcgcccggcggctggtcggctcgcggcatcgacggctgttgccggccagcgcgctgtgcggcgcgctgttcgccgtggcggcggacaccctggccagaacgctgtttgccccgcgcgagctgccggtcggcgtgctgacggcgctgctgggggtgccggtattcctgctgttgctgtatcggaaggtcaatgcatga

SEQ ID NO: 422012 - DNA, 789 bp, Serratia marcescens
atgacgattgaaaaagcgcgatccggcctgtgcgccgaagcggtgagctggcgagcgggcgaacgcacggtgctggaaaatctggatttctgcgccttgcccggtgagatcaccggcgtgctcggcgtcaacggcagcggtaaatccacgttgctcaagctgctggccgggttgcagcccgccgccggaggccgcgtttggctggcagggcgccaaattaccgcgttttccgggcgggagcgcgccaggcgcatcgcctttctcgagcaatccgcccccggcgctttcgccctgccggtgaaggaggcggtgctgctggggcgcctggcccatatcggccgctggcgcggtttcggccccgaagatcgtcgcctcgccgggcaggcgatggagcaagtgggcatcagccacctggccgatcgcgattggcagcggctgtccggcggcgaacggcagcgggtgcacctggcgcgcgcgctggcgcagcagacgccgtggctgctgctggatgagcccgccaaccatctggatatcgcccatcagcagcagtttatggccttgctgcggcggctgaagctcagcgtggtggtgacgctgcacgatctgaatctggcggcctgttattgcgatcgggtggcgctgctgcagcagggcagggtctgtgcggcgggcacgccgcggcaggcgctgacgccggagcacattcgcgcggtgtacggggtggaagcccggctggcggcgcccgccggctatgcgccaccgctgatctactatcctgcggcgggatga

SEQ ID NO: 422013 - DNA, 150 bp, Serratia marcescens
atgttggaattattgaaaagtctgttgtttgccgtggtcatggtgccggtggtcatggcgctgatcctcggcctgatctacggttttggcgaagtgttcaacgtcttctccaaagtgggccgttcgaaagaaaaccgcacccagcactga

SEQ ID NO: 422014 - DNA, 774 bp, Serratia marcescens
atgaaacagcaatggactaaatgggttggcgggatcgtgttggcatcgggcctggtggcacaggcttcggcggcggaaaagatcaccgtgttcgccgccgcgtcgctgaccaacgcgctgcaggacatcgccacccagtatcaaaaaggcaaggacgtgcaggtggtttcttccttcgcgtcgtcctcgacgctggcgcgccaaattgagcagggcgccccggccgatctgttcatctccgccgatcaacagtggatggattacgccatcgacaaacagcagatggtgaaagacacccgctacacgctgctgggcaacgaactggtgctgatcgccgccaagagcgataagcaagacaagatcgccatcgacaagcagaccgactgggccaagctgctcagcggcggccgcctggctgtgggcgatccggatcacgtgccggccggcatctacgccaaagaggcgctggaacacctgggcgcctggagcgcgctggaaccgaaactggcgcgcgccaacaacgtgcgcagcgcgatggcgctggtggagcgcggtgaagcaccgctcggcatcgtctacggctccgacgcggtcgccagcgacaaggtgaaagtggtgggcgtgttcccggaagacagccacaaaccggttgaatatccgatggcgatggtgaaagatcgtcaaaatccgacggtcagcgctttctatacctatctgaagggcccggaagcggccgctattttcgaacattatggattcaccccgcgtaaatga

SEQ ID NO: 422015 - DNA, 690 bp, Serratia marcescens
atgattctgagtgagtacgagtggcaggcggttgagctgagcctgaaagtctccggtttggcggtggtctgcagcctgccgttcggcattctgatggcctgggtgttggtgcgttgccgctttcccggcaaggcgctgctggacggcgtcattcacctgccgctggtgctgccgccggtggtggtcggctatttgctgctgatcgccatggggcggcgcggcgtcatcggcgagtggctgtacgactggttcggcttcagcttaagctttagctggcgcggcgccgcgctggcatcggcggtggtggcgtttccattgatggtgcgcgctatccggctggcgctggaggcggtggatacccggctggagcaggcggcgcgcacgctgggcgccaacccgtggcgggtgtttttcaccgtcacgctgccgctgtcgctgcccggcgtcattgtcggcgtggtgctggccttcgcccgctcgctgggggagttcggcgccaccatcacctttgtctccaacattcccggtgaaacccgcaccattccgctggcgatgtatacgctgatcgaaacgccgggagcggaagccgccgccgcgcggctgtgcgcgatcgccattgtgctgtcgctggcttcgctgatggtgtccgaatggctggcccgctggggccgcaaacggatgggggtgtaa

SEQ ID NO: 422016 - DNA, 1068 bp, Serratia marcescens
atgctggagctggatttctcgcagcagctgggcgaccttaatctcaacgtccgcgccgatttgccggcgcagggcatcaccgcgattttcggcctgtccggcgcgggcaaaacgtccctgatcaacgccatcggtggcctgacccgtttgcagcaggggcgcatcgcgctcaatggccgcacgctggtggataccgccgcgggcctttgcctgccgccggaaaagcgccgtatcggctacgtgtttcaggatgcgcggctgttcccgcactatcgggtgcgcggcaacctgcaatacggcatggcggccggcatgcgcgcgcagttcaacaccatcgtcgaactgctgggcatcgggccgctgctcaatcggctgccgctgacgctctccggcggtgaaaaacagcgggtggcgatcggccgcgcgctgctgaccgcgccggaactgctgctgatggacgagccgctggcctcgctcgatctgccgcgcaaacgtgaactgctgccgtatctggagcggttggcacaggacgtcaacatccccatcctctacgtcagccatagcctggacgagatcctgcgcctggccgagcaggtgatggtgctggatcgcggcgaggtgcgcgcgttcggcgggctggaagccgtttgggccagcagcgcgctgcggccgtggctgcagcgtgaagatcagagcagcgtgctgcgcgtcagcgtgattgagcatcatcaacgctatgccatgaccgcgctggcgctcggcgatcaaaggctgtgggtcagcggcatcgacgccgaactgggcacccagctgcgcatccgcatcaacgccgccgacgtctcgctggtgctgcagccgccggtcaacagcagcattcgcaacgtgttgccggccaaggtaagcgagtgtctggacgtggacgggcaggtggaagtgaagctggcggtcggggaacacgtgctgtgggcgcggatcacgccctgggcgcgtgatgaactggcgatccgccctgggcagtggctgtacgcgcaggtgaagagcgtgtctatcagccgcgagagccgctaa

SEQ ID NO: 422017 - DNA, 843 bp, Serratia marcescens
atggctaacgataacgagaaccctatgagctaccgcgtcatcgccctcgatcttgacggcaccctgctggacaaccaaaaacgcatcttaccgcaatcgctggaagcgctggcgcaggcgcgcgccgccggcatccaggtggtggtggtcaccggccgccaccacgtcgctatccatccgttctaccaggcgctgcagatagataccccggccatctgctgcaacggcacctatctgtatgattttcagcagaagaaggtgttggcggccgatccgctggcgaaagatcaggccaggcaggtgctgcaaatgctcaaacagaccgacattcacgggctgatgtacgtcgacgacgccatgctgtatcaggagccgagcggccacgtgatccgctcgctggcctgggccgaaaccctgccggcggcgcagcgcccgacgctgctgcaggtcggcagcctggcgcaggcggccgacgacgcgcaggcgatctggaaattcgccacctcgcacaccgataccctggcgctgcgcgagtttgccgacacggtggagaaagagctggggctggcgtgcgaatggtcctggcacgatcaggtggatatcgccaaaggcggcaacagcaaaggcaagcgcctgcgccaatgggtggagtcgcaggggctgagcatggatcaggtggtggcgttcggcgacaactacaacgacatcagcatgctggaagcggtcggattgggcgtggcgatgggcaacgccgatgatgcgatcaaggaacgcgccgatctggtgatcgccgataacctgcagccgggcatcgccgaggtgatccgcacccgcgtactctag

SEQ ID NO: 422018 - DNA, 996 bp, Serratia marcescens
atgaagcaaatcgtttatgtcgccagcccggagagccagcagatccacgtttggcagttggacgacgccggcgcgctggcgctgctgcaaaccgttgacgtgccgggccaggtgcagccgatgacccttcatccggacaagacccacctgtacgtcggcgtgcgtccggcgttcggcatcgtcagctaccgcatcgaggcggacggcacgctgcagctggccggcatggcgccgctgccgggcagcccgacccatatttccaccgatttgcaggggcgttacctgttctccgcctcctacagcggcaactgcgccagcatcagcccgatcggccacgacggcgtggtgacggcgcctattcagcagatcgacggcctgaccgcgccgcactcggcgaacatcgatccgaccaaccagctggtgctggtgccttgcctgaaagaagaccgcatccgcctgttcaacctgagcctggcgggccagctgacgccgcacgcgcaggaagcggtggcgaccgccgccggcgccggcccgcgtcatatggcgttccaccacaacgacaagttcgcctactgcgtcaatgagctggacggcacggtggacgtgctggccatctcggaaaacggcggcaaatacaccgtcacgcagacgctggacatcatgccggccgacttcgacggcacccgctgggcggcggacatccatatcacgccgaacggccgcttcctgtacaccagcgaccgcaccgccagcattctgaccatcttcagcgtttccgcagacggcggcacgctgagcgtggtcggctatcatccgaccgaagcgcagccgcgcggtttcaacatcgatcacagcggccgtttcgtgatttcgtccggccagaaatccgatcacatcgcggtgcatgaaattgaccaggccagcggtaagctgaccacgctggcgcgttatccggtgggcaaaggcccgatgtgggtgagcgtgctggcgaagtaa

SEQ ID NO: 422019 - DNA, 483 bp, Serratia marcescens
atggcttttcgtttgtacagcaacgatctgcaggacggcggcaaactgccgcagcagcaggttttcaacgacatgggctatcacggcgataacctgtcgccccacctggcctgggacggcgtgccggccggcaccaaaagcttcgtgatcgccgtttacgatcccgatgccccgaccggctccggctggtggcactggatcgtggccaacattcccgccgacgtgcgcgagctgccgcagggcgcgggctccggcaaagctccgctgcccgccggcgcgctgcagacccgcaccgacttcggctcagccggctacggcggcgcggcgccgccgagtggcgaaagccaccgctaccagttcaccgtgcatgcgctggacgtggagcgcatcgatgtggatgagggttccagcggcgcgctggtgggctttaacgtccatttccacagcctcggcagcgccacgctgacggtgacgttcaactga

SEQ ID NO: 422020 - DNA, 402 bp, Serratia marcescens
atgatctcactgaaaaaacgcacgccgtggttcggctggctgcgccgttgggccaaaggcatcaagcgcgatatttacgcgctgtggctggccgcccgtgataagcgcaccccgtggtacgccaaactgatcgcgctgctggtggccggctatgcgatctcgccgatcgatctgatcccggacttcattccggtgctgggctatctggacgacgtgattatcgtaccgttgggcatcatgctggcggtgcgcctgatccccaagccgctgatggccgagctgcgcgagaaggcgcaaaagcgcgtcgataaccccaccggccgcatggcggcggtgatgatcattttactctggctgctgtgtctgggattgctggcccgctatctggaccagcattggtaa

SEQ ID NO: 422021 - DNA, 1275 bp, Serratia marcescens
atgtctgtcaccgcttccgacctggcgtttgaccaacgtcatatctggcacccctacacctccatgagccgcccgttaccctgttacccgatcgagtcggccagcggcgtcgagctgcagctggcggacggccggcgtctggtggatggcatgtcctcctggtgggcggcgatccacggttacaaccatcctcgcctgaatcaggccgccagccagcagctggagaagatgtcgcacgtgatgttcggcggtattacccatccgtccgccatctcgctgtgccgtcggctggtggagatgacgccggaagcgctgcagtgcgtgttcctggcggattccggttcggtggcggtggaagtgtcgctgaagatggcgctgcagtattggcaggcgcgcggcgagcgccggcagcgcatcctgacgctacgccacggctatcacggcgataccttcggcgcgatgtcggtctgcgatccggacaactcgatgcacagcctctatcagggctatctggcgccgcacctgttcgccaccgcgccgcagtgccgcttcgacgaggaatggcgcgaagaggacatcgcgccgttcgccgcgctgctggagcagcacgccggtgaagtggcggcggtgatcctggaaccggtggtgcaaggcgccggcggcatgcgtatctaccacccaagctacctcaagcgggtgcgcgagctgtgcgatcgccatcaggtgctgctgatcgccgacgagatcgccactggcttcggccgcaccggcaagctgttcgcctgcgagcacgcgcaggtggtgccggacattctctgcctgggcaaggcgctgaccggcggctacatgacgctgtccgccaccctgaccacccgccacgtggcggagaccatcagcaacggcgcggccggctgctttatgcacggccctacctttatgggcaacccgctggcctgcgcggtggcggacgccagcctggctctgctggcggaaaatcgctggcaggcgcaggtgagcgccatcgaagcccagctgaagcaggagctgctgccgctcgcggcgctgccgaaggtggcggacgtgcgggtgctgggcgcgattggggtggtggagatgcgcgaaccggtgaacgtcgccgagctgcagcgcgggttcgtcgaacgcggggtgtggatccggccgttcggcaagctgatttacctgatgccgccttacatcatcgaagcggaacagctcagccgcctgaccgccgccgtggccgccgccgcgcgttaa

SEQ ID NO: 422022 - DNA, 1041 bp, Serratia marcescens
atgatggccgatcgcattcactggacagtagggcaagcccaggccctgtttgataaaccgctgcttgaactgctgttcgaagcgcaaaccgtacaccgccaacactttgacccgcgtcaggtgcaggtcagcacgctgctgtcgatcaaaaccggcgcttgcccggaagactgcaaatactgcccgcagagttcgcgctacaagactggcctggaggcggagcggctgatgcaggtcgagcaggtgctggaatcggcgcgcaaggccaaggcgaacggctcgacccgtttttgcatgggcgcggcgtggaagaacccgcacgagcgcgatatgccttatctgcagcagatggtgcagggcgtgaaagcgatgggcatggaaacctgcatgaccctgggcacgctggatggcactcaggctgaacggctggcggaggccgggctggattactacaaccataacctcgacacctcgccggagttctacggcagcatcatcaccacccgcagctaccaggaacgcctggatacgctcgacaaagtgcgcgacgccggcatcaaagtgtgctccggcggcatcgtcgggctgggtgaaacggtgcgtgaccgcgccgggctgctggtgcagctggccaatctgccgaagccgccggagagcgtgccgatcaacatgttggtgaaggtgaaaggcacgccgctggcggataacgacgacgtcgatccgttcgatttcatccgcaccatcgcggtggcgcgcatcatgatgccgtcttcttatgtccgcctttccgccggccgtgaacagatgaacgaacagacgcaggcgatgtgctttatggccggcgccaactcgatcttctacggctgcaagctgctgaccacgccgaacccggaagaagacaaagacctgcagctgttccgcaagctggggctgaacccgcagcagaccgccaccgaacacggcgacaaccagcaacagcaggcgctggctaagcaactgctgaccgccgataccgccgagttttacaacgcggcgctgtga

SEQ ID NO: 422023 - DNA, 1152 bp, Serratia marcescens
atgagctggcaacaacgcattgagcaggcgctggcagagcggcgcctcaacgccgcctaccgtcggcgacagaccaccgagggcggcaacggccgccagattcggctcggcgatcgtctctacctgaatttctccggcaacgactacctggggctgagccaggacgcgcgggtgatcgccgcctggcagcagggcgcgcagcgctacggcgtcggcagcggcggttccggccacgtcaccggctttagcgcggcgcatcaggcgctggaggagcaactggcggcgtggctcggctatccgcgcgcgctgctgttcatctccggttacgccgccaaccaggcggtgctggcggcgttgatgcaaaagggcgatcgcattttggccgatcgcctcagccacgcctcgctgctggaggcggcggcgcaatcgccggccgagctgcgccgcttccagcacaatcaaccgcaggcgctggcggagctgttggccaaaccctgcgacgggcagcggctggcggtgaccgaaggggtgttcagcatggacggcgacggcgcgccgttggcggaactgcatcgcctaacccgcgcggcgggcgcctggctgatggtggacgatgcccacggcgtcggcgtgcgcggcgagcaaggccgcggcagctgctggcagcagggcgtgcgccctgaactgctggtggcgaccttcggcaaggcgttcggcgtcagcggcgcggcggtgctgtgcgatgaggcgaccgccgagtatctgctgcagttcgcccgtcatctgatttacagcaccgcgatgccgccggcgcaggcctgcgcgctgcaggcggcgctggcctgcattcgagagggcgatgaactgcgcgcccggctgcaggacaacatccgccgtttccgccagggcgccgcgccgctggcgctgaccctgacggactccgacaccgccatccagccgctgctggtgggtgacaatcagcgcgcgctcgatctggcggcccgcctgcgcgagcacgggctgtgggtgagcgccatccgcccaccgacggtgccgccgggcggcgcgcggctgcgcatcaccctgacggcggcgcatcagccgcaggatatcgatcgcctgctggaggtattgcatgacgtcagccaatga

SEQ ID NO: 422024 - DNA, 768 bp, Serratia marcescens
atgacgtcagccaatgactgggtgaacaaacaggcggtcgcttcggccttcagccgcgccgccggcagctacgacgccgccgccgcgctgcagcgtgacgttggcgagcgcttactggggatggggagtgcccatccgggtgaacggctgctggatgccggctgcggcaccggctatttcagccgcctgtggcgcgagcgcggcaagcaggtgaccgcgctcgatctggcgccgggcatgctggatgtcgcccgtcaacggcaggcggcgcaccattatttgctgggcgatatcgaacaggtgccgttgcccgacgcggcgatggacatctgtttcagcagcctggtggtgcagtggtgcagcgatctgcccgccgcgttggcggagctgtaccgcgtgacccgccccggcggcgcgatcctgttttccacgctggcggcgggatcgctgcaggaactgggggatgcctggcaacaggtggacggcgagcgccacgtgaacgcctttctgccgctggcgcagatccgcgccgcctgtgctggctatcgacacgagctggtcacggagttgcgcaccctgaactatccggacgtgatgacgctgatgcgttcgctcaagggcatcggggccacgcatctgcatcaggggcgcgagggcggcctgatgtcgcgcggccgtctcgccgcgctgcaggcggcttacccgtgccggcgggggcagttcccgctcagctatcatctggcttatggagtgatttatcgtgattaa

SEQ ID NO: 422025 - DNA, 675 bp, Serratia marcescens
gtgattaaacgttggttcgtaaccggcaccgacaccgaagtggggaaaaccgtcgccagcagcgccttgctgcaggccgccaaccgggcgggctaccgcagcgccgggtataagccggtggcttccggcagcgagatgaccgccgagggactgcgcaacggcgacgcgctggcgctgcaggccaacagcggcgtggcgctcagctacgatgaagtgaacccttacgcttttgccgaacccacctcgccgcatatcgtcagcgccgatgaaggccggccgatcgacgcggcgcggctgtccgacggcctgcgccggctggagcagcgcgccgactgggtgctggtcgagggcgcgggcgggtggtttaccccgctgtcggcggagtacaccttcgccgactgggtgcagcaggagcaactgccggtgatcctggtggtgggcatcaaactgggctgcatcaaccacgcggtgctgacggcgcaggcggtgcagcaggccgggctgacgctggccggttggatcgccaacgacgtggcgccgccggggcggcggcatcaggaatacctggccacgctgcgccgcatgctgccggcgccgctgctgggcgaaatcccgcacctgccgcaggctgagcgggcgccgctggggcagtatctggatatcagtctgctataa

SEQ ID NO: 422026 - DNA, 723 bp, Serratia marcescens
atgctgagcctgagatcggtcaatcaattttacgggcagaaccacaccctgtgggacatcaacctggagctgccgcgcggccagtgcaccgtgctgctcgggcgcaacggcgtgggcaagaccacgctggtcaactgcatcatggggcatgtgccggtggtgagcggcagcatgacctggcagccggcggatcagccgccgcaaaatctgctgctgcagccgatggagcgccgcgccgcgctgggcatcagccacgtgccccaggggcggcagctcttctcgcagttgagcgtggaggagaatctacaggtggcgcaaatggccgggcgcggcgcccctcgccgcattccgccgctgatctacagcctgtttccccatttgcgccagatgcgcgcgcgccgcgccggcgatctgtgcgtgggcgctcagcgccagctggcgatcggtcgggcgctggcccaggagccggctctgctgatcctcgacgaaccgacggcgggcgtccccccctcgatcgccgccgacatcggcaacgtgatccgccggctcaaccgcgaactgggcatgaccattttactggtggagcatcagctgccgttcgtacgccgggtggcggatcgcttctgcctgttggacagcgggcgcacggtggcgcacggcgcgctggcgcagctggatgaggcgctgatcggcgccgggctgacagggcaagaagaaggatga

SEQ ID NO: 422027 - DNA, 2013 bp, Serratia marcescens
atgagtaaacttttcaaactgcattctgatttcaaaccggccggcgatcagccggaagccatccgcaagctggaagaggggctggaagacggcctggcgcaccagacgttgctgggggtcaccggttcgggcaagacattcaccatcgccaacgtgatagccgatctgaatcggccgaccatggtgctggcgccgaacaagacgctggcggcgcagctgtacggcgaaatgaaagagtttttcccggagaatgcggtggaatacttcgtctcctactacgactactaccagccggaagcctacgtgcccagctccgataccttcattgaaaaagacgcttcggtgaacgagcacatcgagcagatgcgcctttccgccaccaaggcgctgctggagcggcgcgacgtggtggtggtggcgtcggtgtcggcgatctacggcctgggcgatccggatctttacctgaagatgatgctgcacctgacccaggggatgatcatcgatcagcgatccattttgcgccgcctggcggagctgcaatattcccgcaacgatcaggccttccagcgcgctaccttccgcgtgcgcggcgaggtgatcgacatttacccggcggagtcggacgagctggcgctgcgcgtcgagctgttcgacgaagaagtggagcggctgtcgctgttcgatccgctgaccgggcagatcgagcaggtggtgccgcgctttaccatctacccgaaatcgcactacgtgacgccgcgcgagcggatcatgcaggcgatggaagagatcaaggtcgatctggcggaccgccgcaaggtgctgctggccaacaacaagctgctggaagagcagcgcctgacgcagcgcacccagttcgatctggagatgatgaacgagctgggctactgttcgggcatcgaaaactactcgcgctacctgtccgggcgcgccgagggcgagccgccgccgacgctgttcgactacctgccggcggacggcctgctggtggtcgacgaatcccacgtcaccattccgcagatcggcgcgatgttcaagggcgaccgcgcgcgcaaggaaacgctggtggagtacggcttccgcctgccgtcggcgctggacaaccgcccgatgcgcttcgaggagttcgaggcgctggcgccgcagaccatctatgtctccgcgacgccgggcaaatacgagctggagaaatccggcggcgatctgatcgatcaggtggtgcggccgaccgggctgctggatccgatcgtggaggtgcggccggtcgccacccaggtggacgatctgctctccgagatccgcaagcgcgcggcgatcaacgagcgcgtgctggtgaccaccctgaccaaacgcatggcggaagacctgaccgagtacctggaagagcatggcgagcgcgtgcgctacctgcactcggacatcgataccgtggaacgggtcgaaatcatccgtgacctgcgtctgggcgagttcgacgtgctggtgggcatcaacctgctgcgtgaggggctcgacatgcctgaggtgtcgctggtggcgattctggacgccgacaaggaaggtttcctgcgttccgagcgttcgctgatccagaccatcggacgcgcggcgcgtaacctgaacggcaaggcgatcctgtatggcgatcgcatcaccgattcgatggccaaggcgatcggtgaaaccgagcggcgccgcgccaagcagcaggcctacaacgaagccaacggcatcgtgccgcaggggctgaacaagaagatcggcgatattctgcagatcggccagccggtcaaccgcgccaagaacaaaggcaagggcaaggcgctggacggcggtgcttcgcttcagaacctcacgccgaaagcgctggatcagaaaatccgcgatctggaggcgcaaatgtacacccacgcgcaaaacctggagttcgaacaggccgctgcgctgcgcgaccagatccaccagctgcgcgagcagttcatcgcgatttcctga

SEQ ID NO: 422028 - DNA, 267 bp, Serratia marcescens
atgagccaacaccagtccaaagacccgctgcacggcgtgacgctggagcaactgctgactaaactggtggatcactacggttggtccgagctgggcgcgcgcattcgcatcaactgcttccgcagcgatccgagcatcaagtccagcctgaagtttttgcgtcgcacgccctgggcgcgcaaagaggtggaagacctgtatatcgatatggtcagccatcccgccccagccagcgataatccctggctgcgtgggcgagacggttaa

SEQ ID NO: 422029 - DNA, 918 bp, Serratia marcescens
atgcgtaatcgtaccctagccgatctcgaccgcgtggtggcgttaggcggcggacacggcctgggccgtgtgatgtcggccctgtcgtccttaggctcccgcctgaccggcatcgtcaccaccaccgacaacggcggttccaccggccgtatccgccgttcggaaggcggcattgcctggggcgatacccgtaactgtctcaaccagctgatcaccgaaccgagcgtcgcctcggcgatgttcgaataccgcttcagcggcaacggtgagctggccggccacaacctcggcaacctgatgctgaaagcgttggatcacctgagcgtgcgcccgctggaagcgatcaacctggtacgcagcctgctgaaggtggacgcggcgctgatcccgatgtcggagcagccggtggatttgatggcgcacgatcacgaaggcaaccatgtttacggtgaagtgaatgtcgaccagctgacccatatgccgcaggagctgatgctgtcaccgccggtcaacgccacgcgcgaagcgctggacgccatcgcacaggccgacgtgatcctgatcgggccgggcagtttcctcaccagcctgatgccgctgctgctgctgggcgatctcacccaggcgctgcgtcgcagcagcgccagcatgatctatatcggcaacctcggccgcgagctgagcgtggccgccgcggcgctgtcgctacaggataagctgacgctgatggaagagaagattggccgccggatgatcgatgcgctgatcgtcggcccggcggtggacgccagtgaagtgcaggatcgggtggtgattcaacagccgctggaagcgagcgacatcccctaccgccacgatcgccagctgctgcgccaggctctggatcgggcgctggtggcgctggccgatcgccgctga

SEQ ID NO: 422030 - DNA, 987 bp, Serratia marcescens
atggtgccgcaactcattgatgcttatgagcgcaagttctattacctgcgcttgtcgatcaccgacgtgtgcaactttcgttgcacctattgtctgcccgacggctacaagccgagcggcagcccgaaaagcttcctgtcgctggatgaaatccgccgcgtcagccgcgcgttcgccgaactgggcaccgaaaaggtgcgcctgaccggcggcgagccttcgctgcgccgcgattttaccgagatcatcgccgccgtgcgggaaaacccggccatccgtaccctggctgtcaccaccaacggctaccgtctggcgcgcgacgtcgccgcctggcgtgacgccggtctgacggcgattaacgtcagcgtcgacagcctggatccccgtcagtttcacgccatcaccggtcaggacaagttccgccaggtgatggatggcatcgacgccgccttcagcgccggtttcagcaaggttaaggtcaacgcggtgctgatgcgcgacgttaaccaccagcagctcggcgcctttctcgcctggatcaaagaccggccgatccagctgcgttttatcgaactgatggaaaccggcgagggcggcgagttgtttcgcaaacaccacgtttccggcgaagtgattcgccggcagctggagcagcagggctggcagcgccaggcgcgcggccgcagcgacggcccggcgcaggtgttcagccacccggactaccagggtgaggtgggtcttatcatgccttatgagaaagacttctgcgccagctgcaaccggctgcgcgtttcttccatcggcaatctgcacctgtgcctgttcggcgagcagggggtgcccctgcgcgatctgctggcggacgacggccagctcgacgcgctgaaggcgcgcatccagagcgggctgctgagcaagaagcagacccatttcctgcatcagggcaacagcgggatcacccagaacctgtcgtttatcggcggctga

SEQ ID NO: 422031 - DNA, 516 bp, Serratia marcescens
atgagccatgcgagcagcgagtttattccggcgcatatcgccatcctgaccgtgtctgacagccgcggcgcggcggaagacacctccggccaatatctgcaggaagcggcgcaggaagccggccatcaggtggtggatcgcgccatcgtcaaagatgacatttaccagatccgcgcgcgggtttccgcctggatcgccgatgacaacgtgcaggcggtgctgatcaccggcggcaccggttttaccgcccgcgacaacacgccggaagcgctgctgccgctgttcgacagagaggtggaagggttcggtgaactgttccgcatggtgtcgtacgaagagatcggcaccgcgacgatccagtcgcgcgcgctggccggcctggccaaccgcacggtgatcttcgccatgccgggctctacccgcgcctgccgcaccgcctgggagcggattatcgaagagcagttggacgcgcgccatcgcccgtgcaacttccagccccatttgaagaagccctga

SEQ ID NO: 422032 - DNA, 480 bp, Serratia marcescens
atgacacagctaacccacattaacgccgccggcgaagcccatatggttgacgtttccgccaaggccgaaacggtgcgcgaggcgcgcgccgaagccttcgtcgagatgctgcccgccacgctggcgatgatcgtcgacggcagccatcacaagggcgacgtgttcgccacggcgcgcatcgccggcattcaggcggccaaacgcacctgggagctgatcccgctgtgccacccgcttatgctgagcaaggtcgaagtgcagctggaggcgcaaacgcagcacagccgggtgcgcatcgaaacctgctgccggttgaccggcaaaaccggcgtcgagatggaggcgttgaccgccgcctcggtggcggcattgaccatctacgacatgtgcaaagcggtacagaaagacatggtgatcggcccggtgcgcctgctggcgaaaagcggcggcaaatccggcgattttaaggtgaacgtatga

SEQ ID NO: 422033 - DNA, 246 bp, Serratia marcescens
atgatcgatattcttttcttcgcgcaggtgcgcgaactggtgggcaccggcggcctgtcgatgccggcggattacccgaccgtcgaggcgctgcgccaggcgctgtgcgcgcgcggcgatcgctgggcgctggcgctggagtccggcaagctgttggcggcggtcaatcagtcgctggtggcggcggaccatccgctgcgcgccggcgatgaagtggccttcttcccgccggtcaccggggggtaa

SEQ ID NO: 422034 - DNA, 468 bp, Serratia marcescens
atggaaaatacccgcattcgcgtgggcgaggcgccgttcaacgtcggcgacgagtaccagtggctggcgcagtgcgacgccgatggcgcggtggtgaccttcaccggcaaggtgcgcaaccataatctgggtgacgacgtcagcgcgctgacgctggaacactaccccggcatgaccgagaaggcgctggcggagatcgtggccgaggcgcgcagccgttggccgctgcagcgggtgacggtgatccaccgcgtcggcgcgctgtatcccggcgacgagatcgtgttcgtcggcgtgaccggcgcgcaccgcagcgtggcgttcgccgccagcgagttcatcatggactacctgaagacccgcgcgccgttctggaagcgcgaagccaccggccagggcgatcgttgggtagacgcccgcgacagcgatcgcgaggccgcgcagcgctggcacgacgcggctaaataa

SEQ ID NO: 422035 - DNA, 711 bp, Serratia marcescens
atggaccgatatccacgctctaatggttcaatcgtcgaacgtgccaacagcggcattcaggcctacatggcgcaggtttacggctggatgacctgcggtctgctgctgacggcgttcgtttcctggtatgcggccaacacgcccgcgatcctcaatttcatcttctccagccagatcaccttcttcggcctgatcatcgcccaactggcgctggtgttcgtgatttccggcatggtcaaccgcctgagcggcgcggtggccacttcgctgttcatgctgtactcggcgctgaccgggctgacgctgtcgagcatcttcatcgcctacacctacagctcgatcgccagcaccttcgtggtcaccgccggcatgttcggcgccatgagcctgtacggttacaccaccaagcgcgatctgagcggcttcggcagcatgctgttcatggcgctgatcggcatcgtgctggcctcgctggtgaacatctggctgaaaagcaccgcgctgatgtgggcgattacctacatcggggtggtggtgttcgtcggcctgaccgcgtacgacacgcaaaaactcaaggcgatgggcgagcagctgaacgccgatgataaagacagcttccgcaagtacgccatcgtcggcgcgctgacgctgtatctcgacttcatcaacctgttcctgatgttgctgcgtatcttcggcaaccgtcgctaa

SEQ ID NO: 422036 - DNA, 1107 bp, Serratia marcescens
atgtttcatcgtctgttgacgctcatcatcaaggaaatgcaggcgctgctgcgcgatccgcaaacccgcgccattttaatcatgccggtgatcctgcaggtgctgctgttcccgttcgccgcgacgctggaagtcaccaacgccaccatcgcggtctacagcgaggacagcggccaagcctcggtagagctgacccagcgcttcgccaaggccaaggcctttcaacacgtgctgctgctgcgtagcccgcaggaaataaagaccaccatcgacaaccagcgagcgctgctgctgatccgcttcccggcgcagttctcgcgcgatatcgccaccggcaacaccgcgccgctgcagctgctgctcgacgggcgcaactccaacagcgcgcagatcgccgccaactacgtgcagcagatcgtgcaggaatatcagaacgagctgctcggcaacctcgccaaacccaacaacagcgagctggtggtgcgcaactggtataacccgaatttggactacaaatggttcgtggtgccgtcgctgatcgccatgatcaccaccattggcgtgctgatcgtcacctcgctgtcggtggcgcgcgaacgcgaacagggcacgctggaacagctgctggtctcgccgctcaccacctggcagatctttatcggcaaggcggtgccggcgctgatcgtcgccagcttccaggccagcatcgtgctgctgatcggcatcttcctgtaccagatcccgttcgccggatcgctgctgctgttctatgccaccatgctgatctacgggctgtcgctggtcggtttcggcctgctgatctcgtcgctgtgcgccactcagcagcaggcgtttatcggcgtgttcgtgttcatgatgccggcgatcctgctctcgggttacgtctcgccggtggagaatatgccggtgtggctgcaggatctgacctgggtcaacccgatacgccacttcaccgacatcaccaagcagatctacctgaaggacgccagcttcgacatcatctggcacagcctgtggccgctgctggtgatcaccgccaccaccggcagcgccgcctacgcgctgttccgccgcaaaatcgcataa

SEQ ID NO: 422037 - DNA, 1155 bp, Serratia marcescens
gtgagcgataaccgcaccccaatcgacgacggcggcttctcctggcgccggctgcgcgcgctgtgcctgaaggaaacgcggcagatactgcgcgatcccagcagtggcctgatcgccttcgtcatcccgctgatgctactgtttatcttcggctacggcatcaacctggactccagcaagctgcatctgggcattctgatggagcaacagagcgaagacgcgcgcgatctggcccacgccttcgccggttccccctatatcgaaccgaccatcagcgacaaccgccaacggctgatccagcagatgcaggccggcacgatccgcggcctggtggtgatcccggtggacttcgaccagcgcatggcgcgcccgcacgacagcgcccccatccagatcatcaccgacggcagcgagccgaacaccgccaacttcgtgcagggctatgcccagggcgtatggcaaatttggcagcagcagcgcgccaccgatcgggggaacagcgacaaaccgctgattgacgtacagatgcgctactggttcaacccggcggccatcagccggcactacatcattcccggcgccatcaccatcatcatgacggtgatcggcgccattctcacctcgctggtgatcgcccgcgaatgggagcgcggcaccatggaggccctgctgtccacccaggtgacgcgcagcgagctgttgctctccaagctgatcccttattacttcctcggcatggccgcgatggcgctgtgcatggcggtggcggtatgggtgctcggcgtgccctatcgcggctccctgccgatcctgctgctgatcagcagcctgtttctcgccagcaccctcggcatgggtctgctgatctccaccctcacccgcaatcagttcaatgcggcgatggtggcgctgaacgccgccttcctgccttcgatcatgctgtccggcttcatcttccagatcgacagcatgccggccatcgtgcgtgcggtgacctatatcattccggcgcgctacttcgtcagcacgctgcaaacgctgttcctggcgggcaacgtcggcaccgtgctgctgatcaatctgctgttcctgatcgcttccgccgtggtgttcatcggcctgacggcctggaaaacccagcgccggctggattga

SEQ ID NO: 422038 - DNA, 1737 bp, Serratia marcescens
atggaacaggcgcacaccattgagctggaagggctggagaagcgcttcccgtcgcttgagaaaccggcggtcgccagcctgaccaccaccctgcgcagcggcgcggtgatcgggctggtcggcccagacggcgccggcaaaaccaccctgctgcgcatgctggccgggctgctgcagcccagcagcggcaaactgcgtgtcgccgggctggatccgatcgcgcaggatcgtcaactgcacgcgatcctcggctacatgccgcagaagttcgggctgtatgaggatctgacggtgatggagaacctgacgctgtacgccgatctgcgcggcgtcaccggcgatcttcgccgccagaccttcgagcggctgttgaaattcaccgatctgacccgcttcaccgagcgcctggcgggcaagctgtccggcggtatgaagcagaaactcggcctggcctgcacgctagtgggcgaacctcaggtgctgttgctggatgagccgggcgtcggcgtcgatccgatctcgcgccgcgagctgtggcgcatggtgcacgagctggccaacgacggcatgctgattctgtggagtacgtcttatctcgatgaggccgaacagtgccgcgaagtgctgctgctcaacgagggcgagctgctgttcagcggcgcgccgcaggcgctgacccgacgtatggccgggcgcacggtgttgatcgccgcgccccccggcagccatcgatcgctgctgcagcgggcgatctgcctgccggcggtcaccgacggggtgatccagggcaagtatctgcgcctgatcctgaaggaaggcgaagatcaccggcagctgttgcaagcgctggatctaccggacgccgaactggacgaagcggatccgcgcttcgaggatgcgtttatcgatctgctcggcggcggccccaaccaccgctcggcgctggcggagattatgccgaccgtcaacggtgaaagcggtgaaacggtgatcgaagcggtgcagctgaccaaaaaattcggcgacttcgccgctaccgatcatgttgatttccaggtgcggcgcggcgaaattttcggcctgctcgggccgaacggcgccggcaagtccaccacctttaaaatgatgtgcggcctgctgatcccctccaacggtaaggcgctggtgctggggatggatctcaagaccagctccggccaggcgcgccagcgcctcggctacatggcgcaaaaattctcgctgtacggcaacctgacggtggcgcagaacctgaagttcttctccggcgtctacggcctgagcggcaaggcgcagcgcgacaaaatcgacgagatgtcgcgcgccttcaacttcgcgccgatcctcgatcagacgccggacgcgctgccgctcggcttcaaacagcgcctggcgctggcctgcgcgctgatgcacgaaccggatatcctgttcctcgacgaaccgacttccggcgtcgatccgctgacgcggcgcgagttctggttgcatatcaacggcatggtcgacaagggcgtcacggtgatggtgaccacccactttatggatgaagcggagtactgcgaccgtatcggcctggtataccgcggcaagatcatcgccgccggcacgccggacgatctcaaacagcaggtggcgcgcgacgacaatcccaatccctcgatggagcaggcgtttatcgagctggtgcagggttacgatgaggaggaatcacggtga

SEQ ID NO: 422039 - DNA, 987 bp, Serratia marcescens
atgaacaaaaaacgcagtgccttgatcgtgttgttaattctgctgatcgcggccgccgcttacggggtatggcattaccaacaacagcaggataagccgctgacgctgtacggcaacgtcgacatccgcacggtgaacctcggctttcgcgtcgatggccgcctggcgtcgctgacggtggatgaaggcgatgccgttcagccgggccagctgctcggcaaactggacgacgcgccctaccgcaacgcgctgcagcaggccgaagccaacgtcggcagcgcgcgcgccaagctgtcgctgctgcaggccggctaccgcagcgaagagatcgcccaggtgcggtcggaaatggcgcagcgccagtccgccttcgcctacgccgacagcttcctgaaacgccagcaggggctgtgggcgaaaaacgccacctccgccgacgcgctggaggatgcgcgcaccgcccgcaatcaggcgcaggccaacctgcaggcggcgaaagacaagctgtcgcaatacctcagcggcaaccgcccacaagaaatcgaacaggccaaggccgacgtggcgcagagcgaggcggcgctggcacaggcgcagttgaacctgcaagacgccacgctggtctccccttccgccggtacggtactgacccgcgcggtggagccgggcaccatgctcggcgccggcggcacggtcttcaccctgtcactgacccggccggtgtgggtgcgcgcctacgtcaacgaaacccgcctgaaccaggcggtgcccggcaccgaactggagatctataccgacggccgccccgacaagccttaccacggcaagatcggtttcgtctcgccgaccgcggaattcacgccgaaaagcgttgaaacgccggatctgcgcaccgatctggtgtaccgcctgcgggtgatcgtcaccgacgccgacgacgcgctgcgccagggcatgccggtcaccctgcgcttcgccaaaccctga

SEQ ID NO: 422040 - DNA, 699 bp, Serratia marcescens
atgccagcttccgtccctcatcaggccgccggccgagcgcgcggcgagcaaacgcgccggcagctgctcgccgcggcgaccgaactgttcggcgaatgcggcctgcagggcgccaccacccgcgacatcgcccaacgcgccggccagaatatcgccgccatcacctattacttcaactccaaagaggggctgtacctggccgtggcgcagtcgctcgccgatttcatccagcaggcgttcgccccgctggccgaggaggtcgatcgcttctggcaacagtccgccgcgcagcgctcacccgacgcggcgctgcgtttgctgcagcgtggcctgctggccttcagcgaactgatgacccagccgcacacgctgaacctgagcaaaatcatgtcgcgcgaacagctcgccccgaccgaggcctacccgctgatccacagccaggtgatcgcgccgatgcacgcgcggctatgccgcctgctggcggccgccaccggcatcgacgaccaggcgacccgcctcgtgctgcatacccacgcgctgatcggcgaggtgctgtcgtttcgcgtggcgcgcgaaaccatccgccgccaggccggctggcaagccattggcgaggacgaagcggcgcagatcggcgccgtgctgagcgaacatattgagattctggttaccgggctgcgccaacgtcacggcgcgtaa

SEQ ID NO: 422041 - DNA, 1383 bp, Serratia marcescens
atgtcatttgaaaccctcggcttaagtgctgaaattgtgcgcgctgttgaagaacagggctatcgcgaaccgacgccaattcagcgtcaggctattcctgtcgtgctggaaggtcgtgacctgatggccagcgcccagaccggcaccggtaaaaccgccggttttaccctgccgctgttgcagctgctgagcaagcatgaccatccggtcaagggccgtcgcccggtgcgcgcgctgatcctgacgccaacccgtgagctggcggcgcagatcggcgaaaacgtcgatgcctacagcaaacacctgcgcctgcgttcgctggtggtgtttggcggcgtgagcatcaacccgcagatgatgaagctgcgcggcggcgtcgatatcctggtggcgacgccgggtcgtctgctggatctggaacatcagaacgcggttgacctgtccaaaatcgaaattctggtgctggacgaagcggaccgcatgctggacatgggctttatccacgacatccgccgcgtgctggccaagctgccggccaagcgtcagaacctgctgttctccgccaccttctccgacgacatcaaggcgctggccaacaagctgctgcacaacccggcttcggtagaagtggcgcgccgcaacaccgcgtccgagcagatcgaacagagcgtgcatttcgtcgacaagaagcgtaagcgggaactgctgtcgcagatgatcggcgaaggcgactggaaacaggtgctggtgtttacccgcaccaagcacggcgccaaccacctggcggagcagctgaacaaagacggcatcaccgccgcggctatccacggcaacaagagccagggcgcccgtacccgtgcgctggcggacttcaaagacggccgcatccgcgtgctggtggccaccgacatcgcggcgcgcggtctggatatcgaccagctgccgcacgtggtgaactacgagctgcctaacgtgccggaagactacgtgcaccgtatcggccgtaccggccgcgcggagcgcaccggcgaagctatctcgctggtgtgcgtggacgagcacaagctgctgcgcgacatcgagcgtctgctgaagcgtgaaattccacgcatcgcgctgccgggctacgagccggatccgactatcaaggccgagccgatcatcaacggccgccagggtggcgggcgcggtgcgccgcgcggcaacggcggtggccagcgttccggtaacggcggcggtcagcgcagcggtaacgcgaacggcggccagcgtgaaaaccgcggcaacggcaacggcaacggtaacgcccgcccgcagggtgacggccagcgccgttccggcgcgccttcgcgccgcccgcgcaatcgcaaaccggccgaataa

SEQ ID NO: 422042 - DNA, 960 bp, Serratia marcescens
atgaaattgaagtgcgcaattctcgatgattaccagcaggtggcgctcaagatggcggactggtcggcgctggccgagcgggtggaggtgtccgccatcagcgcgcactttaccgatgaggcggagctggcggtgcatctgcaggagtgcgacattctggtcatcatgcgcgagcgcacgccgatgaccgcctcgctgctggcgcggctgccgaagctgaagctgctgatcacctccggcatgcgcaacgccgctatcgatttggccgccgccgccgagcgcggcgtggtggtgtgcggcaccagcagcgggtcggcggcgccgatggagctgacctgggcgctgctgctcgggctggcgaagcatatcgtgccggaaagcgtcgggctgcaaaacaacggcccgtggcagcgggatctcggcgtcaccctgcagggcaaaacgctggggctgctggggctgggcaagatcggcggccagatggcccgggtggcgcaggcgttcggcatgcgggtgctggcctggagccagaacctgacggcggaacgggcggcgcaggagggggctgaactggcgccgtccaaacgggcgttgttcgagcagagcgattttgtctctatccacctggtgctgagcgatcgcagccgcgggctggtggggcgtgacgaattgacggcgatgaagcccaccgcttacctgatcaacacctcgcgtgcggcgatcgtcgatcgggcggcgttggtggacgtgctgcaacagcggaagatcgccggcgccgggctggacgtgttcgagacggagccgctgccggccgacgatgcgtttcgtcagctgcccaacgtgctggcgacgccgcatgtgggctacgtggcggacgacaactaccgcgcctacttcaccgaggcggtcgaggatattgcggcgttcctcgccggccaaccgatccgccggctgggctga

SEQ ID NO: 422043 - DNA, 933 bp, Serratia marcescens
atgcgcgtattattggctccgatggagggcgttctcgattctttggtgcgtgagttgctcaccgaggtgaacgactacgatctgtgcatcaccgaatttttgcgcgtggtcgatcagctgctgccggccaagtcgttctaccggctgtgcccggagctgcgccacgccagccgcacgccgtcgggcacgctggtgcgcgtacagctgctggggcagcacccacagtggctggcggagaacgccgcgcgcgcggtggcgctgggctcttacggcgtcgatctcaactgcggctgcccgtccaagctggtgaacggcagcggcggcggggcgacgctgctcaaagatccggaattgatctaccagggcgccaaagcgatgcgcgcggcggtgccggcccatctgccggtcacggtgaaggtgcgtttgggttgggactcctccaaccgcagttttgaaatcgccgatgcggtgcagcaggcgggcgccagcgagctgacggtgcatggccgcaccaaagaggacggctacaaggcggatcgcatcaactgggcggcgatcggcgagatccgccaacggctgagcattccggtgatcgccaacggcgagatctgggattaccggagcgcacaggattgcctgcaggcgaccggctgcgacgccatcatgctggggcgcggcgcgctcaacgtgccgaacctgagccgggtggtgaagtacaacgaaccgcgcatgccctggccgcaggtggttgagctgctgcaaaaatacgtccatctggaaaagcagggcgacaccggcctgtatcacgtggcgcgcattaaacagtggctgggttatttgcgtaaagaatatgatgaagccaccgaactgtttagcgaaatacgcgcgctgacgacgtcaggggatattgcgcgcgtcatctgccgcagctaa

SEQ ID NO: 422044 - DNA, 267 bp, Serratia marcescens
atgagcaacaatgcaaacgcacaggcgcagctggataatttacgcaacgtcgcttcccagctgaaggaaatgcgccactatgcgcaggcgaataccgaaacgctctccgcacactggctggccttcgatcagggggaatgcaaaaataaggcattcgccgaagccattaacgacctgttgaataaacagggtgcctgcctggaagggctggaaaaaaccattcaggatatcgagatagaattgaaccgcctcgacaaagccgcctga

SEQ ID NO: 422045 - DNA, 1047 bp, Serratia marcescens
atgagccagaaaaatttcgttgaactgcgcaacgtctccaaacggttcggcagcaacacggtgatcgataacatcgcgctcaccatccctcgggggcagatggtgacgctgctcggcccttccggctgcggcaagaccaccattttgcgcctggtcgccgggctggaaaagccgagcgacgggcagatattcattgatggtgaagacgttacccatcgttccatccagcagcgtgacatctgcatggtgttccagtcttatgccctgttcccgcacatgtcgctgggggaaaacgtcggctatggcctgaagatgctcggcattccgcgcgccgaagtgaaagcgcgcgtgcaggaagcgctggcgatggtggatctggcggggttcgacgatcgctatgtcgatcagatctccggcggccaacagcagcgcgtggcgctggcgcgcgcgctgatcctcaagccgaaagtgctgctgttcgacgagccgttgagcaacctcgacgccaacctgcgccgcagcatgcgcgaaaagatccgcgagctgcaaaagcagtttgatatcacgtcgctgtacgtcacccacgatcagagcgaggctttcgcggtctcagacaccgtgctggtgatgaacaaggggcatatcatgcagataggctcgccgcaggatctctatcggcagccggcgtcgcgctttatggcgagctttatgggggacgccaacctgttcccggccggcttcagcgcggactatgtcgatatcagcggctatcgcctgccgcgccccgcgcactttaccgccgaaggcgccggcacggtgggcgtgcggccggaagcgatcacgctgagcgagtacggcgaggaaagccagcgctgcgtgatccagcatgtcgcctacatggggccgcagtatgaagtcacggtggcgtggcatgggcagcagattttgctgcaggttaacgccactcgcctgcagcccaacgtcggcgaacagtattatctggaaatacacccctacggcatgtttatgctggcggacgcggcataa

SEQ ID NO: 422046 - DNA, 2079 bp, Serratia marcescens
atgtcacatacacatgctctccatctcgtgaaaaaacgagatgcgatattcctttgggtcttgcttggctggctggcgttcgccctgctgccgagctggagcctggattacggcctgctggagtccaccggcgatgaaatcctcgcggcctacggctggtcacaccgcaatgtcagctggctatggtgcctgttgccgagcctgctgctgcttcgcccctacgccccagcgggcggtgaacggcggcggcgccacgcgttcgatgccggctgggcgctgctgtgcatggcctttatcgtcgtcagcgccacggtggcggggcgcggtttaggctacgccaccctggtacaattgaccgcgctgggcgccatcatgacgctggcgctgacccgcctcgaatggctgggcggcgaccgtttcgttatcggcgcgctggtcaccatcgtggcgctgatcggcgtcttcatcgtctggccgagcatcgcgattttcattccgatgttcaccgaccagacgggtgcgttcgcgccgctggcgtttatgaacgtgctgtcgcaggcgcatatcgttcaggtgatcctcaactccatcgccctgtcgatcgcggtgggcgccggctgcaccttcttcggcctggtgctggcgatttacaccacccgcatcgccaggcgcagcgccattatcggccgcatcttctccatcctgcccatcgtcacgccgccgttcgtcgtcggcctgggcgtcacgctgatgatggggcgctccggctacgtcaccgagtggatggtggcctggttcggcctgaccaacaccaactggctgtacggctttaccggcatctggctggcgcaggtgctggcgttcacgccgatggcgttcatgatcctcgacggcgcgatcaagaccattcatccttcgctggaagaagcctcctacaccctgcgcgccagccgttggcaaacctttaacggcgtgttcgtgccgctgctgaaaccggcgctggccaacgcgtttctgatcgtggtggtgcaatcgctggccgacttcagcaacccgctggtgctcggcggcaacttcgacgtactggcgacgcaaatctatttctacatcaccggctcgcagctcgactatcaggccgccagcaccctcggcgccttcctgctgctgttctcgctgctggtgttctgcattcagtacctgtggatcggcaagcgttcctacgtcaccgtgtccggcaaatcctaccgcggcgacgtacagccgctgccggtcacgctggtgtggggcgtgatcgcgttgctggcggtgtgggtagcctttaacgccctgctctacggcagcattttctacggcagcttcaccgtcaactggggggtggattacacgctgacgctggataacttcatcaagctgttcggccagggcatgagcgacggcgcgtggccttcgctgctcgacacgctgctgtacgccgggatcgccgcgccgatcaccgccgccttcggcctgctgatcgcctggatcgtggtgcgccagcagttcaagggcaaaaagaccatcgagttcaccaccatgctgtgctttgcggtgccgggcaccgtggccggcgtctcttacattctcgccttcaacagtgcgccggtgtacctcaccgggacggccgccatcgtgattatctcgatggtgatgcgcaacgtgccggtgggcattcgcgccgggatcgccgggctgggccagatagacaaatctctggacgaagcctcgctcagcctgcgcgccggctcgctgcgcaccatcacgcacatcctgctgccgctgctgcgcccggcgatcctgtcggcgctgatctacagcttcgtgcgcgccatcaccaccgtcagcgccatcgtcttcctggtcacccccgatacccgcgtggccaccgcatacatcctcaaccgcgtggaagacggcgaatacggggtggcgatcgcctacggttcaattctgatcgtggtgatgctggcgattattttcctctttgactggctgatcggcgaggcacgcatctcccgttcaaaagccaaaaaccaggcgtaa

SEQ ID NO: 422047 - DNA, 1032 bp, Serratia marcescens
atgaaaaaaaccttagtcactaccctgatagcttccggcatcgcgctggccacgctgagcggcgccgcgcacgccaagggccgcctggtggtctactgcagcgccaccaatgaaatgtgcgaagcggaaaccaaagccttcggcgagaaatatgacgtgaaaacctcgttcatccgcaacggctccggcagcacgctggcgaaagtggacgccgagaagaaaaacccgcaggcggacgtctggtacggcggcacgctcgatccgcaatcccaggccggtgaaatggggctgctgcagccatataaatcgccaaacctcgaacaggtgatgccacaattccgcgatccggcgaagctgaaaggcaactactcctcggcggtctacgtcggcattctcggctttggcgtcaatacccagcgcctgaaagagaaaaacctgccggtgcccaagtgctggaaagacctgaccaagccggaatacaaaggcgagattcaaatcgccgatccgcagagctccggcaccgcctacaccgctctggcgacctttgcccagctgtggggggacgatcaggcgttcgattacctcaagcagctgaacgccaacgtctcgcagtacaccaagtccggcattgccccggcgcgcaacgccgcccgcggcgaaacggcaatcggcatcggtttcctgcatgactactcgctcgaaaaggaacagggcgcgccgcttgagctgatctcgccttgtgaaggcaccggctacgaaatcggcggcgtcagcatcctcaaaggcgcgcgcaacctcgacaacgccaagctgttcgtggattgggtgctgtcgaaagaggcgcaggaactggcatggcagaaaggcaagtcctatcagatcctgaccaataccaccgccgctacctcgccgaactcgctgaagctcgacgatctgaaactgatcaactacgacatggacaaatacggctcgaccgaggtccgcaaggcgctgatcaacaaatgggtcagcgaagtcaagatgggtaaataa

SEQ ID NO: 422048 - DNA, 1305 bp, Serratia marcescens
atgcaggcacgctcggcatctgaaatcgatcatcgttaccgcgcgctgcgcccgcgactgctgctgtacatggtcatcgggtacgccgccttttacctgacgcgcaaaagcgtgaattacgtgctgccggcgctgcaaacggatttggggctggataaaggggacatcggcctgctcggctcgctgttttacctgagctacggcctgtcgaaattcgccgccggactgtggcacgacggccacgggcagcgcagatttatggggatcggcctgttcgccaccggcttgctgaacgtggcgttcgccttcggcgaatcgctgacgctgctgctggcggtctgggcgctgaacggcttctttcagggctggggctggccgccctgcgcgcggctgctgacccactggtattcgcgcaacgagcgcggcttctggtggggctgctggaatatgtcgatcaacctcggcggcgcgatcgtgccgctgatcagcgccttcgccgcccagcgctggggctggcaggcggcgatgctgatcccgggcgccgtcagcatggtgttgggcatctggctcacgcggcggctgacgggcacgccgcaggaagaaggcctgccgtcggtcggccggtggcgccacgatccgctggaactgcgccaggaacagcaaagcccgccgacggggctgtggcagatgttgcgcaccacgatgctgaagaacccgatgatctggctgctcggcgtctcttacgtgctggtctacctgatccgcatcgcgttgaacgactggggcaatctctggctgacggaaagccacggcgtcaacctgctcagcgccaacgccacggtgatgctgttcgaggtaggcggcctgctcggcgcgctgttcgccggctggggctcggatttgctgttcggcgggcagcgcgcgccgatgattttgctattcacgctcgggctgatggtttccgtcgccgcgctatggctggcgccggtgcatcactacgcgctgctggcgggctgtttctttgcggtgggtttttttgtcttcggcccacagatgctgattggcctcgccgccgtggaatgcgggcacaaaggcgcagcgggctccatcaccggttttctcggcctgttcgcctacctgggggctgcactggcgggctggccgctgtcgcagatcatcgaaggctacggctggtcaggcatgttcagtttgctgtcgatcgccgccgttcttatgggtttattgctgatgccgctgctgatggcgagcgttaccacctctaccgagagaaggataaaacaatga

SEQ ID NO: 422049 - DNA, 1542 bp, Serratia marcescens
atgtcgcccaaactccggccctgggttatctcgctgtttatcctgttggcctggggcagcggctggctgatgctatggacgctcggcttctatctgacccacaacggcaatcaggcggcgctgtttctgccgcacggcgtctatctcgcgctgctgatcctgctggcgcgccgctattggcccgccctgataattccgccggtgctgttgctgttctggctgcacggcgaacgcctgctgagcggctacggcctgctggccgcgccgtttatcaccctgcttccggccgcggtcgcgcaacgactctggcaccgttttccgctctactggcagcggctgacgctgctgctggcagcggtgaccgccgcctcgctgctcaataccaccctgctttcgccgtttgtgccaagcccggcgatgctgcttggcctggcgtcgtttaccggcggcgtcttgctgaccccgttcgtctatctgatctttgaatttctgcgccagcagcaccgttaccacctgctggggctggacacccccaacccgccgctgcgcgcgtccttaatcatctggtgcagcctgttcttcgttatcggcatcggcacgcagatggtgctgtcgccggaaatcgaacgcctgctgctgatcgtggtgtttctgccgaacgtggtgatggcgtggaagttcggctggcagggcggcgtgctgtccggcctgctcggcagcatgatgatcaccctcgcccggcaggtcggcgtggggttcggcaatctggtcgagctggaaatctttctggcgacgcaggcgctgctcggcatcggcctgggcatcgccatcagccgccagcagcacctggcgcaaaacctgcaccactatcagcgtcgcctggaagaagagctggcggcgcggcgggcgctgaccgaaaaactgatccacaccgaagaagacacgcggaaaaatctggcgcgcgagctgcacgatgaaatcggccagaacatcaccgcgattcaaatccagtcgcagctggtcaaacgggcgcgcgatccggcgcaaacccaggccgccgcgcaccagataagcgagctcgcccggcgcattcatcactccacgcgccagctgctgcgccagcttcgcccgcccgcgttggacgagctggcgttcaaagaggcgcttcaccacctgctgagcgaattcgcctttgccgaacggggcatccgctgccgtttcgactaccgactcatagacacgcccgccggcgaaacggtgcgcttcaccctctaccggctgctgcaagagctgctcaacaacgtgtgcaaacatgccgaagccagcgaggtcgccatcgtcttgtatcaacagggcgcgcttttgcacctcgaggtgcgggacaacggcgtcggcatccgcgtggacaaggcgcccggcctcggcattcaggggatgcgcgagcgggtcagcgcgctgggcggcgagctgacgctggaaacgcattgcggcacgcgggtaattgttaacctgcccacaaatttgcaacaaaccatcgactaa

SEQ ID NO: 422050 - DNA, 630 bp, Serratia marcescens
atgatccgtgtgatactggtggatgaccatgtggtggtgcgctccggctttgcgcaattgctcagcctcgaggacgatctcgacgtggtggggcaatacagcagcgcggcggcggcctggccggcattgctgcgcgacgacgtcagcgtcgcgttgatggacatcgccatgccggatgaaaacggcctcagcctgttgaagcgcctgcgggcgcagaagccgcagttccgtgcgatcatcctcagcatctatgactcccccaccttcgtgcaaagcgcgctggacgccggcgccagcggctatctgaccaaacgctgcgggccggaagagctggtgcaggcggtgcgttccgtcgatatgggcggccattacctgtgcgccgacgcgctgcgggcgctgcgcggcggcgagcagccggccacggcgctggaagcgctgaccccgcgcgagcgtgaaatcttcgatctgctggtcaaaggcgacagcgtaaaggagatcgctttcaagctcgcgctcagccataaaacggtgcacgtgcatcgcgccaacgtcctgggcaagttgcagtgcaacagcaccatcgagctggtgcatttcgccctcgaccatcagctgctggcggggcattga

SEQ ID NO: 422051 - DNA, 765 bp, Serratia marcescens
gtggatacccaacgctacctgcagcatatcggctttaccggcgccgcccgccctgacctccacacgttgcaacagctgcaccatcgccacatgctgagcgtcccgttcgagaacctgagcattatttatcatcagggtattcagctggcgccggaggcgctgttcagcaaggtggtcgagcgcaaccgcggcggtttctgttatgagctgaacgcgctgttcgccctgctgctgcgggagatcggtttcaaggtgagcttcatctccggcgagatccgcgcgcgcgacggccatttcggcccgccctacgaccatctggcgctgcggttggatctggcgggccaggcctggctggtggacgtcggtttcggcgattccttcctgacgccgctgaagatcgtcgccgccgagccgcaaccgcaggccagcggcaccttccacctggagcgggaaggcgactattacctgctggagcgccgcaacggcgaccaacgttcgcatgccaaaaccctgtatcgctttaccgttcagccgcgcgagctgcatgagttcgacgagatgtgccgcttccacagcacctcgccgcagtcgcacttcacccagcggctggtgtgttcacggccgacggaccacggccgggtgaccctcagcgacatgaagctgatcgtgaccgaagatcatcagcgccacgaaacgacgctgcattcggaagaggagcggcgcgccgcgctgtggcagcatttcgccatcgatttggatcgttga

SEQ ID NO: 422052 - DNA, 753 bp, Serratia marcescens
atgcaagatttcaaacatcgggtggcgctggtgaccggcgcttccaccggcatcggcgaagcgatcgccgccgaactgtttcggcgcggtgccacggtggtgatgaccggccgccacgccgcgcctctcgccaccgccgccgcgcggcttgatcccgagggccgacgggtgatgacgttgcggatggacgtgcgtgaggcgccgtcggtgcagcagggtattgaagagacggtgcggcgctgcggcgcgctgcatctgttggtcaacaacgccgggatcaccggcccgcacgaggtggacatcgatcggtacgcggtcgaagattggcatgaggtgatcgccacctgcctgagcggcacgtttttcggcatgaagtacggcctgccggcgatcgtcgccggcggcggcggggcggtggtgaacctatcttccgccaacggcgtggtgggcattgccgggatcgcgccttataccgccgccaagcatggcgtgttgggcctgacgcgctcggcggcgctggagttcgccacgcgcggcgtgcgcatcaacgccgtcgggccgggctatgtggagacgccggcgatgaggactctgccggcgccggtgcgggcgcagatggccgcttcgcacccgatggggagaatggcgacgcgggaagaagtggcgaaaacggtggctttcctgctctcggacgacagcagtttcaccaccggcgcgttttacagcatcgacggtggttataccgcgcgctga

SEQ ID NO: 422053 - DNA, 897 bp, Serratia marcescens
atgcactcaccgtcccgcgcgcgcttgcccaagctgagcgccattctggcgttcgaaaccgccgcccgcaccggcagcctggcccgcgcggcggatacgctggcgttgaccgccgccgccgtcagccaacagatccgccagctcgaacaacatctgggcatcacgctgttcatccgcgccaaaagcggcgtcacgctaaccgaacagggcgcggactacctggcctacgtgcaggaggcgttcgaaacgctgcgcgtggcgcagcaacacgtcgagcgccagcgcggcaaacaggcgctgacggtgttcgccctgccggcgttggcctccaagtggctgaacccggcgctgggcgactggctggcgcagtgccccgacggcgatttgcggctgcacgcgacccatgcggcggtcgatttcgcccattcggcggcggacttcgccctgtgcttcggcgatcaggattatccgctgctggaaaaggtgcggctgtttcaggatcgggtgcagccggtgtgcagcccggcgctgcgcgatcgcggcgactggacgcagctcccgctgatccacgtcgactggggcaaagagagccagtttctgccgggctggcacgagtggtttaccgccgccgatcgaatgccgccggcgcggcgcgggctgacctataacctgacttcactggccatcgacgccgccgtgcaagggcgcggggtgctgctcggccagcggcagctgatcggccgtgaactggcggaaggccagctggtcaccctggccgaaccggcgctgccgctcagcaagccctactacgtggtttacccgccgcgcacgctggaaaaacctggcgcagcggcgtttctccgttggctgcaggcgctggctcagcgcgcggtataa

SEQ ID NO: 422054 - DNA, 780 bp, Serratia marcescens
atgccgcaacttgccgatattatcgatctgtccgcccatcccatcgacgacgccgcattccgcgtccgttgccggcaaacgctggagcgcgccggcgcgctggtgctgccgggatttctgcgcgccgccgcgctggcgacggtaaggctggaaggcgccgaacagcaccacgcggcgttttacgccaccagcaaacacaacgtgtatctgcggccgcaggacgatacgctgccggccgatcacgcgcgcaaccggctggtggtgtcgtccaagggctgcattaccgacgaagatattccgccgcagtcgccgctgcgtgcgctgtacgacgccccggcgtttcgcgcgttcctctgcgcggtgctggatgaggcgcagctgtatccctacgccgatcggctgtcgtcgatcaacctgcattacgcccacaccggccaggagctgggctggcacttcgacaactcgtcgttcgccatcacgctgctgatccagaaaccggcggcaggcgggcgtttcgagtacgtggagaacctgcgcgacgccgatcgcggcgagatgaactatgccggggtcacgcaggtgctggacggcgagcgggcggccaaacggctggcgatggaggagggggatttggtgctgtttcgcgggcgcaacgccatgcaccgggtgacgccgaccgaaggcgacaccacgcgcatgctggtggtgctggcctacaatgcgcagccggacgtgatgctgtcggaaagcgccagaatgacgttctacggccgcttatag

SEQ ID NO: 422055 - DNA, 1467 bp, Serratia marcescens
atgcactcacaaaaaaagtcggcggacgataaacacgccgccagaagacgctggctagactctcatgaatccggttatcacaaaagcatgggcaaccggcagatccaaatgatcgccatcggcggttcgatcggcaccggcttgttcctcggtaccggcggccgtctcgaactggccgggccggcgctggcgctggtctatctggtgtgcgggatcttctctttcttcatcctgcgcgcgctgggcgagctggtgctgcatcgcccttccagcggcagcttcgtttcttacgcccgcgaatttctcggtgagaaagcctcttacgtcgccggctggatgtatttcctcaactgggcgatgaccggcatcgtcgacatcaccgcggtggcgctgtacatgcactactggggcaccttcgccgacgtgccgcagtggctgttcgccctcggcgcgctcggcatcgtcgccaccatgaacatgatcggcgtgaagtggttcgccgagatggagttctggttcgcgctgatcaaggtggtcgccatcgcgctgttcctgattgtcggcgtcgtcttcctcggcaccggcaccccggtcgccgggcacaccaccggcatgcacctgatcaccgaaaacggtggcatgttcccgcacggcctgctgccggcgctggtactggtgcaaggggtgatcttcgccttcgccggcatcgagctgatcggcaccgccgccggcgagtgtaaagatccggccaaaatgatgcccaaagcgatcaacagcgtgatctggcgtatcggcctgttctacgtcggctccgtggtgctgttggtgctgctgctgccgtggaacgcctaccaggccggccaaagcccgttcgtcaccttcttcagcaagctgggcgtgccttacatcggcaccatcatgaacatcgtggtgttgaccgccgcgctgtccagcctcaactccggcctctactccaccggccgcatcctgcgttcgctggcgatgggcggctccgcgccgaagctgatggccaaaatgagcagccagcaggtgccttatgccggcatcctggtcacctgcggcatctacgtgatcggcgtggtgctcaactacctggtgccttcgcaggtattcgagatcgtgctgaacatcgcctcgctgggcatcatcgcctcctgggcgtttatcatcgtctgccagatgcgcctgcgcaaagccgtgcgcgaaggccgcgcgcagccggtatcgttcaaaatgccgggcgcgccgttcacctcctggctgacgctggcgttcctactgatcgtggtggtgatgatggcgttcgactacccgaacggcacctggaccatcgccaccattccggtgctggcggtgctgctgacgctgggctggttcggcctgcgcaagcgcgcgcaggaagtgaagcgggagcagcaggctcacgaagagcagaacccgcactga

SEQ ID NO: 422056 - DNA, 438 bp, Serratia marcescens
atgcaaggcgtcaaacgcaaactggtgtatgtcaccgcttatgaaatcatcggcatggcgatctcggcgctggggctggcgctgctgtcgggccatgcgccgagcagcaccgggccgctggcggtggtgatcaccaccatcgcggtcagctggaacttcatttacaactctttattcgagtggtgggaaagccgccagctgtcgcgtacccgcacgctcaagcgccgcattttgcacgccgtcggctttcagctgacgctggtggtgtatctgatcccgctgatcgcctggtggatgggcatcacgctgtggcaggcgctgctgctggatatggcgctgatcgtcatcattccttgctacaccttcctgtttaactgggcgttcgacaagctgttcggcctgccggcttcggctctgccggccggtgaatccgcctaa

SEQ ID NO: 422057 - DNA, 894 bp, Serratia marcescens
atgaacttttccagcgacaatatcgaactgtttctggctgtgctcgatcgcggttcgttttccgccgccgcccgcgcgctgcggcgcgtaccgtccgccgtcagcatgggtatcgccaacatggaggcggaactcggtttcgccttgttcgatcgctcgcaccgtgaaccgacgccgaccgcgctggcgttggccctggcgccgcacgcccgcctgatcgccgggcagcttaagcagctgcaggtgcacgccatcgaactttcccaggggctggaaagcacgctttcgatcggggtggcatcggatatcaacggtactggcctgctggcggcggtgaagacgctgtcgcagcgttatccgctgctgaacatcgaagtgctcagcgcgccgcaggacgacgtgctgcacatgctgcatcaggggcgcattggcgtttgtctggcgttcggcgggctgaacatcaacagcgcggagcagttccacttcgtcggcgcggagtcgctggtagcgatggtatcgccgcagcatccggcgctggagggcgcggcgggcgagctgtttctcgaggatctggtcaacgtgcggcagatcatggtggccagccgcgatctgccgatcggcgatctgcgcccgcaggtggcggaggcctactggcgcaccgacagcctgccgatggcgctgaacatggtggaagcgggcctggggtggggcaatttcccgctgtcgctggccgagccgctgctggcgcaggggcggctggtgcggctgaaattcaaaaacactaagaacgagctgcgcttgccgatgcatttgatctggctgaagaatcgcccgctggacaaggcggcgcgcgagctggtcgagctgatgcgcacggcgccgcaggaaagctga

SEQ ID NO: 422058 - DNA, 564 bp, Serratia marcescens
atgaccgatttggcccactacattacggactacggctactgggcgttgtttatcggctgcctggctgagggagaaaccatcacgctgctgggcggcatcgccgcccatgaaggcttgctgcactggccgtgggtgatcgcggtggtggcgctgggaggtacactgggggatcagctgctgtacttcgccggccgccggttcgaaggccgggtcatctcgcggctcaaggggcaggaaaagcgcatcgcgcgcgccagaaggctgatcgcccgccacccgatgctgttcgttatcggggtgcgctttatgtacggcttccgcatcatcggcccggtgctgatcggcgccagccgcctgccgccatcgcgcttcgtgccgctcaatatcctcggcgccattctgtgggcaacgatcttcgtcatgctcggctattttggcggccaggcgatcgaacgcttcgttaccggcttcgacaaaaaactctccagcctgctgtttgtcgcgctggcgatcgccgccatcctgctggtgcgcttctggtggcgcaaacgccacgcggaataa

SEQ ID NO: 422059 - DNA, 678 bp, Serratia marcescens
atgtctgaaccactcgtgattgtatttcccatctatcaaggcgtcacccagctcgacttcaccggcccgctgcagtttctgcgccacatgccgggcgcggaaatcatcgtcgcttcggtagacggcgcggatgtcgaatcggaaggcttgcacttcacccagctgcgcccgctgccggagatcgcgcgctgcgacgtgctgtgcgtgccgggcggcagcggctgcacccaggcgctgcaggataaagcgttcatgcagcaaatccggcggctgggcgccgatgcccgctacctgacctcggtgtgcaccggttcgctgatcctggccgcggccggcctgctggcgggcaaacgtgccgcctgccactggtcgatgcgcgacagcctggcgctgttcggcgccatccccagcgctgcacgcgtagagcgcgacggcaacgtgatcagcggcggcggcgtcaccgccggcatcgactttgcgctggcgctgatcgccgaactgcacggcgaagacactgcccagacgatccagctttatctggaatacgccccggccccgccgttcacgggcggcacgccggaactggccccgccgcacatttacgccagggtacaggcgcagatggcggaaagcctggcgcggcgcagagcattggtggcccagatcgcccaaggctag

SEQ ID NO: 422060 - DNA, 945 bp, Serratia marcescens
atgaaaacgatcggttttgtggtttttcccggtttcaacctgctggattttgccggccctctggcggcgttcgataacgtcagccagtttaccgatccatcggcctaccgctgcgtggcgatctcgccgcagggcgggatggtcgccagctcggccggggtggagatcgccacgcagccgtgcggcgacgagcgtttcgatacgctggtggtggccggcggcagcggcaacgtgatggcggcgcagtcgccggcgctggtggcgtttctgaccacccacagccggcgggcgcggcgcatcgccagcgtgtgcaccggcgcgtttattctggcggcctgcggtttgctggacggcaagcgcgccaccacccactggtatcatgcggcgcggctgcagcagagctatccgcgcatccgcgtcgacagcaaccgcattttcattcgcgacggcgatatctggacctcggccggcatcagcgccggtatcgatctggcgctggcgttgatagaagacgaccttggcgccaccctggcggcggccgtggcgcggcagctggtggtctatcatcggcgccccggcgggcagtcgcagtattcgctgctgctggcgttgaacccgtcgtcggatcgcatgcgcgccgcgctgtcgttcgcgcgcgagcacttgcacctgccactgtcggtggcggatctggccgacgccgcctgcctgagcgagcgccagttcggccggctgttccgcgccgaaaccgggcagacgccggccaaggtgatcgaacagctgcgggtggaggcggccagggtgcgcatcgaagagagcaccgagccgctggaggcgatcgcccgttcggtggggttcagcgatccggagcgcatgagacgggcgtttatccgggtatttggcctgtcgccgcaggcgatccgccggctcggccgcgcgggataa

SEQ ID NO: 422061 - DNA, 1104 bp, Serratia marcescens
atgtatcaggatttcgagagcgaattgaactgggcgatgcgccatatgccgcgcacccgggcggcggtggcggcgttgccggacctgcacggggtgcggctggcgtgcaatatgcacctggatctgaaaatggcgccgctggtggccggcctgctggacaagggcgcggcgatcttcctgaccacctgcaatcccaccacggtgcagaacgacgtggtggcctggctggaacggcggggcgcgcaggcctatgcctggcgcgacatgaacgccggcgaatggtcggagtccttcgaccgcgcgctggcctggcagccgactcacctgtgcgaaatgggggcggatctgaccacccgtttgcaccaatcgccgaacggcccgcagatcgtcgccgggctggaggccaccggctcgggcatcagccgtttgaacggcgtggcgccgcgctacccgatcttcaactgggacgatctgccggtgaaagaggggctgcacaatcggcatatggttgggctgactgcctggcacaccttcttccagaccacccacttgacgctgcacgaaaagcgcgtgctggtgatcggctacggcctggtcgggcaggggacagcggcggcggccagggcttacggcggccaggtgatggtggcggaaatcgatcctgcgcgcgcgctgcaggcgcgttatgacggctggcaggtggtggatctggcgagcgccgtcgcgcaggcggacgtgatcgctaccgcaaccggcgcgaaaaacgtgctctcggcgcagcatttgcaacaggcgcaagacggcgtgtttatcctcaacgtcggccacgtggcagaagagatcgacgtcggcttcctgcaaggcctgccgcaccacgagccgatgccttatgtgaacgcttaccaacttaatgagaagacggtgtatttgctggccaacggctcgatgtttaacctgaccgccggctatggcgacagccttaacgccttcgatgtgacgctggcggtgatggcggccggcatcggccatatcgtcggcgccggtgcgcggcaaacgccggggctgtacctgttgccgcagtcggcctggcagccggcgctgtaa

SEQ ID NO: 422062 - DNA, 930 bp, Serratia marcescens
atgcctgtgaaaatacgtgttttggttctgaccctgctcgctttgcaggcgggcgcaggctttgcgccgcgcgcgttggccagcgacaacgccgccgccctgcacgccacccaaccggagctggcctccggcagcgcgatggtcgtcgatatgcaaacccataaggtgatgtatgcgcgcaacccggatgaagtggtgccgatcgcctcgatcaccaagctgatgaccgccatggtcacgctcgacgcgcacctgccgctcgacgagatgctggcggtggacattcgccagacgccggagatgaaaggggtgtattcacgggtgcggctgaacagcgaaatcagccgtaaggatatgctgctgctggcgctgatgtcgtcggaaaaccgcgccgccgccagcctggcgcaccactatccggggggctacaacgccttcatcaaagcgatgaacgccaaggccagggcgctgggcatgaccaatacccattatgtggaaccgaccgggctgtctattcataacgtgtcgacggcgcgcgatctgaccaagctgctgatcgccaccaagcaatatccgttgatcggccagctcagcaccaccaccgaacgcatggccagcttcaaggatccgaactacacgctgccgttccgcaacaccaaccacctggtgtacaacccgaaatggaacatccagctgaccaaaaccggcttcaccaaccaggcgggccactgcctggcgatgcgtacggtaatcggtaaccgctcggtgtcgctggtggtgctggacgccttcggcaaatacacccacttcgccgacgccaaccgcctgcgcagctggattgaaaccggcaaggtgacgccgatcccggccgccgcccgcgactatcgtcgccaaaaagacgcccgtctggcgaagaacgacagcgaataa

SEQ ID NO: 422063 - DNA, 456 bp, Serratia marcescens
atgagcatcattcatcgcctggcgcagccggacgatctcaacggcctgttggctctgtatcgcgagctgcgcccacaggatgcgccgctgcgcagcgacgacgcgcgccgtgccctgcagcgcctgctggacgatccggcaatccgtctggtggtagcggcgcaagaggaacagccgatcgccacctgcatgctggcgctgatcccggggctggcgcatcaggcgcagccgttcggcgtcatcgaacacgtggtgacggcggagccctatcgcggccacggcgtggcgctcgcgatgatcgaatacgcgctgcagctggcctggcgcaagggctgttacaaggtgatgctgctgtcggggcagcaacgcaccggcgcgcaccagctttatctcaaggcgggtttcgacggcgatcgcgagcggggatttgtcatcagacggcccgagggccgatag

SEQ ID NO: 422064 - DNA, 405 bp, Serratia marcescens
atgagtcaggtttcgacctttgtcatgttccagggggaggcgcagcaggcgatcgacctctacagccaggtgtttgcgcgttttcggctcatgcaggtgcagcattacgacccgacgccggacggccggcggttaatcaagcatgccaccatcgatttcgaccggcagaacctggtgtttatcgacagcccgatcagccatgatttcagctttaccccggcggtatcgctgttcatcaacctgcctaacgaagaagcgttggagagggcgttccaccgcctggcggagggcggtaaggtgctgatgccgctcgacgactacggcttcagcgctcgcttcggctggctcaacgatcgctttgggctttcctggcagctcaatgtgccggcgggggatctgccctga

SEQ ID NO: 422065 - DNA, 966 bp, Serratia marcescens
gtggggaataccgacaacatcatggaaaggtgcgatttgattgattttgaccgctatgttgagcaagcgaagtcttacggtgagtggccgggggcacaggtgggcacgttgtccggttgcgttgagggattgagctaccgcctgtatcgacaaactgccgagagcgaagacgtgatcgtggtttatcacggcggcggggttaacagcgccgccgggtatgacattcttgcgcgccagctggccgccgagccaacgctcgcggtgtgcctggtcgatattcgcgggcatggcgattccacgggagagcgggggacggttgagcggcctgagcgtatttggcgcgatgtcgatgtcatcctggcggaaatgcgcctgcgttttccgttagcgcgcaggcacctgcttggccattccagcggcgccgggatgttgctcaactacctgacccgctatccttgtgaacagcaggcggacagcctgatcctgctggcacccgagctggggccattttccgggatggcccgcgatctggcggcggcggcccgttttgcccaggtgcggcaatggccttttgtggccaatgcgctcagcggtgggcgatggtttgggcaatctcgggcggtcagcctgaatttccccccggccgtactggccgcctcccccgattttgtttgccaatacagcgttaatatggctaacgccttgacgccacgcaccccggcaaagcaactggcggcgctgcgattgccgactttgctgctggcggccgcgcaggatgagttgttcagcgcacaatccttgcagcgtttcgttgaacagcatggcagcgtgcatgttgcctttggcttgcttgcgagcagcacgcatttatcgtgcgtctttgaggcccacggcccgatccttcaacatatctcacgcgcgttcgctctcggagctgatgagggactgtcaggcgagaggttttaa

SEQ ID NO: 422066 - DNA, 921 bp, Serratia marcescens
ttggcaggaagtagcttacttacccttatcgacgatatcgcctcgttgctggacgatgtctctttgatgaccaagatggcggcaaaaaaaaccgctggggtgctgggggacgatctggcgctcaacgcgcagcaggtcaccggcgttaaagccgaccgcgaactgccggtggtgtggagcgtcgccaaaggttcgctgatcaacaaggcgatcctggtgccgctggcgctgctgatcagcgctttcgcgccctgggcgatcacgccgctgctgatggtgggcggcgcctacctgtgctacgaagggttcgaaaaggtgtatcacagcctgagccaagacaagcaggcacatgaggataagcaagacggaccgggcgccaatgaggatgtggcggcctatgaaaagcgtaagataaaaggggctgtgcgtaccgatttcgtgttatccgccgagattatcgccattacgttgggcaccgtcgccggcgccactttcagtcagcaggtgatcgtgctgtgcggcatcgcgctggtgatgacgctgggggtttacggcatcgtcgccggtatcgtcaagctggatgatttggggctgtacctgagccgcaagggcagcgcgttggcgcgcgccgtcggcggcggcatcgtgcgcgccgcgccttatttgatgaaaacgctgtcgatcgtcggcacggtcgccatgtttatggtcggcggcggcatcctgacccacggtctgccgccggtacatcatctgtttgagggctgggcttcctacgctacggtggtgccgacgttggggcatattttgcagggtgtcattccagctctgctgaacgtggtgttcggcgcgattgccggcggcgtggtgctggcggtggtgtcggcgctgggcgcggtgcgcgcgcgtttcaaggcatga

SEQ ID NO: 422067 - DNA, 540 bp, Serratia marcescens
atgacgctctccgctcccgtactcagcctcctcgatgccacgccggacgatatggccgccgtgctgcaaatttacactcaccacgtgctgtacggtgccgcctcgtttgaagaacagccgccgcccctggcggaaatgcagctgcggctgagcaaggtgcaagaagccgggctgccctggctggtagcgaaaagcgaaggccatattgtgggctactgctacgccacgccgtatcggccccggccggcctatcgttttaccgtggaagactcggtgtatatcgccgaggggcaacagggtaaaggcgtcggcaaggcgctgctgagcaagcttatcgcccgctgcgagcaaggcccctggcgccagatgctggcgatcgtcggcgattccgccgccaaccgcggttcgctggcgctgcaccagtcgctcggctttaccagcgtcgggacgttaaaggccgtggggttcaaactgggggaatggcgcgacacccacctcatgcagcgcgcgctgggcgcgggcgacagtcagcatccttga

SEQ ID NO: 422068 - DNA, 813 bp, Serratia marcescens
atgaccttacgctggcgtatcacccctctggcggcggccttcgccgccgttttggcgcttcagggctgcgatcaaaaaaccgatcggaaccatatcaaggtcggcgtcatcaacggcgcggaacaggacgtggcggaagtcgccaggcaagtggcgaaagagaaatacgggctggacgtcgagctggtcggcttcagcggttcgctgctgccgaacgacgccaccgacaagggcgaactggacgccaacgtgttccagcaccgcccgttcctcgaacagcaaaacaaagatcacggctataagctggtggcggtcggcaatacctttgtcttcccgatggccggctactccaaaaagataaaatcgctcaaagagctgcctgacggcgcggtgatcgccatcccgctcgatccgaccaacctggggcgcgccctgctgctgctggaaaaaaccggattgattacgctgaaacaaggcaaggggttattgcccaccgccctggacatcagcgccaacccgcaccgttaccaaatcatggagctggaaggcgcgcagctgccgcacgtgctggacgatccaaaggtcaccgtcgccgtcatcagcaccacctacatcaaccagaccggcctgtcgccgaccaaagacggcatcttcatcgaggataaagactcgccgtacaccaacatcatcgtcacccgcgaagacaacaaggacgcgccgaacgtgcagaacttcatcaaagcctatgagtctgacgaagtggccaaggccgccgagaaaatcttcaacggcggcgcggtgaaaggctggtaa

SEQ ID NO: 422069 - DNA, 852 bp, Serratia marcescens
atgaaccagaacaaggttgttttactgatgttagctatcgccatgagcggatgcgccgagcgccccaccgccgtctcccccgcaacgccgccgaccgacgtcaccgtttcgccgccggctgtgcaaccgcagatggacgccagcacccgcagcaagctgcatgagatcctcgcgctgcgcgccggttggcacgccacgcagccacatggccgcaccgtcgatttgatttcgcgcgagtttctcggcacgccctatctcgccaaccgcctgatcggttcgcagagcacgcccgagcagctggtgatcgacttccgcgggctggattgcttcacctacatcgattatgtggaagcactcagcaccgcccgcagcgagggcgagttcgtacagcgcctggtagacattcgctacgtcgacggcaacatcgccttcccgcagcgcaaacacttcttcaccgattgggcgcagcggccgaaaaaagtggctgaagacatcaccgcgcggctcagcccgcacgccgtcaccctcgtgaaaaccctcaaccgcaaagcggatggcggcagctacctgcccggcttgcccgacgtacaacgcagcgtgacctatatccccagcgaccgcatcgacgacaaggtgctggcccagctgcgcaccggcgattacatcggcatttacaccaacctggacgggctggacgtgacccacaccggcatcttcgtgatgaccgacaacggcccggtgctgcgcaacgcctcatcgcgcaaggccaacatgcgggtggtcgattcgccctttatggattacgtgatggccacgccgggcatcgtggtgctgcgttcgctcagccgataa

SEQ ID NO: 422070 - DNA, 543 bp, Serratia marcescens
atgaccccggtcatccgcatcgcggccattgaggcgctgcccgatgattacctgacgcgcggcgatttcggctttaccatccgctgttacgccctgccgcagttcgacaccccggtcgacagctggccaacccgcccggtggcgccgtttcgcaaacagtatcccttggcgccgttcgccaaccaagacagcgcgacttttctggcgtatcgccaggaccaagccgttggccacatcacgctgagcaaaaactggaacggttacaccctgatcgacgagatcgcggtcagcgctcacgcgcgccgtcagggcatcgccggggcgctgctggactgcgccaaacagtgggcgcggcagcaggaaacctcaggtatgatgctcgaaacgcagaacaacaatctggccgcctgtcgctgctaccagcattacgggtttattctcggcggcatcgaccgtttgctgtaccgcgccgagccggagatcgccgatcacgaaatcgcgctgttctggtatttgccgttcaatagcgaaatcggttactga

SEQ ID NO: 422071 - DNA, 468 bp, Serratia marcescens
atgtcatccgttatcaccacccgccaggcggggatcgtcgacgtcgacgccgggcgcaacgtcaccgttgtcgagccctgcaatctgtacggctgccggctcggcgacgatgtcttcgtcggcccgttcgtggagatccagcgccacgtcagcatcggcgcgcgcagtaaaattcagtcgcacagctttatctgcgaatacgtcaccctcggcgaagcgtgttttgtcggccacggcgtcaccttcgccaacgatctgttcaaagacggcgcgcccaatgccgatccggccagctgggggcgcacgcgcgtcggcgatcgggtgtccatcggctccggcgccaccatcctggcggtggagatctgcagcgacgcggtgatcggcgccggggcggtcgtgacccgcaacatcacccgcaaggggatttatgccggcaacccggcgcgcctgctgcgggagctgccgtaa

SEQ ID NO: 422072 - DNA, 591 bp, Serratia marcescens
atggtcagtcatgtttggggacttctggcgcatcccagcgccgagttcgaacagatcaaaaacgagaatgaaagcgtctcgcacctatacacccatcacgtgttgctcttggcagcaatcccggtggtctgcgcttttatcggcaccacccagttgggctggctctccggcgagggacatgccatcaggctcgacatgtttaccgcgctttataccgccgtggcgttttacctgctgatgctggcgggcgtagcggccatggggaaagtcattcactggatggcgcggcgctatgaatcgcgccccagcctgcaccgctgcatggtgttcgccggctacgtggcgaccccgatgttcctcagcgggattgtggcgctctatccggtcgtctggctgtgtctgtttgtcggcattatcggcctgtgctattcgggctatctgctgaatctggggatcccgcacttcctgaatatcgacagtaaggaagggttcatcttctccagctcgaccttcgccatcggcattctgttgctcgagctgctgcttggggtgacggtgctgctgtgggggtacggttcctggttattctga

SEQ ID NO: 422073 - DNA, 852 bp, Serratia marcescens
atgcgattaccttctctctgggccaatgccggcctggctacgctgttcgtcctgctttggagcagcggcgcgattttctcccgttgggggctggagcacgcctccgccttcgcttttttgttcttccgctgcgccatcgcgctggcggtgctgttggccatcggcctgtggcagcgccagtgcctgcccgcccccggcacccgccggcgcgtcacgctgattggcgtgctgatgatcggcagctatcaaatctgctatctgctagcattggaacagggtattacgcccggcgtgctggccacgttgcttggcgtacagccgatcctcacccagttcatcaccgaacggcgctgcaccgggctgcgggcgctcggcctggcgctggcgatggccgggctgacactggtggtgtaccaaagcctgatggtggcccacttctcgctgagcggcatgctgttcgcctttatcgcgctgggctgcatgaccgccggcaccctgctgcaaaagggcatgacgcagccgccgctggcggtcttgccgctgcagtatgccatcgggttgctgatgtgtacgctggcgctgccgtttgagccgctgcgggtcgagtggcggccagagttcgtgctgccgctgctgtggatggcggtggtgatctcggtgctggcgaccttcttgctgtatcgtctgatccagcgcggcaacctggtgcaggtcaccagcctgttctatctgatcccggcggtgaccgccctgctggactacctgctgctcggccacgcgctggcggcgctgagcctgctgggcatggcgggcatcgtgctcggcgtgatgctggttttccgccgcgcataa

SEQ ID NO: 422074 - DNA, 780 bp, Serratia marcescens
atgaattcagttcacgacatcctccacgttgatggggttagcctgaccggccacggcggggcattgatactcgacaacatccatttcgcgctgcgcaccggtgagaagctggcggtgatcggccccaacggcagcggcaagtccagcctgttgcgcaccctgatcggcgaaacgcggccggacagcggcggcatttactggcgagggcgagccttgtccgcgtggccggcggcggagcgcgccagaagcatcgcctttctggcgcaaaacgatctgccagatttgcggctgtcggttgaggactacgtggcgttgggccgtttaccgcatggcgaacgctctgcggcgggaaaacgcatcgttgacgaagccatcggggaaaccgggctggcgccgctcaggcaccatccgctgggacggctctcgggcggccagcgccagcgcgccgcgctggcccgggcgttggcgcagtctcccgatctgttgttgctggatgaaccgaccaatcacctcgatccgcccgggcgttcggcgctgctgtcgttagtgaaaaataaagacatcgccgtgattgcggtcttgcacgatctgcccgtggcagaggcgtttgccgatcggatcctggtgctcaacgaaagccgtcaggtggcctgtggtacgcccgaggcggtgttgcagaccccggtgattctgccggtgttcggcatgaacagtttcaaggtggcgcaccccgtcagcgggaaaacgctgcgtatttttgacgttccccattgcgcttga

SEQ ID NO: 422075 - DNA, 957 bp, Serratia marcescens
atgaacacacgcgtattccccctgctcctgctgctggccggtggggcggcggcggctgaacattttcccgtcaccgtagaaagctgcggtgtgccggtcaccttcaaccaggcgccgcagcgcgccgtcatcaacgacatcaacatggccgagatggcctttgcactgcatctgcaggatcgcattgtcgggctgaccggcatcaccggctggtacaaactgacgcccgacttcaaggccgcgatgggcaccattcccgagctggcgccgaaatatcccgctttggaaacgctgctggcggcacagccggatttcttcttcgccggctggaattacggcatgaagatcggcggcgacgtcacgccggagaagctcgccccgttcggcatcaaaacgctggtgctgagcgagagctgcgtacaggccggcgggcggccgcagaaggccgatatgaacctgctgtatgacgatgagctaaaactcggcaagattttcggcaagcagcaagaggccaccgcgctggttgagggctggcagcgccggttggctgcgcttcccgccaggccggcgggccagccgccgctcaaggtgttcgtctatgactcgggggaggagaagcctttcaccagcggcaaatacgctatgccgacggcgatcatcgaagcggcgggcggccgcaacgtgatggacggtttgccggcgagctggacgacggcgtcctgggaggcggtagcggcggccgagcccgacttcattattctgctggattaccagaccggctcgggcgccgatgcgctgcggcgcttcctcgagtctcacccgttgatgaaattgacgcctgccgtacggcaccaccgctatctgaaactgcagtatgcggagctgacgccggggccggccaacatcggcgcagtggaaaagctggcgcgggcgctgtacgcgccggaggctgaatga

SEQ ID NO: 422076 - DNA, 1008 bp, Serratia marcescens
atgaactcgccgactcggcgctttatgctgctcgcaccgctggcgctgtcggtattgtgcgggctaatgatctggagcctgcagctggggagcgtcgcgctgtcatggcggcaggcgtttgcggcgttagggctcggttcggcgccgctttccggcatgctggacaccatcgtcgtgcagctgcgggtgcccagggctttgttggcggcgttaaccggcgccggactggcgatgaccggcgcgctgctgcagaccaccacccgcaatgagttggccgatccttttttgtttgggctctcttccggtgcctccgccggcgcggtgctggtcatcacgcgcttcggtgatgcgttgggcgtactgacgttgccgctgtccgctttcgtcggcggcattctgtccgcgatggcggtgatgatcctgtttcgcgtcagccgggtcaggcgcgccgagcagctgatcgtctgtggcctggcggtctcatttttgtttagcgcgctgaccagctacctggtgttttccggcgatcagcgggcggccggttcggtgttgttctggtcgctcggcgggctggggctggcgcgttgggataatctgttcattccgctggcgagtttcgtgctgctggccgggtttacggcgctgcgttggcgggcgctggacgcgctgctggcgggcgagcaaaccgcccattcgatgggggtcaacgtggcgcggctgcgcaccgagacctttctgtgctgcgcactgtccacggcgtttctcgtttcgctgacgggcgtgatcggctttgtcgggctgatggtgccttatctggcccggcgcctggtgggcgtgcgccaccgattgtccgtgccgatgtgcggcatgctgggggcgatgctgctgaccggcggcgacatgctcagccgcagcctgatccccaatcaggaactgcccatcggcatcattacggcggggctggggggcgcgttcatcgtgtccttgctgctgcgcgcggagcggtga

SEQ ID NO: 422077 - DNA, 1524 bp, Serratia marcescens
atggccgaccttatcgaacgcatcctgattggttacggttcggagtcgggcaacgcccgggcgctggcgatgcgcctgggcgagcaaagcagcctgcaaccctaccgccccgtcgtgaaagaactcaacgccatccagcccgccgatgtgggcgagcgtgacgccctgctgatcgtctcgagctcatttggcgacggcgaaccgcccgccaacgccgagcgtttttccgacgcgctggcgcaatggcctgaccgccaccggttgcgctacgccatcttcggcctcggcgacaccgcgtacccgcatttctgcggcttcacgcaggcgctggatgcacgcctgacgcaatacggcgcccaggccatcgtcaatcgcgtcgacgccgacgttaacttcgaaccgttcttcgcaacctggctgaagacgcttgagaaggtgctggccggcgatgcccaggccggccgcgatttacatctgcgcgtgaccgcctacgatgaagaccatgcgttcagcgccgccctcctcgaacggcggccgctcagcgcacgcacgccgcaggcctggcacctgcggctgaatatcgccggcagcggcatcgtttaccgggcgggagataccgtctatctgttgccggagaacgacgaaggattattgacccggctggctgactggctcggcaggccggaggccgccgacgcgctgcgccgccgggagctgcgccagctcagcaaaacgacgctgcgtgaactggcgcagttggccgacaacgaagaactcaaaggcttgctcaagatccgccagcgcaaagccctggagagttatctgtacggcgccgatctgctggacgtgctgcacgatttttgcccgccgcacgcggtcacgctggagaacctgctgacgctgctgcccgtttgcctgccgcgcgcctactccatcgcttcggcaacgcgggaagagagcctcgatctgtgcgtgcgcgacgtgcattatgaacgcggcggccgcacccggcgcggcacggcgaccggctggctgctcagccaacccggccctttccgcctcttctgccgcgccaaccccggcttttacctgccgcgcgataccaccgtaccggtgctgcttatcggcaccggtaccggcatcgcaccgttgattggcttactgcgcgaaatggccgcccagggcgaacggcgtgaaaccgtgctgatcttcggtgagaaaaggcgcgatgaagacttcctgtatggcgaggagttggtcacgctgaacgcggcgggcgtactcacgcggctcatcaccgccttctcgcgcgacaccgccgacaagtattacgtgcaacacgccatcgacgatcacgccggtgtcgtcagcggcctgctgcggcggggcgcgcatgtctacctgtgcggcaatcgtcagtatctggaacatgccgtggcgacggcgctggagcaagcctgcggggcggaaaacctgtggcagacgctgattgagcagcagcgcctgcatctggagctctattga

SEQ ID NO: 422078 - DNA, 426 bp, Serratia marcescens
atgagtcagaccctcgattccgcccagctgttagccgcgctcgataaagtgatggtgatctccaccaccgatctgcagggcaccatcacctacgtcaacgatctgttttgccagctgaccggcttttcccgggaagagctggtgggccagccccacagcatcgtgcgccacccttccgtgccgaaagcggtttacaaagcgatgtgggacaccatcaaggcgggcggcatctggaccggcatcattccgaacgtcggcaaaggcggcgtgctgtacgtggtcgacaccacggtgcagccgctgtatgacgcccagggcaatatcgcggcctatatcagcatccgccgcgtgatcaacgatctgatgaccgacttcgaatcggtggaattcgccaaagaacagttcgacaaccactacgacaagtaa

SEQ ID NO: 422079 - DNA, 1707 bp, Serratia marcescens
atgcagtcaggcaatcaggcatttatcaaccagcttaaagacatcgtcggcggcccgcagctgttgaccggcgatcgcaacaccgagcgctatcgcaaggggttccgctccggcgaaggccaggcgctggcggtggtgtttcccaccagcctgctgcagctgtggcgcattttgcaggcctgcgtggccgccgacaaaatcgtcatcatgcaggccgccaataccggcctgaccgaaggatcgacccccagcggcaacgactatgaccgcgacatcgtcatcgtcagcaccctgcgcctcgaccatattcaggtactggacaacggcaaacaggtggtcggcttccccggcagcaccctgcaccacctcgagaaattgctcaagccctacggccgcgaaccgcattcggtgatcggttcctcctgcatcggcgcctcggtgatcggcggcgtgtgcaacaactccggcggctcgctggtgaaacgcggcccggcctataccgaaatggcgctgtacgcccagctcggggaagacggccagttgcgcctggtgaaccatctgggcatccgcctcggcgacacgccggaagagatccttacccggctagaaaaaggcgactatcgcccgacagacgtcgaatacggcgagctgcgcgcctcggataacgagtacgccagccgggtgcgcgacgtcgatgccgacaccccttcccgcttcaacgcagacaaacgccgcctgtacgaggcctccggctgcgccggcaagctggcggtgttcgcggtgcgactcgacaccttcgagaaagagggcaaagagcaggtgttttatatcggcaccaacgacaccgcggtgctgaccgaactgcgccgccacatgctgagccagttcgaaaacctgccggtggccggtgagtacatgcaccgcgatatcttcgacatcgctgaggtgtacggcaaagacaccttcatgatgatcgacaagctcggcaccgatcagatgccgcgcttcttcaccctgaaaggccgtatggacgccagcctcaacaagctgccgctactgccgcacaacctgaccgatcggctgatgcagggactgagccatctggcgccgagccacctgccgaagcgcatgaaggaataccgcgaacgtttcgaacatcacctgctgctgaagatggccggccccggcgtagacgaagcgcagcgctacctgaccgagtacttcgcccaggccgaaggcgctttcttcgcctgcacgcctgacgaaggcaaaaaggccttcctgcaccgcttcgccgccgccggcgccgccgtgcgctaccatgcggtgcacgccgacaaggtggaggatattctggcgctggatatcgccctgcgccgcaacgacaccgactggttcgaaaccctgccgccggagatcgacagccagctggtgcataagctgtattacggccactttatgtgccacgtcttccatcaggactacgtggtgaaaaagggcgtcgacagccacgcgctgaaggaaaagatgctcgagatcctcaaccggcgcggcgccgagtacccggcggagcataacgtcggccacctgtaccacgccaaggcagatctgcaggcgttctaccgcaccgccgatccgaccaacagcttcaaccccggcatcggcaaaaccagtaaacgcaaaggctgggccgaaggcccccgctaa

SEQ ID NO: 422080 - DNA, 795 bp, Serratia marcescens
gtgaaacagattgtgattaaaacgccggaagagattgccaaaatgcgccattccggcgccctgctggcgaaagtgtttgctatgctcgatgaggtcatcgtcgaaggcatctccaccatggagatcaacgaccgcgccgaggcgtttatcgtcgaagagctgaagtcgcgcccggccagcaaagggcagtatgatttcccctatgtgctcaacacctcaatcgacgatgtggtgtgccacggggtgccgtcggccagcaaaatcctgcgttccggcatgattatcaacgtagacatcacgctggaaaacggcggctatatcgccgattccagcaagatgtactgcatcggccaggtgacgccgctggctaaacggctggtgaacaacgtctatgaatcgatgtggcagggcattcgcgcggtgaaaccgggcgcgaccctgggcgatatcggccatgccgtccagcggcacgccgagcaggccggctacagcatcgtgcgggagtattgcggccacggcatcggccgcgatatgcatgaagagccggcggtgttgcactacggtcaacccggcagcggtatggtgctgcaggaaggcatggtgttcaccatcgagccgatgatcaaccagggcgaccgccgcatcaagcagaagaaggacggctggacggtggtgacacgcgacaaaaaactgtcggcgcagtgggagcacaccgtggcggtcaccgccgacggcgtggagatcctgacgctacgcgacgaagagcgccgggccggctacgccgaacgctactaa

SEQ ID NO: 422081 - DNA, 204 bp, Serratia marcescens
atgggcatcgtaaaaatttcggacgcgctgcatgacgatctgcgcctcgccagcctgaccatgacgcgttcgatcaacgcgcaggccgagtactggatcaagatcggcatgctggcggagttccatccggaactgacctacccgcaactggtaaaaaaaatgatgaaagataatgcgctgacgctgaaggagattgtcgggtga

SEQ ID NO: 422082 - DNA, 1104 bp, Serratia marcescens
gtgactaaactacgtgttggggtgatttttggcggtaaatcggcggagcatgaggtgtcgctgcagtcggccaaaaacattgtggatgcaatcgacaaagagaagtttgacgtcacgctgctggggatcgacaaacaggggcagtggcacatcaacgacgcctccaactacctgctcaacgccgagaacccggcgctgatcgcgctgaaccgctcgaacaagaacgtggcgctgatcccgggccaggaaaaacagcagctgatcgaagcgggcagcgccggcgcgctgggccaactcgacgtcatcttcccgatcgtgcacggcacgctgggggaggacggctcgctgcaggggctgctgcgcatggccaatatgccgttcgtcggcgccggcgtgctcggctcggcggtcagcatggataaagacgtgaccaagcgcctgctgcgcgatgccgggctggcggtggcgccgttcgtcaccctgacccgcgccaaccgcgccggattcacgtttgagcaactgagcgagcgcctcggcctgccgctgttcgtcaagccggccaaccagggctcgtcggtcggggtcagcaaggtggaaaaccgcgccgagttcgacgcggcggtatcgctggccttcagcttcgatcacaaggtgctggtggagtcggcgatcgtcggccgcgagatcgagtgcgcggtgctgggcaacgacgatccgcaggccagcgtgtgcggcgagatcgtgctgagcgacgctttctattcttacgacaccaaatacatcaatgagcagggcgctcaggtggtggtgccggcggcaatcgcgccggaagtgagcgaccacatccgcgaggtggcgctgaaggcgttccgcgcgctggagtgcttcggcctggcgcgggtggatgtgttcctgacgccggacaaccaggtggtgatcaacgaaatcaacacgctgccgggcttcaccaatatcagcatgtatcccaagctgtgggccgccagcggcgtcagctatcaggcgctgatcacgcgcctgatcgaattggcgctggagcgccaccagcaggatcgcgcgctgaacagttcggtgttcgatcgctaa

SEQ ID NO: 422083 - DNA, 780 bp, Serratia marcescens
atgaaagcattgaaaacgctgttcgccgccggatgcctgctggccgccggcgcttcgctggcggcggaaaacagcctgcgcttcggcctggaagcgctgtatccgccgttcgaatccaaatccgccagcggcaaactggaagggttcgacatcgaactgggcgacgcggtatgcgccgccgcgcagttgcaatgcagctgggtggaaacctcgttcgacagcctgatcccggcgctgcaggcgcgcaagttcgacgccatcaactcggcgatgaacgtgaccgaacagcggcgtcaggcgatcgccttcaccgacgccatctatcaggtgccgaaccgcctgatcgccaaagccggcagcggcctgctgccggacgccaaatcgctggcgggcaaacacgtgggcgtgctgcaaggatcgattcaggagatttacgccaaaacccattgggcgccggcgggcgtggacgtggtgtcttatcaggatcagaatcaggtttacctcgatctggcggccggtcggctcgacgccacgctggtgatggcgccgtcggggcaaagcggcttcctgtcgcagccggacggcaaaggcttcgccttcgtcggcgaggcggtgcgcgacgacaaaatcctcggtgaaggtatcgccttcggcctgcgtaaaggggatgaggcgctgaagaaaaaactggatgccgccatcgccaaagtgaaacagcaaggcacggtgacggcgctgtcgaagaagtatttcggcgatatcgatgtgacggtgaagtga

SEQ ID NO: 422084 - DNA, 1155 bp, Serratia marcescens
atgcagagcgcctgctcatcccgctcgaagctgccggacgtcggcaccaccattttcaccgtcattggccaactcagcgccgaacatcaggccctcaatctgtcgcagggcgcgcccaacttcgccggcgacccgcagctgatcgaggcaacggcgcaagccatgcgcgcaggtcataaccaatacgcgccgatgagcggcgtggcggcgttacgtgctgctctggcggaaaaagctgaacgattgtatggcgcacgctatgacgccgacgaagaaatcacggtgatcgccagcgccagcgaagggctgtactcggcgatcagcgcgctggtgcatcccggcgacgaggtgatctatttcgaaccggcgttcgacagctatgcgccgatcgtgcgcctgcagggcgccacgccggtggcgatcaagctgtcgttgcaggattttcgcgtcgactgggacgaagtggccgccgccatcaacggcaaaacgcgcatgatcatcgtcaacacgccgcacaacccgaccggcgcggtgtttgacgcgcacgacatcgaacgtctgaccgccctgacccgcgacaccgacatcgtgatcctgtccgacgaggtctacgagcacgtggtgttcgacggcgatattcaccacagcatggcgcgctacccgcagctggcggaacgcagcgtgatcgtgtcgtcgttcggtaaaacctaccacgtcaccggctggcgcgtcggctactgcctggcgccggcggcgctgatggacgagatccgcaaggtgcaccagtttatggtgttctccgccgatacgccgatgcagcacgccttcgccgccgcgctcgccaacccgcagagctacctggggctggcggcgttttatcaacaaaagcgcgatctgctggccagcgccctgcaggattcgcgctttgagctgctgcccagccgcggcagcttcttcatgctggcccgctttagcggcttcagtcacgaaagcgacaatgatttcgccgtgcgcttgatccgcgaagcgaaggtggcgacgatcccgctgtcggcgttctacagtgacggcaccgataccggcattatccggctgagtttttccaaagataacgagaccctgctggaaggcgcgcgccgcctgagccaggtgtga

SEQ ID NO: 422085 - DNA, 921 bp, Serratia marcescens
atgccgatatccctgccgtcgctcgacgtgttgaaaaccttcgtggtggtggcgcaacgcctcaactttacccatgccgcccggcagctgcacctgacgcagggggcggtcagccggcaaatcctcgggctggaacagcgcctgggctatccgctgttcagccgccaggcgcgcggtttggcgctgacgccgcagggcgcgcagctgctggtgccggtgcagcaggcgctggggcagttggacgaggcgctgacgcgggccgccgccccgccgggggcgctgcgcatcaaatgcccgacctgcgcgatgcgctgggtgctgccgcgcatcattcgcctgcagaatgaacggccggacatgcatattgagctgaccgcctcggtgtcgcacggcctggatttcagcaccgagcagtttgacgccgcggtggtattcggccggccgccgggcaaaaagctgagcgcgcacctgctgttcgacgaaatcctcacgccggtctgcacgccgacgttcctgccgccaacgccccggctggcggacttgacggacaaaaccctgctgcacccgacgcgcgatcggcgcgactggctgcgctggctgaaggcggcgggggccgatgcgctgccgtccggcaaggctcagcatttcgataccctcgatctggcgatgagcgccgcactgcaagggtttggcatcgccatcggcgatctgtgcctgctggaggaggatattcaggcgcggcgtatcgtcacgccgttcccgctctgcgtcagcagcggcgcggcctattatttggtctatcctgaacgcggggcgccatcgccggcgctggcgcagtttatcgatttcctgacggcggaggccgccgacagccgcgcccggctgcagaattacctgccgataacctgtaatgctttgtaa

SEQ ID NO: 422086 - DNA, 2298 bp, Serratia marcescens
atgaaatggctttgtgtggtgagtatgttgtccggtctggccctcagcccggcttttgcgcaggaaacgccgataacgcagggcatgcacgcccagcagcgcgacgccttcgtgtcccatttgatgaagcagatgacgctggaagagaagatcggccagctgcggctgatcagcgtcgggccggataacccgaaagaagcgatccgcgagggcatccgcaaagggcagatcggcgccatcttcaataccgttacccggccggatatccgggtgatgcaggatcaggcgatgcagctcagccgcctcaaaatcccgttgttcttcgcctatgacgtggtgcacggtcagcgcaccatgttcccgatcagcctggggctggcggccagcttcgatctggaagccatcgcgctcagcgctcgggtggcggcgcaggaggccagcgacgacggcctgaacatgaccttcgcgccgatggtcgatatcacccgcgatccgcgctggggccgggtctccgaaggcttcggcgaagatacctggctggtgtcgaaaatcgccaaggtgatggtcgacggtttccagaacggcgacccggccaaacccggttcggtgatggccagcgtcaagcactttgcgctgtacggcgccgtcgaaggcggccgcgattacaacaccgtcgacatgagcccgctgcgcatgcatcaggactatttgccgccttataaagcggcggtggatgccggcagcggcggggtgatggtgtcgctcaacgcgatcaacggcgtgccggccaccgccaacccgtggctgctgaaagatctgctgcgcgaccagtggggctttaaaggcatcaccatcagcgaccacggcgcaattaaagaactgattaaacacggcgtggccgccgacgcgcgcgacgcggtgcggctggcgatcacctccggcgtcgacatgagcatgagcgacgagttctacgacaaatacctgccgggcctggtgaaagacgggctggtggctgaaagcgatatcgaccgcgcctgccgcgacgtgctgaacaccaagtacgacatggggctgttcaccgatccgtatgtgcatctgggcccggcgggtgccgatccgcaggacaccaacgccgaaagccgcctgcaccgcgccgaggcgcgggtggtggcgcgcaaaacgatggtgctgctgaagaacgataagcagacgctgccgctgagcaaacaggcgaccatcgcgctggtcgggccgatggccgacagccagcgcgacgtgatgggcagctggtccgccgccggggtggtcaagcagtctgtgaccctgcgcgaagggctggagcgggcggtgggcgacaaggcgcgcattctttacgccaagggcgccaacgtcacgcaggataagggcattatcgactacctgaacgagtatgagccggcggtggcgttcgacacccgttcgccgcagcagatgatcgacgaagcggtacaggcggcgaacaaggccgacgtggtggtggcggtggtgggggaatcgcagggcatggcgcatgaggcctccagccgcgctgacatcacgatcccgcagagccagcgcgatctgatcgccgcgctgaaagccaccggcaagccgctggtgctggtgctgatgaacggccggccgctggcgctgagctgggagagcgagcaggcggacgcaatgctggaaacctggtacagcggcaccgagggcggcaacgcggtggcggacttgctgttcggcgactacaacccgtcgggcaagctgccgatgaccttcccgcgctcggtcggccagatcccgatgtactacaaccacctgaacaccggccgcccgttcggcaaggagaatccgggcaagtacacctcgcgctacttcgattcgcccaacggcccgctgtatccgttcggttacggcctgagctacaccaccttcagcctgtcggatctgacattgtccagcccgacgatggcgcgcaacggcaagctaaccgccagcgtcacgctgaaaaataccggcaagtacgacggcgccacggtggtgcaactgtatctgcaggacgtgaccgcctcggtcagccggccggtgaaagagctgcgcaacttcaagaaagtgacgctgaaggccggccagtcgcagcaggttgagctgccgattagcgaagacgatctgaagttctacaacgccagcctgaaatggggggcggagccgggcaaattcaacgtgttcgtcggcctggactccgacaacgtgcaggcgcaaagctttacgctgaagtaa

SEQ ID NO: 422087 - DNA, 924 bp, Serratia marcescens
atgaaacgctatctggactgcagcgccagcgatctggccgatatcggcaaagccgatctgctctacgccatccgcgccagcgaagggcgcatcttggtcagcgaaaccatcgcggtcactcagccgctgctcaataacgtcaccaacgccgagctggcggccagccagggcgccgacctgctgctgctgaacctgttcgacgtcgaccagccgcatattgcggggctgcccgccgacgtgccgccgcaggaggcgctgcgcacgctgcagcgcctgaccgggcgggtgatcggggtgaacctggaggccgtcgatccggccttcgccaccgaacataacgatttctggcagatgacggcggggcgtgccgccaccgccgagaatgcgcgcaagctgtatcagctcggcgcgcgcatgctggtgctgaccggcaacccgaacaacggcgtcagcaatcaggcgatcgccgccgcgctgaaagcgatccgtgatgaggtgggcgacgagatggtgctggtgaccggcaagatgcacggggccggtatcgtgcgcgaaagcggcagccagctgatcggcgagcaggacatcgcgctgttcgtggagaacggcgcggacatcgtgctgttgccggcgcccggcaccattcccggcatgtcgcaggagaaagtggcggcgctgatcgcttatgcgcagcggcagggcgcgctggcaatgacggcgatcggcacctcgcaagagggggccgacgtgcagaccgtgcggcagattgcgctgatgagcaaaatggccggggcggacctgcaccatatcggcgataccggctatctggggctggcgctgccggaaaacatcttcgcttacagcgtggcgattcgcggcgtgcgccacacctacagccgcatggcgcgctcggtgaaccgctaa

SEQ ID NO: 422088 - DNA, 138 bp, Serratia marcescens
atgatgatgggatggacgcagggccgccaatactccggcagggaaatcggcgaccagctgcgcgacgtcgggcctgctcaagtgctgccgtcgctcggctatttcagcatcgtgacggcgcaaaaaccccgggcttag

SEQ ID NO: 422089 - DNA, 393 bp, Serratia marcescens
atgaaaaaaagcattctgaccggcatgattgccgcgactctgggcctgttcaacaccgctaacgctgaagggatggatcctgccgcattgaaaaacgtctatgacatcacgcgcaataccgccgggttgatgtcttactgcgtcgataaaggcttcctgaaagccgacagcatcgacaacgccaagaaaatggtggcctacgtggcggctattcccggcggcgtcgacacccgcgacggcgacaagcgcgaagcgatgggccgagaaggcaatgtgctgaacgacgacggcaaagtggtcgcgttggaaaaagaagcgccgcaggggctgcaggcatggtgccagcaggctgacgaagggatccgccaggggctgacgtctatcggtcaataa

SEQ ID NO: 422090 - DNA, 1050 bp, Serratia marcescens
atgtttaactttctcccgcgcctgctgttggcgcttgttttgttttccaccgccgcccaggcggatcgccaggtcaccgatcagctcaatcgccaggtcacgctgcccgatcgcatcacccgcgcggtggtgctgcaacaccagacgttgaacctgttggtgcagcttgatgcgatgcctcaggtggtcggcgtgctcagcagttggaaaaagcagctggggccaaactacctgcggctggcgccgacgttggcaaccctgccgatgccgggcgatctgacttcggtgaatatcgagagcctgctaggcctgcatccgcaggtggtgttcgtggccaactatgcgccgccggagatgattgcgcagatcgaacgggcgggcattccggtggtggctatctcgctgcgccgcgaggcggccgatcaggcgggtaaaatgaatccgcagctgagcgatgaggatcgggcctatacgctggggctgcaggacggcattcgcctgatcggcgaagtgatgtcgcgtcagcctcaggccgaagcgttgattaaggacgtcattcagcagcgcgcgttggtcgccgaacggctgcgcgatctgccggaaaatcagcgggtacgggtgtatatggccaaccccgatctcaccacctacggcgccggcaagtataccgggttgatgatgcggcacgccggtgcgctcaacgtggcggcgaaggacattcaggggtttaaacaggtttctatcgaggatgtcctgaagtgggatccggcagtgattttcgtgcaggagcgctacccggacgtggtgaaacagatcctgacgtcaccgcagtggcagccgatcgacgcggtgaagaataagcgggtctacctgatgccggagtacgccaaggcctgggggtatccgatgccggaagcgatggcgttgggtgagttgtgggtggcgaaaaaactttacccgcagcgttttgccgatatcaatctgcagcagcgggtcgacgcttactatcaacgttattaccgcgccacctgctgccagagcgggcaatga

SEQ ID NO: 422091 - DNA, 1002 bp, Serratia marcescens
atgaggctgggctggctggcgttgttgacgctgtgctgcgcgctgttttcgctcggcgttggccgctttcaggtgccgatgacgcacagcctgatgattttgctggagccgttcaccgggcagcattatgccggcatcgatgccatccaacgccaggtgatcctgggtgtgcgcgtgccgcgagtgctgttggcgatgggcgccggcgcggcgctggccctatgcggcgcggctttgcaaggcgtctttcgcaacccgctggtcgacccgcatatcgtcggcgtgtcgtccggcgcggcctttggcggcacgctggctatcctgctcagcctgccgttggcggcgctgctgctgtcggcttttgttttcggcatggcggcgctgctgctgattttcactctcaccagcgccattgcgcggcgcaatattctctctttggtactggcgggggtgatcctcagcggcttcttctcagcctgcgtcagcctgatgcaatatctggcggataccgaagagaaactgccgagcatcgtgttttggctgctcggcagctttgccaccgccgatcggcaaaagctgctgatgctgtttgtgcctttgctgttggccggcggcttgctgttggcgctgcgctggcgcatcaatctgctgtcgttgggtgatgaggatgccggtgcattgggcattaacgttgagcgcacccgctggctgattttgacgctgtgcgccgccatcgtggccgcccaggtggcggtcagcggcagcatcggttgggtcggcttggtgatcccgcacgtggcgaggcggctggtggggccggatcaccggcgcctgttgccggcttcactttgcctgggggccctgtacatgctggtgatcgacgatttggcgcgcacgctgagcagcagcgaaatcccgctgggcattctgaccgcgctgattggcgcgccgctgttcgcgctgctgctgcgccgcgcgcaagtgagaggctggcatgactga

SEQ ID NO: 422092 - DNA, 780 bp, Serratia marcescens
atgactgacaccttattggtcgccaggggcgtaaggttcgcctggccgggcggggcaccgctgttccagcatctggacattcagctacggcgcggcgaagtgctggcggtattgggcccgaatgggcgtggcaagagcacgctgttgcagctgttgttaggcagcctgacgccgcaatccggcgagattgagcgccacggtgagatgggctttgtcccgcagcactttgcgccgccgttcgcctaccgggtgctggatatcgtattgatggggcgggcgcgccatgtcggcctgtttcgttcaccgtcagccgaggatcatcggctggcgagagaagcgttgcagtcgttggatttgcagcacctggcagagcgcgagtttggcagcctatccggcggtcaacgtcaattagtgatgatcgcccgcgcgttagcgatgcgctgcgaggtgttgatcctggatgaaccgacttcggcgctggatctgcattatcaggatcgggtgttgagcctgatggcgagtctggcgcgggagcagcagttggcggtggtgttctctacgcatcaacccaatcatgctcacgcggtggccgatcgggctttgctgttgggcaaggaagggcgcagccggctcggtgcctgccgcgaggtgttaacggcgcaatccctgtcacccctgttcgagctggcgatcgaacgggtgccgctgacggtggcgggccgccgctacgcgacgctggtgccgctgtatcgcagccaactggagcgacatgatgagtga

SEQ ID NO: 422093 - DNA, 726 bp, Serratia marcescens
atgagtgatatcctgctgtttgccgccggcagcctgcggctggcgtttgcgccgctgctgtcggcatttcagcggcgcgccgggcaaaaagtcacggcggaattcggcccggcggggttgttgcgccagcggatagagaatggcaagcggccacagctgttcgcctcggccaacgtggcgcacccgcaaaggttggtggatcttgggatagcgggggcggtgcagatttttgcgcgcaatcggctctgtgtgacggtacgcaacgtgccggcattaaccgaacgtccgctgccgcaggtgctgttcgatccccactggcgccttgctacctcgacaccgggggcagatccttccggcgattatgcgctgcagcttttcgaacgctgtgagcaatactggccggggcaaggggaagcgttgcgccgccgggcgctgccgttggttggcggcagggattctgcccctgtgccggcgggccgattggcagcggaatatctgatcgccggcgggcaggcggatatttttctcggctacgccagctatgctccggccttagccgcctacccgacgttggcggtgcggccgttggcgccgccgctggacatcgaggcggattacggtttatgcctgttggatgacggcgcgcagcggttagccgcatttatcttgagcgaacaggggcaggaaatcctgagccgacacgggtttatgcggcgcgcggaatga

SEQ ID NO: 422094 - DNA, 810 bp, Serratia marcescens
atgccaacgatgggcaactccctgcattatctcgacgtaggctcaggctttccgttgctgctgggccacagctatctgttcgatctgaacatgtgggcgccgcagtttgaagcgctggcgaaacgctaccgcctgatcgtgccggatctctggggccacggcgactcaccggcgctgccgaccgggcgaaacagcctgtcggatatcgccgccgatcatttggcgctgatggatcgcttggatattgaagagttcggcatcgtcggcctgtccgtcggcggcatgtggggcgccgaactggcggcgctggcgccggaacgggtcaaggtgctggcgctgatggacagctacctgggcgacgaaacgccggaggcgcggcagcgttatatgggcatgctggccgccgtggagcaagccggcgccatcacctcgccgctgctggaacatgtcgcgtcgctgttttattccgatgacgtccccgacgccttattgcaatcgctgttgtgtcagctccagagcctgcccgccgatcgcctgcgcgagagcatcgtaccgctgggccggatgatcttcggccgccccgacaagctggcgctgctggaaaacatcaccgccgccagcatcgtcatcaccggcgcccaggataagccgcgcccgccggcggaaggccagcgcatggcggatcttctcggctgtcaacatgtgctgatccccaacgccgggcatatcagcaacaaggaaaacccgacggcggtcaacgaaaccctgctggcgtttctggctgaaaacaccaccccgctgttctggtaa

SEQ ID NO: 422095 - DNA, 756 bp, Serratia marcescens
atgaaaaaacttttcagactattaattattttgcttgtcattttgctgctggcggcggtgctgtggtggttctttgggcgcggcaatccgaatgcgctgtggcaaatcgtcagccaacagtgcgtgcccaatcagcagcagaacgacgatccggcgccctgcttaaaggttgatttaacacagggttatgtgctgtttaaggacagcaaaggcccctatcacgatctggtgatgccaaccgaaaaggtcagcggcatcgagagcccggcattgcagacggatcacgcgccgccttatttcgcccaggcctggaataaccgcgaacatatatccggcgagctgggcaaaccgttaaaagatgcgtggctttcgctggcggtcaattcgaaatatggccgttctcaggatcagctgcatattcacgttgcctgcctgcgtcaggatgtctataacgcgctggggcaacaggcggagcaattagatcagcagtggcgcccgctcgcggtgaaattagtcggccaccaatatctggccagaaaattggcgggcaccgatttaacccaggaagatcctttccgtttgctgcacaactatgtggtcgagcagggcgacagcatcggcaattatggcctggcgctggcggtcagcccgcagggtgagatgctgctgttggctaaccgtttgaagttgaccgatctgaacttgggctcggccggcgaaattcaggactaccactgcgcggtggcggggaactga

SEQ ID NO: 422096 - DNA, 525 bp, Serratia marcescens
atgtcacaaccacgcaaacttcctgctgcactaggcatccatctggatgtgaccaatcgcctgtggcgcacggcgatggaccagtcggtaaaaatgaccaatctgacgcgcccgcactggctggcgctgagtgcgattgccgatttgggtgatggctgcaccctgaaagacgtttcgcagcatttgaacgccgaagtctcgacgatgtcgcgtgcgttgctgtttttggaaaaaaatcggctgatcgctcgcgatgccctgtctgaggataagcgcgctaaaggcgtgagaatgaccgcggccgggcaggagatgctggcgcagttggatcactccagccaacaggcacggcaaaagctgctcaacggcatttcggccggcgatctggaggctttttaccgcgtattgtttggcatcaaacataacgcgatagcgatgctcgaacaggaaaatctattgccggacgagtttgcgctgttggcggaggagcgcgcgggagcgatgaagccggaaggtgaagcgtga

SEQ ID NO: 422097 - DNA, 1332 bp, Serratia marcescens
gtgaacggccgctggcggagagcacaacagctgtgcgttatcgcgttggggatcttctcctgcccggtcttcgccagccagaatgaccaacaggtcatcgcacgcggaaaatacctggcgatcgccgcagattgcgcggcttgtcaccgcggcagcacccaacaggacgccccctacgttggcggttatgccatcgcttcgccgatgggcaatatcatcgccagcaatatcacgcccgccaaaggaaccggcatcggcgactacagtgagccagagtttcgccgcgcgttaacgcagggcatccggcgagacggccaacccttgtatcccgccatgccctataccgcttatcgggggctgagcgatgacgatctgcacgcgctgtatcgttatttcatggccggcgtcgccccggtcgatcgcgcggtgcctgagacccaactggcgttccctttttcctggcgttatgcgatccacggctggaactggctgtttctgaaaaaaacgcccgtcgatgaagacgtgaaaaaagcgcgtggtcgctatctggtggatgttttggggcattgctcggcgtgtcacagcccgcgcaacgcgatgatggccgaacgcgacgatcgctatctggcgggcggggaggccggcggttggatcgcgccgaatatcacctcggatcccgtcagcggcatcggcggctggagcagggaagagttggtgcagtatttgcgtaccgggcgcaatgacaaagcccaggcggccggcggcatggcggaggcggtggagcacagcctgcgtttcctgagcgacgacgatcttgacgccatcgccgactggcttaaacagacgccgccgatcgccaccgcgcaaggaacgaaagcggcctatgcctatcagggaggcggtgaaggccgtgccgccgggcaggcgctgtatgccgctgcctgcgccagttgccatcgcctgggcggcgaaggcgcctacgacggccatttcccttctttgacaaacaattccaccgtaggcagcgagcaggccaataacctgatcatggtgatgctgcatggcgtgcagcgccagggagagacgctgcaaacctggatgccgggattcgccgacagcctggatgaccggcaactggccgagctgggcaattacgtattgcagcaattcggcaatccggcggtcaggataacgccgcagcaagtggctcagctgcgggctggcggtgagaaaccgtggttgatcgcgtcactgccttatgtgttttggggcggggtattgctggcattgatcgtcatcggggcgtgggtgaaacgtcgggtgaagcgttga

SEQ ID NO: 422098 - DNA, 453 bp, Serratia marcescens
atgaagttcaatctgaacggccaggcggtcgaatttaacggcgagccggatacgccgctgctgtgggtgatccgggaacattttaagttaaccggcaccaagttcggctgcggtatcggcgcctgcggcgcctgtacggtacatgtcgacggtaaggcagtgcgttcatgttgctatccgctgcaattggtacgcgatcggcaggtgaccaccatcgaaggattgtccaccgatcgcagtcatccggtgcagcaggcctggattgcagaggatgtgccgcagtgcggctactgccaatcgggcatgatcatggcggtcagcgcgctgttggcggagcacccgaagccggacgaccggcagatagataccggcctgaccaatctgtgccgctgcgccacttatcaccgtatccgcgcggcggtgcaccgcgccgccgacaagggagaaccctaa

SEQ ID NO: 422099 - DNA, 2244 bp, Serratia marcescens
atggcgatcacccgcagaaccttgctaaaaggcagcgcgttggcggtggccgccatgctgttgccgatatcgacgcgcagcctggcagccgtggtttcgcaggatgcggcgccgcccgacggtcagtacgaattgaacgattggatctggatcgatagcggcggccgcatcgtcatcggcgtgtcgcaatgtgaggtcgggcaggggatttacaccggcctggccgaagtggtggcggcggaaatggatgccgattgggcgcaggtgacggtgaagttcgtcaccggccgcgatgcctaccgccaggttgccgggggcgaggctttcgcgcagtttgtcgccgcttcaacctccatgaccaaattttatcagcgcacccggctggccggcgcgcaggcgagagacttttttctgcgggccggtgcgcgacatctcgcactttcaccgcggcagtgccgtacggagaaaggttgggtgattgaggagggcgggcagcgcaaggtcgcctatggcgatctggtgtgctatgccgccgagctgccgttggatccgcagcctgctttaaagagcgaagcgcaagagcaagagagtttcatcggcaagccgctgttgcgggtcgatacgtcggagaaagtggacggcagcgcgatttacggtatcgatattgacctgccggagatgctgatcggcgtcccctggatggtgcccgatctcagcggaaagctggtcgccgtgcgtaatgaacggcagatccgggccatgccgggcgtagtggagctggtgctgacccggcagtggtcgatgaacaacatggtcggattggatcacgatatgtcgctcaatacggtgatcgtggtggcggcgagctactggcaggccaaaaaggcggcggatttgctggaggtcgactggctgccgggcgctggacaagcgctgtccggtagcgcgattgcggcggagaatctggcgatgctggatggcgataccttggtgtcggcggtcgaacgcggcgaggcgccggcgttgattcgtggtgctgaacaagattcgcgcttgcatgaggcgcgttacggcgcgccttatgtggcgcatgccaccctggagccatgcaacgccaccagccattatgaagagggccgtatcgaaacctggggccccttccaggggcaggacatggtgcgcaacgttctggcgaaaatgttcgggctgaagccgacggatgtggtggtgaatacgacctacctggggggcagctttgggcgcaaatatctgccggatgccgtaatgcatgctaccgccgcctcccgggcggtggggaaaccggtcaaggtgatctatccgcgcgagatcgacatgcggcatgaatattatcgtccggcctgcatcagccattatcgggcgctgctggatgaaaacggctacccgcaggcgctgtgggcgcgctatgccgggcagtcgctattctggcaaatgcggcgcgaaacggtacacgaggccgggggatgggatgaaagtatggtggagtgcgtttacagcacgccgtatcgcatccctcatctgaaggtggaggccggcatcgtcgaacagccgatttccctgagctatctgcgtggcgtcggcagcgtcgccagcctgttctttttggaaagctttatcagcgaactcagccataaggccaagcgggacgagtatcagtatcggcggtatctgctgcagggcaacccagaggcgttgcgcgtactggaggctaccgcggcggcggcgggttggcagcgcgaaccgccgccgggcgtttatcgcgggatgtcgtgcaatatttggctcggccgcaataacgctttcaccacttacgtcggtttggtggttgaaatcgccattcaggaagggcggctgcgggtgctccgcgcggtatgtgcgattgactgcggcaaggtgataaacccgaacctggtgcgcgccaacgtagagggcggcatcggctttgcgctgaccacctgtctgcacagcgaactgcactttgaacggggcggcgtggtggaagggaatttcgatctttatccactgctggcgatcgccgaaatgcccaaagtggaagtggtggtgctcgacagcgcgcgtgcgccgcagggatgcggagaagtgtcgactgcggtggtcgctccggcgatagccagcgcgctgcataaggccaccggcaaaacctatcgtacgatgccgttcccacgcgagttctcctcggtgtaa

SEQ ID NO: 422100 - DNA, 303 bp, Serratia marcescens
gtgaagaagcgcgcccccccccaccgcatgtcggaagacgaattcatcaacagcgccacctcgcacacgctgccggtcgcggcgcccgcgccggaagccaaaccggccggccgcaagcgcacctataaggcgatttccgtcagcctgacggacagccacattgaagccatcgatgaagtgatcgtccaggcggcgcgcagcggcatcgtgcgcattacccgctccgacatcatcaagctggccatcgacgggctggcggagaaaagcgaagcgcagctgctggcgctgctgaagaagctctga

SEQ ID NO: 422101 - DNA, 636 bp, Serratia marcescens
atgattgtcctgattggctcgcaaaaaggcggcgtcggcaaatcgacgaaagcggtgaatatcgccgggtatctgattcttaagcaaggcaagacggcgatcatcgtcgatgccgacgaccagaaatcgatcatgacttggtacaacgaccgtcagaacgttgaggggctgccgcacattccggtggtggccgcgtcgggcaaaatcaaggaaacgctgctggaactggatcgccattacgactacgtgatcgtcgacaccgccggccgcgacagcgccgaactgcgctccgggctgctggccgccgatctgttcctctcgccactgcgcccttcgcagatggatctcgacaccatcggctatctgtcggagatgttctccaccgcgcaggaatacaacgagaaggtcaaaggctacatcgtgctgaacatgtgcccgaccaacatcttcatcaatgaagccaacgaagcagcgcaggtgctgagcgaatacccggagttcaccctggtgagccaccgcctgtgcgaccgcaagatttaccgcgacgcctggggcgaagccatcaccgtgcatgaggcgaacaacgaaaaggcgcagagcgaaattgaatgcctggtgaaagaggtgatcctgtga

SEQ ID NO: 422102 - DNA, 342 bp, Serratia marcescens
atggcctatatccccaaaaactatgcgaagctggaaaccggctatcgcgaaaaagcgctgaaactgttcccctgggtatgcgggcactgctcgcgcgagttcgtttattccaacctgcgcgaactgacggtgcaccacatcgatcacgatcacagcaacaaccccgaagacggcagcaattgggaaatgctgtgcctgtactgccacgaccatgaacactcgaaatacaccgaggccgatcaatacggttcgacggtggtggccggtgaagacgcgcagaaagatgtcggcgtcgccacccataacccgttcgccaacctgaaggcgatgatgaagaagtaa

SEQ ID NO: 422103 - DNA, 894 bp, Serratia marcescens
atggatcatcatttgctcgctatccgggtatttaaccgcgtggtggaaaccggcggttttacccgcgccgccgattcgctgggcatgccgaaagcgacggtcaccaagctgatccagaatctggaggatcacctgcagaccaagctgttccagcgcaccacccgcagcgtgtcggtcacccgcgaaggcgaatgctattaccagaatacggtgaaatggctggcggatttggagcagatggagggctgtctgaccgagtcacagaattctccgcagggcgtgctgcgcatcgataccggcagcggcaccgcccgccaactgctgttgccggcgctgcccggctttttggaacgctacccgcaaatccagatcgatctcagcatcggcgatcgcgttatcgatctcattagcgacagcgcggactgcgtgatccgcagcggcccgttggccgactccagcctgatcgcccggcgtctgttcgatctggattgggtcagctgcgccaccccggcttatctggcgcgccacggcgccccacgccacccgtgcgatctggaacagggttttccgatggtgcactaccgccatccggtcaacgaccgcatccatccgcaacgctatgtcgaacgcggcaaagagatcgccattcaacagcgctacccggtcagcattaacgaaggcaacgcgctgctggcggcgagcctggccggattgggcatcatccagatctatcggtttatggcgcagccgcacctcgagcgcggcgagctggtcagcctgctgcacgactggcagccgccgccggagcagatgtacgtggtgtacccgtccaatcgccacctcagcggcaagctgcgggcgtttatcgactgggcggtggagacatttcgctag

SEQ ID NO: 422104 - DNA, 1185 bp, Serratia marcescens
atgctgaataataaagataaacctgcatcatccccgtggccggcgatcttctcgctgacggtcgcctgttttgtcatggtcaccaccgagtttctgccgatcggcctgctgaccaacatcgccccttcgctcggcgttagcaccggcaccgccgggctgatggtcaccatgcccggcatcgtggcggcggtggccgcaccggtgttgagcctggcttccggccggctggacagacgcctgctgatgctgggactgtcgttgctgctgatggtgtccaacctggtggcggcgctggcggtcaacttcccgatgatgctgttgggccgcgtgctgctgggcgtctgcgtcggcggcttctggtcgttcgccgccaactacggccgccatctggtgccggaagccagccagggccgcgccaccgcgctgatcctcagcggcatctcggtcggcgcggtgtgcggcgtgccggcgggggcgctgatcggcgatctgttcggctggcgcgccgccttcttcggcggggcggcgctggcggtcggcgtactgttggcgcagctgcgtttacttacgtcggtaccgccttcccggccggttacgccgcgcgatctggtgctgccgctgcgcctgccgatggcgcgcatcggcctgatcgccatcgtgctgctgttcatcggccacttcgccgcctatacctatctgcgccctctgctgcaacaggtgttcgtgctcagcccatcggcgatctcgctgcagctgctggcctatggcgccatcggcctgctgggcaccttcctcggcgagcgtctgggggagtacagcctgcgcgccacctttatcctgatcgccgccatgctggcgggtattctgatcgtttcgccgctgctcagcggcctcgccggcgccacgctgatggtgttggtctgggggttggcgttcggcgccgtgccggtctgcgccaccaactggatgttcgccgcggtgccgcaggcgccggaagccggccaggcactgctggtgtgcgtcatccagatcgcgctggcctccggcgcactgctgggcggcgaggtggtggactggcagggcgtcagcagcgccatgctgttcggcggcgcgctgatcctctccgccacgctggtgttcggcctcagcttgcgctccggcgcgattggcgctaaacagtgttaa

SEQ ID NO: 422105 - DNA, 1566 bp, Serratia marcescens
atggataactacttgatggcgctggacgcaggaacgggcagtattcgcgcggtgatcttcgatctggcgggcaatcagatcgcgcacggccaggcggagtggcaacacctggcggtgccgggcgtgcccggctcgatggagtttgacctcagccgcaactggcagctggcctgccagtgcattcgccaggccttgcagcgcgccgggctgacggcgcaggcgatacgcgcggtggcctgctgctcgatgcgtgaaggcatcgttctgtacgaccgcaacggcgtgccgatctgggcctgcgccaacgtcgacgcgcgcgccagccacgaagtcagcgagctgaaagagttgcataaccacggcttcgaacgcgaggtgtatcaatactccggccagacgctggcgctgagtgccatgccgcgtctgctgtggctggcgcaccatcggccggacatctaccgccaggcggcgacgctgaccatgatcagcgactggctggccaacatgctcagcggcgagctggcggtcgatccttccaacgccggcaccaccggcatgctggatctgaccagccgcgactggcggccggcgctgctcgacatggccgggctgcgcgccgatattttgtcgccggtgaaagaaaccggcagcgtgctggggcgcgtcaccgaacaggcggcgcaggagagcgggctgctgcgcggcaccccggtggtgatgggcggcggcgacgtgcagctcggcagcctggggcttggcatcgtgcgcgccgggcagacggcggtgctcggcggcaccttctggcagcagatcgtcaacctgccggagccggccatcgatccggaaatgaacatccgcatcaacccccacgtcattcccggcatggcgcaggcggaatccatcagcttctttaccggcctgaccatgcgctggttccgcgacgccttctgcgcggaggaaaaattgctggcggagcggctgggggtcgatgcctacagcctgctggaagagatggcggccagggtaccgccgggcgcctacggcgtgatgccgattttctccgacgccatgcatttcaaaacctggtatcacgcggcgccgtcgttcatcaatatgtcgatcgacccggagcgctgcaataaacagacgctgttccgcgcgctggaggagaacgccgccatcgtctccgcctgcaacctggagcagatcgccgccttctccggcgtgcaggcgcgctcgctggtgttcgccggcggcggcgccaagggcaagctgtggagccagatcctcagcgacgtcaccgggttgacggtgcgggtgccggtggtgaaagaagccaccgcgctgggctgcgcgatcgccgccggcgtcggcgccgggctgttcgagtcgctggccgaaaccggcgaacgcctggtgcgctgggagcgcgagcatcaacccgacatgacccaccatgcgctgtatcaggaacagaaagaaacctggcggcaggtttacgccgatcagctgacgctggtggataacgacctgaccacctcgctgtggaaagcgccggggctttaa

SEQ ID NO: 422106 - DNA, 294 bp, Serratia marcescens
atgcacgtcacattggttgagatcaacgttaaacaagacaaaatcgacgaatttatcgatgttttccgcgccaatcacctgggtgcaatcgaagagccgggcaacctgcgcttcgacgtgctgcaggacgaacagattccgacgcggttttacatctacgaagcctatcgcgacgagcaggcggtggcggcgcacaagcagaccccgcactacctgcagtgcgtggagaagctggaagcgctgatgaccggcccgcgcaagaagaccacctttatcggcctgatgccggaataa

SEQ ID NO: 422107 - DNA, 900 bp, Serratia marcescens
ttgcgcgatcggctgttggcgctgttggtggtggtgatctggggcgtgaatttcgtcgtgatcaagttcggtttacagggcatgccgccgtttctgctggccgggatgcgttttttgctggtggcgttgccggcgatcttctttatcccgcgcccgacgatcccgtggaaatggctgctgctgtacggcatgaccatgagcttcgcgcagtttgccttcctgtttgtcgccatcaaggtgggcatgctggcggggctggcttcgctggtgttgcaggcgcaggtgttcttcaccctgctgttgggtgtcgtgctgatgggcgaaaagctgcgcgtcaaccatttcgtcggcatcgctatcgccagcggcggcatgctggtgctggcgcaggccagcctgcataagccgggcagcggcgcggtccccctggcgggcctgctgctgacgctggcggcggcgttttcctgggcgctgggcaacctgaccaacaagaagatcctggccggtttcccgcagcgcaacattttgtcgctggtggtgtggagcgcgccgatcccggtcgtgccgttcctggcctgcagctggctgttcgacggcccgcaggcggtgctgagcagcctgggccatgtgcaggtcggcacctggctggcggttgcctacctggcgtttgccgccacgctgttcggctattcggtgtggggcagcctgctggggcgctatgaaacctggcgcgttgcgccgctgacgctgctggtgccgctggtcgggctgttcgccgcctggctgctgctggacgaagcgctgtcgccggcgcagttcggcggcgcattgctggtgctgggcggcatggcggtcaacaccttcgggctgccgcgccgccgggcggcgatcgcgcgttaa

SEQ ID NO: 422108 - DNA, 591 bp, Serratia marcescens
atgaatatctacctttccatggccgcgtttgcgctggcggcctccatcacccccggcccggtcaacatcgtcgcattgagcgccggggcgcaattcggctttggcgcggcccagcgccacgtgttcggcgccacgctggggtttaccctgttgctggtgctgctgggattgggcatgcaccagctgctgatcctgtggccggcgctgacccgcttgattcagtgggccggcgtggctttcctgctgtttatggcctatcggctggcgtttgacgacggcaggttgggcagcggcgcggcgcgggcgccttcctgccgctacggcgcgctgatgcaatggctgaaccccaaggcgtggctggcgtcggtggccagcctcggcgcctttgtcggcgacggcgacatccggctgctgtggcagttcgccgggctctacttcgtgatttgctatgcctcggtggcctgctgggcctatgtcggcgcgatgctgcgcggcctgctcaggcaggcgcgcaacgtgcggcgtttcaaccgcgcaatggcggcgttgctggcgaccagcgcctgctatctgctggcggagggtttttga

SEQ ID NO: 422109 - DNA, 828 bp, Serratia marcescens
atgagtgaaaaaacgccgcagttctggcgcgatccgcagttgccgttcgtcgaagcccgcgccatcgcggatggccgccaggtgtgctacagcctgcacagccacgaattcttttccatcggcgccatcaccggcggcgtcagcacctatgtcaacggcgagcggcgcatgcaggtcagcgctggcgatttggttgtcatcaacccgcagcaggcgcatgcctgcaaccccatcgccgatcgctgttggtcgtacatcatgttctatctcgatctcgcctggctcggcgcgctgcagcaggagctgctcggcggcgacggtgaccgttttgttccgttcagccagccgctgagccgcgatccggcactgttccacggcctgaaccggctttatgcgctgctgacggatccgctgtgcagcgcgctggaaaaacagatcgccatggtggagtatttcagcgccctgcagctcgggctgggcgatgcccgccaaccggaaacaccgtcgcatgcccgactggaagcggcggcggcgtttatcgacgcgcactgcacccggccgctaacgctggacgacatttgccgcgccgccgcgctgtccccttcttacctgatccgcgccttccgccagcgttacggcatgacgccgcacgcctatctggtcaaccgccgcgtgcagcacggccatcggctgttgaaaagcggcctgccgatcgccgcggccgccagcgaaagcggctttgccgatcaggcgcacttccagcgcaccttcaaacagctgctggccgccacgcccggccagtatcaaaaaccctccgccagcagatag

SEQ ID NO: 422110 - DNA, 219 bp, Serratia marcescens
atgatgatttttaacgtattcggccgtctgctgggcgtgaagcgcatcggggacgaatggcggctgttccgcgtgacgctgccggagcgcaagtatgcccccagctacgatatcgtgctgccggccgacctgcgcgaagaggagatcgccggctatctgggggatatttatcacgaggcggcgacgccgcagcggccggaggtgtttcgcgtcgaatag

SEQ ID NO: 422111 - DNA, 849 bp, Serratia marcescens
atgaaaattccaaaacgactccagccgctggttgatgacggattaatcgacgacgtcatccgccggttgaaaagcggcaaagaagccgacgtgtttatcgtgcgctgcggcgatgagatccgctgcgccaaagtgtacaaagaggccgagaagcgcaacttcaagcaggccgttcactatcaggaagggcgcaaggtgcgcaacagccgcgacgcgcgcgccatgagcaaaggctccaaattcggccgccagcagcaggaagaagcctggcaaaacaccgaagtggacgcgctgtatctgctggccaaggccggggtgcgggtgccgcagccggatatctgcctggacggcgtgctgctgatggagctgatcaccgacgaagaaggcctggtggcgccgcgcctgagcgatgtcatcctgacgccggaacaggcgcgcgccgatcacgccctaatgatgaactacgcggtgcgcatgctgtgcgccggcctggtccacggcgacctgtcggaattcaacgtgctgatggataaagacgggccggtgatcatcgatctgccgcaggtggtggacgccgccgccaacaaccacgccaaaagcatgttcgagcgcgatatcggcaatctggcggagtattacggccagttcgcgccggagctgcgcgatagccaatacgccaaagagatttgggcgctgtatcaggaaggcaacctgacgccggacagcgtcctcagcggccggttcagcgaaaccctgaaacgcgccgacgtcggctcggtgctggaagagatccaggccgccggcgaggaacatcaacgccgcatgatggcgcgcaacgcggaagagtaa

SEQ ID NO: 422112 - DNA, 1491 bp, Serratia marcescens
atgacgaaaaaaaccaccctgctgcaattcttccactggtactaccccgacggcggcaaactgtggcaggaggccgccgagcgcgcgccgcacctcgccgaactgggcatcaccgatctgtggctgccgcccgcctgcaagggcgcttccggcggctactccgtcggctacgatacttacgatctgttcgatctcggcgagtttgaccagaaaggcagcgtggccaccaaatacggcgacaaggcggcgctcgaacacgccgccaatacgctgcgcgaacacggcgtgggggtgctctacgacgtggtgttcaaccacaagctcggcgcggacgagaaagaacaggtacacgtgttcaaggtggacgccaacaaccgcaacgacatcgacgaccagggcttcgacgcgctggcctacacccgcttcacctttcccggccgccagggcgtgcattccgagtttatctgggattacaaatgcttcagcggcgtcgactacgttgagcagccggacgacaaaggggtgttcaaaatcgccaacgactatggcgacgacggctggaacgatcaggtcgacgacgaaaagggcaactacgactatctgatgggcgccgacgtggagttccgcaataccgccgtgacggaggagctcaaatactgggcgcgctggctgttggaaagcctgccgtgcgacggcttccgcctggacgccgccaaacacattcccgcctggttcttcaacgagtgggcggatcacgtgcgcgacagcgcgcagcgcgacctgctgatcgttgccgaatactggtcgcacgatctgagcgcgctgcaacaatacatcgagttggtggacggcaaggtgatgctgttcgacgtggcgctgcacctgaagtttcatcaggcgtcgaaacagggcgacggcttcgacatggcgcaaatcttcaccgataccctgaccgccgccgatccggcccacgcggtgacgctggtcgccaaccacgacacccagccgctgcagtcgctggaagcgccggtggaaccctggttcaaaccgctggcctacgcgctgatcctgctgcgcgaacagggcgtgccctgcgtgttttatcccgacctgtatggcgccagctaccgtgacaaggggcgcgacggcggcgagtaccagattgatatgccggcgatcccggagctggagaagctgatcgccgcccgccagcgtttcgccaacggcccgcaaaccgactacttcgacgacagccactgcgtggccttcagccgcgccggcaccgccgaggcccccggctgcgtggtggtgctgaccaacggcggcgaaagcggcaaaaccgtcgcgctgggagccgatctggcgcacaccgcctggcgcgatttcctcggcaaccgtcaggaggaaatcaccaccgacgaccagggcagcgcccatttcccggtcaacgccggcagcgtcagcgtctgggtgccggccgccagcctgtga

SEQ ID NO: 422113 - DNA, 657 bp, Serratia marcescens
atgaaacgtgtactcactttcctcgccgttgccgccaccctgttgctaagcggctgtgccaagcagacgccttatgactatgcggcgttccatgagagcaagccgaagtcgatcctggtcttgccgccggttaaccagtcgccggacgtcaaagccagccacagcgtgctcgccagcgccaccttgccgctggccgaggccggttactatgtgttgccggtcgctgtagtggaggaaaccttcctgcaaaacggcctaaccaacgccaacgacatccgcgccgtcagtccgaaaaaactgcaccagattttcggcgccgacaccgtgctgtacctggatgtcacgcaatacggcaccagctacatggtgatcagcagcgaaacccgcgttaccgtagccgctcgcctggtcgatctgcgcaacggcaaacagctgtgggccggcaccgccaccgcatccagcaacgaaggcaacaacaactccggtggcctgctgggcatggtgatcagcgccgcgatttcgcaaatcgccgataccatcagcgacaaaggatttgatgttggcgccatcgccaacacccgcctgctatcggcgacaggtcagaacggcgccattctttatggcccacgctcacctcattacgccagccaacgttaa

SEQ ID NO: 422114 - DNA, 357 bp, Serratia marcescens
atgataactaaaaaaatgggcggggcgctgtttgcagcgaccctgctggccggctgcgccgcgccgaaaacgctttacaattgggatggctaccagacttctctctatcaatactaccagcaggaggggcaaagccctgagcagcagatcgccacgctgaaagagatcgtcgagaaatcccgcgccaaggataaagccgtaccgccaggtctgcatgcgcagctggggctgctgtacagcaaaatcggcaacgacggacaagccatgaatgaattcaacacggaaaaaacgctgttcccggagtcggcgccgtttatgaatttcctgatggccagggataaagggagctttaaatga

SEQ ID NO: 422115 - DNA, 678 bp, Serratia marcescens
atgccaatgaaaaaatcactcgccgtctgttccgttgccctttccgtcactttgctggcgggctgcgcgaccgaatcctcccgctctttggaagtgccgaaagtggcttcctacaacaccacttatcagggcccacgcagccctatcgccgtcggcaaattcgacaaccgatccagctacatgaacggcatcttctccgatggcgtcgatcggctgggcaatcagtccaagactatcctgatcacgcatttgcagcagactggccgtttcaacgtgctggatcgcgccaacatggaagagttgaaaactgaagccggcattaaagggaaggcgcaaacgctgaaaggcgccaactatgtgattaccggcgatgtcaccgaattcggccgtaaagaagtcggcgatcatcagctgtgggggattttgggccgtggtaaatcacaggtcgcttacgccaaagtcaatctgaacgtcgtaaacgtacagacctcagaagtcgtctattccgctcagggtgccggtgaatacgaactgtccaatcgcgaaatcatcggtttcgggggcaccgccagctacgactccaccctcaacggcaaggtgctggatctggccgtgcgtgaagccgtcaataacctggtcaccggtatcgaaaacggcgcatggcgccctgctaactaa

SEQ ID NO: 422116 - DNA, 876 bp, Serratia marcescens
atgttgaacaagcagagcaacggctcgcgcttttcgccgctgcagatccatctgatgatcgaagtcagcgagcagccgctgggcgtcaccgagctggcggcccggctttgcatcgacaaggccagcgccagccgggcgctgcgcagcctggtggccgccggcgtgatagaaacggtggatcatccggatgacaggcggcacaacctgcatcggctgagtaaaaagggcggcaaggcgctggccggcatcgagagcgacgccgacggttttatgcaggcggcgctggcgcagttggacgacgatgagctggcgagcaccacggcggcgatgaaaaagatgaccgcggcgctgcgcagcgcgcgcaaacagcgcgacgccaacctgcgggtgcggccgatcgccgcgcgcgacgatgcggcgatggcggcgatcattcgcgacgtgtttcgcgagtacggtatggacaagatggaaggggtcagcctgcacgatccggatctcgatcggctgaccggcctgtatcgcgacaacggcggccactactgggtgctggagcgggacgggcaggtggtggggggcgtcggcatggcgccgctggcgggcgaagagcccggctattgcgagctgcagaaactattctttaagcccggcgcgcgcgggctgggcatggcgcgctatatggtggtgcaggcgcttaaggcggcgcgggcggcggggtatcgctactgctacctggaaaccaccgaacagttgaaagaggcgatcgggctgtactacgcgctggggttcaccctgttgacggaacggcgcggcaacaccggccatcacggctgcaacgtgtgcatgctgaaaaatctgcagaacgacgatatgtga

SEQ ID NO: 422117 - DNA, 1299 bp, Serratia marcescens
atgttgggggatccgatggcgctgtccgcgctggtcacgctggtggtcatcgcgctatgggccagcgcccgcttaccggagtatctggtcgcgctgctgttcttcgcggcggtgatggtgttgcagctggcgcccgccgcagtgaccttttccggtttcgcgtcttccgcattctggctggtgctcagcggtttcgtgctgggcaccgccatccgcagcaccggcttggcggatcgcctggccaaccgactcttgccgcacctggccagctcctggccgcgcctggtgggcggcgtggtggcgataagctacgcgctggcgtttgtcatgccttccaacatggggcgcattacgctgttgatgccgatcgtcatggcgttggccgatcgcgccggtctggcggagggcacgcgcggccgcatcggtttggcgctggcggtggggttcggcaccttccagctctccgccagcatcctgccggccaacgtgcccaacctggtgatgagcggcgcggcggaaagcgcctacggcagccacttcgcttatctctcttacctgctgttgcacgcgccggtgctcggggttgccaaaggcgcgctgctgacgctgtgcatctgcggcctgttccgtgcgcggccgcagccggtggcggccgaggcagcgcaaaccccgctcagcgccgccgaatggcggctgatcgcgctgttgggcgccacggtgttgctgtggatgaccgacagctggcacggcatcgctcccgcctggatcgggttggcggcggcctgcttgtgcctgttgccgcgtatcgggtttctcaacggcgagcagttcgccgccggggttaacgtgcgcacctgcatctacgtggcggggatcctggggctgacggcgctggtcagccactcggggcttggcgatcggttgggcggtgcgctgctggcgatgatgccggatctgcacggcaaaccgttcaccgcattcggttcgctggtggggatcaccgcgttgctgaatttcgtggtgaccgccaacggcgtgccggcgctgtttaccccgctggcgcaggcgctgtccgcgggcagcggcttgccgctgctgacggtgctgatgacccaggtgctcggttacgccacgccgctgctgccgtatcaggcttcgccgatcgtggtggcgatggggatgggcaaagtgccggcgcgtgaaggactgaagctgtgcctgctgttggccgcgctcagctttgcgctgctggtgccgttggactatctgtggttcaggctgctggggtggatcccgtaa

SEQ ID NO: 422118 - DNA, 876 bp, Serratia marcescens
atgactcccctgctgtttcacaaatatcacggcctgggcaacgactacctggtatgccaccgttcggtcgccgatcgtctgagccaggaacagatccgcctgctgtgccacccgcattacggcatcggttccgacggcctgctgatcgacagcggcgacgccgtcaatcccaccctgcgcatcatcaacccggacggctccgaagcggagaaaagcggcaacggcctgcgtatctacgcgcggtatctgttcgacagcgagcgcgtggggcatcagccgtttctggtgcacaccgccggcggcgacgtgcgttgccaagtggcggaagacgcgcatcagataaccgtggagatggggcgcgccaatttcagcccggcggcgctgccggccttgatcgatctgccggaggcgctgaactatcccctgcccctgagggaggagacgttaagcgtttcgctggtgtcgatgggcaacccgcactgcgtggtgccggtggagaaacttgatctggcgcaagtgcatcggctcggaccgcagattgaacgccatccgctgttcccaaaacgcaccaatgtacaactggtggaagtagtcgatcgccagacgctgcgcatcggcatctgggagcgcggcgccggttttaccctcgcctccggcagcagcagctgcgccgccgccagcgtgatgcgcaagttgggacgagtcggcgatcgggttagcgtgcggatgcctggcggcgaactgcagatcgccttcagcggcgattttcaggtcagcatgcgcggaccggtgcataaaatcgccaccctgacgctggacgaagattgttttgccggcggcgcggggctgtttacgggatccaccccagcagcctga

SEQ ID NO: 422119 - DNA, 258 bp, Serratia marcescens
atgaaaaacctgaaaatgaccatcgccgccatcgcactggcctccgtctccttcggcagcttcgccgccgaactggtcaacgctcaaccggccgatctgcaaaaagccggcgtcgttaccgtcagcggtgcttccgacctgagcagcctggaaaacaaactggcggccaaagccgacgcggccggcgccaaatccttccagatcatcgccaccaccggcgacaacaaactgcacggtaccgcgatcatctacaattaa

SEQ ID NO: 422120 - DNA, 258 bp, Serratia marcescens
atgaaaaacttaaaattaaccttagcagctctcactctggccagcgtttccttcggcagcttcgccgccgatttagtccagaaccaaccggcagaccagcagaaagtgggcgtcatcaccgtcagcggcgcgtccgatctgacctcgctggaaagcagcctggccgccaaagccgatcaggcgggtgccaaatccttccgcatcatcggcgccggtggtaacaaccagctgcatggaaccgcagaaatctatcaataa

SEQ ID NO: 422121 - DNA, 645 bp, Serratia marcescens
atgagcatcaatgaagaggtttgcggcaagaaaagccgcggcagaccgaaacaatttgatcgcgaccgggcgctggaaagcgcgctcgatctgttctggcggcacggttatgaagccacctcgctggccgatctggtggaagtgaccggcgccaaggcgccgacgctgtatgcggaattcggcaacaaggaaggaatgttccgcgcggcggtggaacgctatctgcaaaaatacaccacctgcaccaaccaactgttggagcaggatctgccggtggccgagatcgtcgaggcctacgtacgctcttccgttgaagtgtttaccgaccccgatacgccgtcaggctgctttatggtgtgcgcctccgccgcgctgtcgtcggcgtccgatgacgtcgcccagatgctgcgcaggaagcatcatgcgcaggaagcggcgctgaaggcctgcttcgatcgcaagatgcagcagggcgaactgctggcgaaaaccgacaccgcgctgctggcgaagtacgtgatttgcaccattgaaggcatgtcggtgcaggcgcgcgaaggggcaagccggagcgatctgctgcggttgctggaggcgttgatgttggtgtggccgcggctcagccagattggcaataaggtgtaa

SEQ ID NO: 422122 - DNA, 822 bp, Serratia marcescens
atgatgaaaaagcacctactgatgttggctttcgcctccgtcgccaccctcgcctcttttggcgccacggcagcgaccaagctggtggtcggcgcctccaacgtgccgcacgccgagatcctcgaacaggccaagccgatactggcgaaggaaggcatcgatctgcagatcaagcgctttcaggactacatcctgccgaacaccgcgctggccagccacgacatcgacgccaactacttccagcacgtgccttacctgaactcggtgctgaaagaccacgccgacgacaagagctacgacttcgtcagcgccggcgcgatccatattgagcctatcggcatctactcgaagaagtacaagagcctgaaagatctgccggaaaacggcaaaatcatcatgcgcgacgcggtggcggaagaaggccgcatcctgtctatttttgaacgggaaggcgtgatcaagctgaagccgggggtgagcaaagtggacgcgcgcatcagcgacgtggtggaaaacccgaaacacctgaagttccaggccaacgttgagggcgcgctgctgccgcaaatgtacaacaacgacgaaggcgacgcggtggtgatcaacgccaactacgccatcgacgccgggctgaatccgaccaaagatccgatcgcggtcgaaagcggcgaaaacaacccgtacgccaacatcatcaccgtgcacaaggccgacgtgaacaaaccggagatcgtggcgctggtcaaggtactgcactccaaaccgattcaggactttatccgcgagaaataccagggcgcggtgatcccggtcaatcagtaa

SEQ ID NO: 422123 - DNA, 669 bp, Serratia marcescens
atgattgaatccctgttcccccacctgcgtctggaccaactgtgggacgccacctgggaaacgctgtacatgaccggcatcgccggtttggccacgctggtgctgggcatcgtgctcggcgtgctgctgtttttaacctcgaaaggccagctgtggcagaaccgggcggtctactcgctgatctccgtgttggtcaacgtcttccgctccattccgttcatcattctgatcgtgctgctgatcccgttcaccaaatcgctgatcggcaccattctcggcgcggatgcggccctgccggcgctgatcgtcggcgcggcgccgttctacgcccggctggtggagatcgcgctgcgcgaggtcgacaaaggggtgatcgaagcggcgcgctcgatgggcgccaaaaaccgtaccctgattttccgcgtattgctgccggagagctcgccagcgctggtttccggcatcaccgtcaccctgatcgcgctggtgagctacaccgcgatggccggggtgatcggcgccggcggcctgggcaacctggcctatctggaaggattccaacgcaaccacagtgacgtgacgctggtggcgacgctgacgattctgctgatcgttttcgtcattcagttcatcggcgacaccctgacaagaacgctcgataaacgttaa

SEQ ID NO: 422124 - DNA, 1026 bp, Serratia marcescens
atgatcgttctttcgaacgtttgcaaaacttttgacagcacacagggccgcgtcgtggcggtagacaacgtcagtctggcggtagaggccgggcaaatttacggcatcatcggctacagcggcgccggcaaaagcacgctgatccgcctacttaacggcctggaaacgcccaccagcggccgcattgatgtaggcggcttcgatatcgcccgcgccaaaggcagccacctgcgccaggcacgcctgaaaatcagcatggtgtttcagcacttcaacctgctgtggtcgcgcaccgtcagccaaaacatcgctttttccatgcagatcgccggcgtgcccaaggcgcagattgcgccgcgcgtggcggaactgatcgcgctggtcggcctgcaggggcgcgaagacgcctacccgtcgcagctcagcggcggccagaaacagcgcgtcggcatcgcccgcgcgctggccaataacccgagcgtgctgctgtgcgacgaggccacctcggcgctcgacccgcagaccaccgacgccattctcgacctgctgctggatatcaaccgccagctgaaattgaccatcgtgctgatcacccacgagatgcacgtggtgcgcaaaatctgccaccgcgtggcggtgatggaaaacggccgcatcgtcgaagaaggcccggtgctcgacgtgttcacccggccacagcaaccgatcacccggcagttcgtcaaacaggtgtcgcagtatgcggataccgaagagagcttcaacccgctgctcaccgcccatctgccgggggcgattttcaagctgaccttcgtgggcgtgcaaacccatcaggcggtgatctctgaagtgatccggcgctatgccctgaccgtcaacattctgcacggcaagatcagccacaccctcaacggttcgttcggcgaactgtacattcacgccgaaggcaacgaacaacaagtcgccgacatgctcagcctgctgcacgaaagagatatcgccgtcgaggttatccaacatgattga

SEQ ID NO: 422125 - DNA, 444 bp, Serratia marcescens
atgattaccatcagagcacgcgcggcggaagacaacgcgcaattggcagatatctggctgcgttcggtgcgcgccacccaccattttttaaccgaagacaacatcgcgcagctgttcccgctggtgctgaacgactacctgccggcggttaacgtctgggtggccgaagagcggccggggcacccctgcggctttatcggcctgaacggcaacaaggtggagatgctgtttatcgacgccgatcagcgcggcaaaggggtgggcaaagcgctgctgacccacgcggaaacgctgcacgatgagctgcagctggacgtgaacgagcaaaacccgcaggccagcggcttctaccgccactacgggtttgtcatcaccggccgctcgccgctcgacggccagggcaacccgttcccgctgctgcacatgaagctggacaaacgctag

SEQ ID NO: 422126 - DNA, 873 bp, Serratia marcescens
atggaagcggtacgcgcagcgatagaaaaacaggtgctcagcctgaccgggctggcgctcggcggcgtcgattttgagaacccaccgggcgatccgggcttgttcggcccgcagtcggtcatctggcaggtacaccgcgatttcaccccgatgctgtgcggcggcgtcagcgccttgctgctgcagatgctgcacccgctggcgctggccggggtgtgggatcactccaacttccgcgaagatatgattggccgcctgcgccgcaccagccagttcgtgtcggtcaccaccttcggcccgaccgccgaggcgcagcggctgattgccaaagtcaaagccatccatctgcgggtgaccggcgtcggcagcgacggcacgccttatgccgccagcgatccggcgctgctgacctgggtacacgtcgcggagagcagccgttttctggccagccacctgcgctaccgcaacccccatctttcccgcgatttgcaggatcaatactaccgcgaagcggcgcgcgtggccgccgcgctgggggcgaccgccatccctcagtcctgcgcggaggtcgaagagtacctgcaggcgatgcggccgcagctggtctgcgatgaacgcacgcaagaggtggcgcgcattctgctgaaggcgccggcgccgagcgcattggcgcgcccgctcggcggggtggtgatgcaggcgggcatcgatctgttgcccgattgggcgcagcggcagttcggttttcatccgggcgcgctgcggcggcggctggtgcgaacgggcgccgcaggcctcggcaagttgctgggcgcgtcgatgcgcaacggctcctatcagcgcgcggtgcggcgcatcactcagccgtcatga

SEQ ID NO: 422127 - DNA, 1104 bp, Serratia marcescens
atgaacgagtcatacgtacttgctgaagtcagcaatgagaaccagacgctggttgcggtggttcagcaagggagcagggcagcctatttttatatctatcccgccgaagcctacagcgatcgctatcaggtgcgcgcctgctggctgcgcaacctggccgccgcgccgctgcaggaagatcgcgccgcgctggaacaagggcagccgccgatgctggcggcggagtattgccgcaacctggaaggcgaagcgccgctgaacccggaagggctgatggtggtgtggagcgaaagcgacgacggcgcggccctgtggtattacggccaactgctggcggtgatccccggctggagcctgtatatcgaccattcggtgtgctattccgccagctgcatcaaggagagcccgctggcttatccgctcggctcggcctcgaccaacacccagtatgcgcaggcggagagcacccgccagttctggcgcagctggcagcgtgaagagggcaacccgtggccgaagatgcagcgcgattttcaggcgcgctatgagccgcatttcggcccttcggtgaagtactacgccatcgatcagggcaagtggccgccgatggccatcacccagcacgagcgcgacggcatctattacttcctcaccatgggggtcagcatccggccgatgccgtgggtggagatcctgttcaacgacgaggcttcgcgctatcgccgtatggagatggcgatcgccatcgacagccaatacatgaccgaagacaacgcggtgcagatggccagtgcgctggccggtttcgcgcacgcgccgtgggcgcggctgacctggatcggcgaagggcatacgctggagtcggacgtggcgccgctgggctacgagggttatattttatcgtcgtccttctatccgcatagtgcgcacctggctctgccgcagcagtacggcgatccggtgaacctgttctgggccagcccggtgtttaccgccgagcggcagctggcgcacgccacgccgaacggcgggcacgatctggtgaatcggctgcgggagcagggcgtcgaccatattttccgcccgcgccagccggtgtgctga

SEQ ID NO: 422128 - DNA, 528 bp, Serratia marcescens
atgaccaccgcgctgttgattatcgatgtgcaggaaggattgtttacgccgccgccggcggatgctgcgggcaccgttgcgcgcatcaatcagctgagcgagcgcgcccgccgggcgggcgtgccggttgtcgtcattcagcaccacacgccggacgacgagctgccgcacggcagcgccgcctggcaagtgctcgcggcgctgaaggtggcgccgggcgatcaccgggtggataaaaccacgccggactcgttcctgcgcacctcactgggcgcgttactgatcgccaacggcgtatcgcagctggtggtttgcggctactccacgccgttttgcatcgataccacggtgcgcagcgcggcggcgcacggttatccggtgacgctggcggcggatgcccacacctgccacgacaaaccctatgccgacggtctgctgatccgcacccaccataacgagacgctgtcgaatatcgaaagcttcggcgtgccgatccgcgccgtgcccgcggcggacatcgtgttctga

SEQ ID NO: 422129 - DNA, 876 bp, Serratia marcescens
atgaagatcggatttgccggactgggtgggatgggcagcgccatggcggccaacctgttacaggcgggcttcgccttaacggtatggaaccgctcgccgcaggcggcgcagccgctggtgagcgccggcgcgcggcaggcagaacggccggaacagctggccgatgccgacgtgctgatcaccatgctggccgacgatgccgccacgcaacaggtggtggtcgacagcgggttgctgcaacggatgaaaccgggcgcgctgcatatcaatatggcgaccatttcggtcgaactcgccaagcgtttgacggcgctgcatgcggaacacggcatcggctatctcgccgcgccggtgctggggcgggtcgacgtggccgccgccggcaagctgaatattctggcggccggcgatagcgagctactgaagcaagcgcagccgctgttcgatgccctcggccagaaaacctggcacttcggcgccgatccggcgcaggccaacgtggtcaaaatcgccaccaactttacgctggccagcgccattgaagcgatggcggaaggcagcgcgctggtgcgcaactacggcgtgtccggcgccgactacctgcagatgctgggcggcaccgtcttcgccgccccggcctatcagggctatggcgcgctgatcgccgccgagaagtattcccccgccgggttccggctggcgctggggctgaaggacgtcgggctggcgctggccgccagcgccgacagccatacgccgatgccgttcgccggggtgctgaaagacaacttcctcgacgcgatggcgcagggggatgcggatctggactgggcggcgctggccaaggtggcggcgcggcgggcgggcctgaaataa

SEQ ID NO: 422130 - DNA, 1008 bp, Serratia marcescens
atgagctacaccattcttaccggcgatcgcgccaccggcccactgcatttaggccacttcgtcggctcgctgcgccagcgcgtcgaactgcagcaccagcataaccaaacggtgatggtggcggatctgcagggcctgaccgacaacggcaacaacccgcaaaaaatcagcgccaacgtgctcaacgtggtggccgactatctggcggtgggcatcgatccgcacaagaccacgatctgcctgcagtcggcgctgccggcattggccgagctgacgatgtactacctcaatttggtcagcgtggcgcggctggaacgcaacccgacggtgaaaaacgaaatcgccgagaaggatttcgcccgcagcctgccggccggttttttgatttatccggtcagccaggcggcggacatcaccgccttcggcgccacccacgtgccggtcggcgaggatcagctgccgatgctggagcaaaccaatgagatcgtgcggcgtttcaaccacatcgtcggccaagcgatattaacggagtgccagccgttgttgagcaacgtcgggcgtctgccggggctggacgggcagggcaagatgtcgaaatcgcgcggcaacgccatcccgcttggcgccggcgccgacgaggtgcacaaggcggtgatgagcatgttcaccgaccccggccatctcaacgtcagcgatcccggccgggtggaaggcaacatggtgttcacctacctggacgccttctgcgaagacgccgcgctggtggcggatctgaaggcgcactatcgccgcggcgggttgggggacgtgaaaatcaaacggctgctggaggactgtctgcagagcctgctcgagccgatccgtgcccgccgcgccgaattcatcgccgataaaggcgagctgacgcgcatcctgcagcacggtacccgccgcgcgcatcaggtcagccaacagacgctgcagcaggtcaagacggcgctggggctggacttcttcaccctggcgtga

SEQ ID NO: 422131 - DNA, 834 bp, Serratia marcescens
atggctcaggcactgttaaaattggcacagcacgactttccagggcagcacgccgccgcatcccgcaaagtattatcggtaaagggactcggcaaggcctacaaagcgcagcagcgcgtgctggatgacatcaatttcgatctgcacgccggcgaattcgtggcggtgatcggccgttccggcgcgggcaagtccacgctgctgcacaccctgaacggcaccattccttccagctgcggcgagatgctgcacttcgaagacgatggcgcggcgcaggatatcgcccagttggtcggccgccagatgcgccagtggcgcgcgcgctgcggcatgatcttccaggacttctgcctggtgccgcggctggacgtgatgaccaacgtgctgctgggccgcctgagccacacttccactctgaaatccttcttcaaactgttcgatgacgccgaccgcgcgcgcgccatcgagctgttgcagtggctcaacatgctgccgcacgcgctgcagcgcgccgagcacctctccggcggccagatgcagcgcgtcgccatctgccgcgcgctgatgcaaaacccgcaaatcctgctggccgatgagccggtcgcgtcgctcgatccgaaaaacacccgccgcatcatggacgcgctgcaaaaaatcagcgaagacggcatcgcggtgatggtgaacctgcactcggtcgaactggtgaaagagtattgctcgcgggtgatcggcatcgcccacgggaagatcgtgtttgacgggcatccttcgcaactgaacgaacggatcctgcaccagctgtatggcgaagaagccaatcagatccattga

SEQ ID NO: 422132 - DNA, 933 bp, Serratia marcescens
atgaaaaaagtattgagtctgaccaccctgatggccggcgcgatgatggtatttaatgctgccgcagcggatgcgccgaaagagctgaacctgggcattctcggcggccagaacgccacccagcagatcggcgataaccagtgcgtgaagcagttcctggataaagagctgaacgtcgataccaagctgcgcaactcgtccgactattccggcgtgatccagggcctgctgggcggcaagattgacctggtgctgagcatgtcgccgtcgtcgttcgcctcggtctacatcaaggatccgaaagcggtggacatcgtcggcatcgcggtcgacgacgtcgaccagtcgcgcggctaccactcggtggtggtggtgaaggccggtagcccgtaccagaaactggaagatctgaagggcaaggccatcggcttcgccgatccggattccacctccggcttcctgatcccgaaccaggcgtttaaaaagctgttcggcggcacggttgacaacaaatacaacaacaccttctccagcgtcaccttctccggtggccacgagcaggacatcctcggcgtgctgaacggccagttcgagggcgcggtgacctgggcgtcgatgatcggcgactacaacaccggctacaccagcggcgcgttcacccgcatgatccgcatggatcacccggacctgatgaaacagatccgcatcatctggcagtcgccgctgatcccgaacggcccgatcctggtgagcaactcgctgccggccgacttcaaggccaaagtggtcaccgccatcaagaagctggataaagacgatcaccagtgctttatcaaagcgatgggcggcaagcagcacatcggcgacaccaccctggcggaataccagaccatcatcgatatgaagcgtgagctgaccaaaggcgaccgttaa

SEQ ID NO: 422133 - DNA, 864 bp, Serratia marcescens
ttgaataccgatttcgcacactattaccaacggatccgcagcaagcaaaagcgcgaggcgctgctgtggtcgctcgggctggtggcgctgtacctgggcgccggcaacctcgccgagttcaacctgcacaccgtctgggtgtctattccgcacttcttcgactacctggccgaaaccattccgacgctgcattggcctctgctgttcgccgacgggcgcaccgagggctcgctggcctactggggttaccgcctgaatatccagctgccgctgatctgggagaccctgcagctggcgctggcggcgaccattttctcggtgctggtggcgaccgtgctggcgtttctggcggccggcaacacctataccccggcctcggtgcggctggcgatccgcacgctggtggcgttcttacgcaccatgccggagctggcgtgggcggtgatgttcgtgatggcgttcggcatcggcgccattcccggcttcctggcgctggcgctgcacaccatcggcagcctgaccaagctgttctacgaatcgatcgaaaccgcctccaacaaaccggtgcgcgggctggcggcctgcggcgccacgccgctgcagcgcatgcgtttcggcctgtggccgcaggtgaaaccggtgtttctttcctacagcttcatgcggctggagatcaacttccgccagtcgaccattttggggctggtgggggcgggcggcatcggccaggagctgatgaccaacattaaactcgaccgctacgatcaggtcagcatgacgctgctgttgattatcgtggtggtttccgtgctcgactacgtgtcgggcgagctgcgcaagcgcgtggtggagggggcaaaatga

SEQ ID NO: 422134 - DNA, 900 bp, Serratia marcescens
atgatagcgggcactccggcgtcggcggaaacgctgcgccagttgaaacagcagcatccggcgatcttcgcgcagcaggggcgctacctgcgcaccgtcggcctgatagcattggcgatcgtgctgtactacgtgttcttcttcctggtgttcggcattacctggccgcagtttatcaacggttgccagcagctggggcgctatttcctgcgcatgttcgtctggcacgacttcgtcaattggccgttcatgtactacttccagcagatcggcatcaccatcgccatcgtgttcgccggcaccatcaccgcgtcgctgatcgcgctgccgctgtcgttcttcgccgcgcgcaacgtgatgtcgacgccgctgctgcggccgatctccgtgctggtgcgccgcttgctggacgtgctgcgcggtatcgacatggcgatctggggtcttatcttcgtgcgcgccgtcggcatggggccgctggccggggtgttggcgatcgtgatgcaggacgtcgggctgctgggcaaactgtacgccgaagggcacgaggcggtggacaagtcccccagccgcggcctgacggcggtgggcgccaacgggttgcagaagcaccgctacggcatcttcacccaatcgttccccacctttctggcgctcagcctgtaccagatcgagtccaacacccgctctgcggcggtgctgggcttcgtcggcgccggcggcatcggcctggtgtacgcggaaaacatgcggctgtggaactgggacgtggtgatgttcatcaccctgattctggtggtggtggtgatgatcatggataaggtctcgtcgatgctgcgcaacaagtacatcatcggcgaagacatcccgctgtatcagcaaaaaagccaaatcgattga

SEQ ID NO: 422135 - DNA, 465 bp, Serratia marcescens
atgatgaacaacgacgtgctgcgcagcgtgcgctatatgctgagcattaacaacgccaaaatggtcgagattatcaaactggacgatttcgaggtggcggtgtcggcgatggacgcttacgtgatcaaagaaggcgagccgggctacgagaagtgcccggacgaagtgatggcgcacttcctcaacggcctggtgttcttcaaacgcggcaaggacgacaagttcccggcgccggcggttgagctgccgatcaccaataacctggtgctgaaaaagctgcgcgtggcgttcgagctgaaagacaccgacatgcaccagatcttcaccgcggtggacttccgcatttccaagccggagctgagcgcgctgttccgcaaagaaggcaccaagaactaccgcccatgcggcgatcagatgctgcgctacttcctcaaagggctggcgcaacgcgttcgcggtgagtaa

SEQ ID NO: 422136 - DNA, 2568 bp, Serratia marcescens
atgccaaccatcacgaaaacccaatcactttacacgttgacccggccggtctggctggatgcggcaggcatgagcaaaggtatcgatcacgatcgccagcacctgggcatcattctcgccgccgggcaggtgctgcgagtgcggcagaccaacgcggcgtttaccggcaagctcacgctgcgcttgctgaatgacgacagcaaaacggaggctgaattcagcctcggcgcgagctgggtcgaggcccaggtcaatgccgtctcggtgccgtttatcgatacgccgtacgggcagggcgaaccggcgctggagttcgagtatccggacacggcgaaagcgctgccggtttatcgccgcggcgaaaacgaagccgcattcttcgcccgctgggacgatcgggacgccgagtttgcgctggtcgatgcggaatacgcggtattgctggtgccgaaaatcagtaaaccggcgctgaagtcgctgggtgaagcgaaaaacatcgacgggctgatcgcctactatgaccgcattttcaccttctacaatgcgctgaccggcgtctcgttcgaggctgaacacgaatccgatcgcaatattcgcaaccgctactttatgaaggccgataaacacggcgccggcgccgcgtattacggcggccgctggacggcggaaaccagcagctcggtcagcagcttctggctgacgccgaaagacagcaactggggcagcctgcatgagatcgcgcacggctatcaggggcactttatgggcgacaaatatttctccaccggtgagatgtggaacaatatttacgccgcttgctatcaggacgtgatgctgggagagcgcaaataccaggaagggtggctgtataactacggcaacgcggccggcgtcgagaagaaaatcgtcgatctgatcgctcagggcacgccgctcaaccagtgggatctgcgctccaagctgttcttcgcgatgctgatggtcgacaaggcaggcaagaacgccttcacgcactttaaccagcagtatcgccaaagctgcaatacgccgggcttcgtgccgtccgaacatgccttgctggacctgctgtcggcaagcttcgccgcggccggagagcaaatcgacgtgacgccgttcgtcgagctgaccggcggcgtgatcacccaaacgcagcgcgatctcaacgcgtacagccacgccaaggcggtatacccgctgtatcaactggtggatgcgcagagtttgccggcggtgcaggcacagctgaagctggattcctccctgcggctggtcgattcctctcagctcaaggcgagcggcctgaaaggcgatgtcgccctgagtctggatatcgatgactttgcgcagatctacggtgaggagcttgtgctgatggaaggggcgcgctatgcccacaaggtccgtatcgacgcgccgaccctggccctggctgcgttgccgatcggcgtgtacaccctgcggttgccgaccggtaaagatcgcaaataccggccgacggcgggttacctgaccgtgaaacaggggaaaagcgcggtgacgcttcgcttcgagcgcaaagccgcttcgccgatcgtgtcgcaggagatcaatctgttgggcctgagcgatgcggtcttcgccaccgtggtcgtcgatcgcgccaaaggggcggtggtggttgacgtgaccagcaccacgccgcacgcctacttcccgggtgaaacctatgcccgggtgacgctgcgcgatcggcagggtgcggtgcggttcactaaggagattcagggcactcaggctacgttgagtcacgacgaactgccgtttgccgagggcgatgacatcgagatttaccatgtggagccgagccgggtgcgcttgaatccggcggcggccggcgtcatcgacaacaaaaacaaaaccaacgtgctgcgtatcgaaaaaagcgggctgaaaaatccggcgttgcccggcgatcccgaacaagcgctgctggcgcgcctggaacaggcggcgcagcgtttgcgccgcctgctgccggcttactacgcgccgtcgtcgtcgttcaaggacgatatttatctggcgatcggcgccttcgccgagccgcagcgcgagtcgctgttggcgacctatcgggattgcttgcccgccgacaatacgccgccggacgctaacgtcggcaatgcgtttaccgtggtttgcaaagggatcggcgatcgccagtttctgaccggcgccgtcgatctggtgaagaaaaccgtgaccgtgacgctgtcggcggggattgctcaccactactttgccgacagctacgccttcctcagcgtgacggatgcggacggtaacaccttgctcagctacgacgtcatcggcagccaaaatcagccggctaaaacctgggtgctgccgctgtcgggttatggcggtgaggtgatccatctgcggcatgaagagccggacaaccgtctgacgatcgtcaacgagatgcagcacgtgcggttggcggagaagggcaagcaacagacctactgcattacctcgatcggtttgaaacgtatcaacgactga

SEQ ID NO: 422137 - DNA, 3627 bp, Serratia marcescens
atgaatatgtttactaccgtactgatcgctaaccgcggcgaaatcgcctgccgcgccattcgcaccctgaaacgcctgggcgtcaccagcgtggcggtttattccgacgccgaccgcaatgcgccgcacgtcaccgaagccgacagggcggtggcgctcggcggcgacaaggccgccgacagctacctgagcatcgacaagatccttgcggcggcggcagccaccggcgcgcaggcgatctaccccggctatggcttcttgtccgagagcgccgagtttgccgacgcctgcgaggcggcgggcatcgcctttatcggcccgacggcggcgcagatgcgcgagttcggtctcaagcaccgggcgcgcgagctggcggcgttggccggggtgccgatgacgccgggcaccggcttgctggagagcgtggagcaggcggttgccgccgccgcgcgcatcggctacccggtgatgctgaaaagcaccgccggcggcggcggcatcggcctgacgcgctgtgacgacgaggcggcgctgcgcgaggcgtacgacagcgtcaaacggctgggagagcagttcttccgcgacgccggcgcgtttatcgaacgcttcgtcgatcgggcgcgtcacgtcgaggtgcagattttcggcgacggccaggggcgggtggcggcgctcggcgagcgcgactgctcgctgcagcgccgcaaccaaaaagtggtggaggaaaccccggcgccacacctgccggcggcgacccgccaggcgctgcatcgggcggcggtggcgctgggcgaatcggtgaattaccgcagcgccggcaccgtggaatttatttacgacgccgcgcgcgacgagttttacttcctcgaagtgaacacccgcttacaggtcgagcacccggtcaccgagatggtcaccggcctggatctgatcgaatgcatgctgcaggtggcggcgggcgatgcgctggattgggcggcgttgcaacgcgcgccgcagggcgcggcgatcgaagtgcgtctctacgccgaagatccgctgaaaaacttccagcccagccccggcgtgctgaccgaggtgcatttccccgccgacgtgcgcctcgacggttgggtggcgaccggcagcgaagtctcggcgttttacgacccgatgatcgccaagctgatcgtacacggcgctgaccgcgcgcaggcgctggaaaaactgcgcgtggcgctggcggcgacccgtttgcacggcatcgccaccaacctcgattatctgcggcaggtgatcgccacgccgcaatttcagcgcggcgacgtttggacgcgcctgctggacgatttgcattaccagccgcactgcctcgaagtgctgcaacccggcacctacagcagcgtgcaggactatcccggccgcctcggctattgggacatcggcgtgccgccgtccggcccgatggacgacttcgcgttccggctggccaaccgcatcgtcggcaaccacccggcggccgccgggctggagttcaccctgcaggggccgacgctgcgctttcactgcgacgccaccatcgcgctgacgggtgccagctgcccggccgatctggacggcgaagcggtcgcctactggcggccgatcgcggtgcgggccgggcaggtgctgacgctggggcgcgccacgcacggttgccgcacctatctggcggtacgcaacggcttcgacgtgccggtgtatctcggcagccgttccaccttcgcgctcggccagttcggcggccacgccgggcgcaccttgcgcgtggcggacatgctggcgatcgctcaaccggaattggccgccagcaccacgccggcgccgatcgccgcgccgcaggcgatggacgacagcctgatcccgcactacggcgaccagtggcacatcggcgtgctgtacgggccgcacggcgcgccggactttttcaccgccgaatcgatagacgccttcttcgccaccgactggcaggtgcattacaactccaatcgcctcggcgtgcgcctgtcgggtccgaagcccgagtgggcgagagaggacggcggcgaagccggtttgcatccttccaatgtgcacgactgcgagtacgccatcggcgcgatcaatttcaccggcgacttcccggtgatcctgacccgcgacgggccgagcctcggcggcttcgtctgcccggtgaccatcgccaaggccgagctgtggaaagtggggcaggtgaagccgggcgaccgcatccggttccatccgatcggttttcgccaggcgcagtcgctggaacaggcgcagctcggcagcatcgaagcgctggcggcggtgaaggccatcaccctgccgccgccggatctggccccggcggataccgtttccgccgcggtgctggcggcgctgccagcggcggaagggcgcccggcggtggcgtatcgccaggcgggagacggctacatcctgatggagtatggcgacaacgtgctcgatctggcgctgcggctgcgcattcatctgctgatgcagtcgctgcggcaggaggcgataccgggcgtggcggagctggcgccgggcgtgcgttcgctgcagatccgctacgacagccggctgataagtcaggccgatctgctgcagcgcctgctggcgcgcgaacgggcgctgggggacgtcagccgcctgaaggtgccgacgcgcaccgtctggctgccgatggcgttcgaggattcggccacgctgggggcggtcgatcgctatcagcagacggtgcgcgcttcggcgccctggctgccgaacaacgtcgatttcattcagcgtatcaacggcctgagccgacgcgagcaggtgcgcgacatcctgttcgacgccagctacctgatcctagggctgggagacgtctacctcggcgcaccctgcgcggtgccgctcgatccgcgccatcgcctgctgagctccaaatacaacccggcgcgcacccacaccgccgaagggacggtcggcatcggcggcatgtacatgtgcatctacggcatggattcgccgggcggttaccagctggtggggcgcacgctgccgatctggaacaaattcctcaaaaacccgcagttcaccgccggtgaaccctggctgctgcgcttcttcgatcaggtgcgcttctacccggtcagcgagcaagaactggacgagcagcgcgaagcgttccgcgaagggcgcatgcaggtgcgcatcgaagagagcgaattcgacttcgccgcctacaccgatttcctggccgacaacgccggggcgatcgccgacttccagcatcgccagcagcaggcgttcaacgccgaagtggcgcgctggcgcagcgatgacgacgaggccgaggcgcagctgttgccgccggttgaagaagacgtgatcgacggcgatctggtcagcgccgatctgaacggcagcgtgtggaagatcctggtggagccggggcaggcggtggcggccgggcagccgctgatcgtggtcgaggcgatgaagatggaattggcggtcaccgcgccgcgcgccgggatcgtcaaacgcatcagctgccggcaggggcggccggtcgggccgggcgacgccctgctgtggctggaaaaagcgatctga

SEQ ID NO: 422138 - DNA, 711 bp, Serratia marcescens
atgcaaatcaccaacggagagcacaaggcgcggccggaggggctggcggagcgcatttatctgcagctcaaggccgacatcttcgagtttcgcctgctgccgggcgatcgcttcagcgaaagcgacgtggcgcagcgcatggcggccagccgcacgccggtgcgtcaggcgctgtttcgactcgagcgcgaaggctatgtcgaggtgctgtttcgcagcggctggcaggtgcggccgttcgattttgcctacttcgaagagctgtacgacctgcgcatcgtgctggaacaagaggcggtgaaacggctgtgcgaatggccggccggggaaacgccggccgcgctggcggcgctgaaccgtttttggaccgaagcgccgcgtctggcggacggccaggtggtgtcgcagcacgacgagcagtttcatcaggcgttggtagccgcggcgggcaacggcgaaatggcgcgcatccaccgcgagctgaccgaaaagatccgcatcattcgccgattggatttcacccagcaggcgcgggtggacgccacctaccgcgaacacgccgccattttgcaggcgatcctgcagcggcaaagcggggtggcgcaagcgctgctcggcgagcatatcgccgtcagcaaggcagaggtacgaaaaataacgctgcacatgttgcaccaggcgcgggcccagcagccggcgcgctcggcgtaa

SEQ ID NO: 422139 - DNA, 1269 bp, Serratia marcescens
atgcaacgtcgtcgttttatcaaagcttttgcgctgtccgccgccgcgctcggcctgggcctggcctggagcgcgcaggccgccgacaccatcaaggtcggcattctgagttcgctctccggcaccatggcgatttccgagacgccgctgaaggatgtggcgctgatgaccatcgacgagatcaacgccaaaggcggggtgctcggcaaaaagctggagccggtggtggtggatccggcctccaactggccgctgttcgccgaaaaggcgcgccagctgctgagccaggacaaggtggcggcggtgttcggctgctggacctcggtgtcgcgcaagtcggtgctgccggtgtttgaggagctgaacggactgctgttctacccggtgcaatacgaaggcgaagagatgtcgccgaacgtcttctacaccggcgcggcgccgaaccagcaggcgatcccggcggtggaatacctgctgagcgaggacggcggcggcgccaagcgcttcttcctgctgggcaccgattacgtctatccgcgcaccaccaacaagatcctgcgcgccttcctgcacagcaaaggcgtgcaggacaaggatatcgaagaggtctatacgccgttcggctacagcgattaccagaccatcgtcgccaacatcaagaagttcgccgccggcggcaacaccgcggtgatctccaccatcaacggcgattccaacgtgccgttctacaaagaactcgccaaccagggcgtcaaggccaccgacgtgccggtgatcgccttctcggtcggcgaggaggagctgcgcggcatcgacaccaaaccgctggtgggcaacctggcggcctggaactacttcgaatcgctggataacccgaccaacaaacagtttgtcagccagtggaaagcctacgccaaggcgcacaatctgccgaattacgccaccgcggtgaccaacgatccgatggaggccacctacgtcggcctccacatgtgggcgcaggcggtggaaaaggccggtaccaccgacgtcgataaggtgcgcgccgcgatggccgggcaaaccttcgccgcgccgtcgggcttcacgctgaccatggacaagaccaatcaccacctgcacaaaccggtgatgattggcgaaatcgagggcaacgggcagttcaacgtggtgtggcaaaccgaagcgccggtgcgcgcgcagccgtggagtccctatatcgccggtaacgacaaaaaaccggattacccggtgaaaggcggcaagtaa

SEQ ID NO: 422140 - DNA, 1581 bp, Serratia marcescens
atgcaatctccgtttttatcctttttgcgcgtcgggctgtggctgttgtgcgcctggcccctgctggcgcaggccgggccggccgatgagttcgcggcggccaatcgcgcgcagcaggccaaactgctgcaggcgtgggcggccgagccggacgccgctcgcctgccgttgctgcaggggctgcagcaggaaaccgtggcgatcgacgaggcgaagcgcgcctttatccgccagggcgaccgctatctgccgcttgaaggtgaggcggccccggttggcgaaccgaagaaggtgtggctgaacaaccggctgcgcattctgatcgccaacgcgttgtcggcgcagcggctggtcagcgcggacgcggcggtgcggctgcaggcggcgaccgcgctgcagcgcgaagcgcagggcgagcagttgccgctgttgacccggcggctggcgcaggagaaagacctgcaggtacgcgacgcgctgagcattgcgctggcgaacctgcaattgaccgacgccagcccgcaggtgcgcttcaatgcggtgcggctgctgggggaatcgggcgagccggaaacccgcgcgcggctgcaggcgttgaccgacgccgctcacgagccggacgccgcggtgcgcgccgaggcgcaacgcagcctgcagcgggtgcagcatcgcctgatgatcggcgatctgctcggccaggcgttcagcggcctgtcgctcggctcgatcctgctgctggcggcgctcgggctggcgatcacctacggcctgctcggcgtcatcaatatggcgcacggcgaaatgctgatgctcggcgcctattccgcttacctggtgcaggggctgtttcagcagtttgcgccgcagtggctggcgctctacccgctggcggcgctgccggtggcgttcgccatcaccgccgggatcggcatgctgctggagcgcacggtgatccgccacctgtatggccggccgctggaaaccctgctggccacctggggcatcagcctggtgctgatccaactggtgcgggtgctgttcggggcgcagaacgtcgaggtcgccaacccggcgtggctgtcgggcggcgtgcagctgctgccgaacctggtgctgccgtggaaccgcatcgcggtgatcgcattcgtgctgttggtgctggcgctgacctggctgctgctgaacaagacccggctcggcatgaacgtgcgcgcggtgacgcaaaaccgcgcgatggcggcctgctgcggcgtgcccaccgggcgggtggacatgctggccttcgggttgggatccggcatcgccgggctcggcggggtggcgctgtcgcagttgggcaacgtcgggccggagctggggcaaggttacatcatcgattcgttcctggtggtggtgctcggcggcgtcggccagctggcggggacggtggcggcggccttcggcctaggcatcgtcaacaagatcctcgagccgcagatcggcgccgtgttgggcaagatcctgatcctggtgctgatcgttctgtttattcaaaagcgtccgcaggggctgttcgccctcaagggcagggtgattgactga

SEQ ID NO: 422141 - DNA, 1077 bp, Serratia marcescens
atgagccaaccattgaccgtaaccggcgtgcagaaagcgccccggctggcgttgagcatcggcgcgctggcgttgctggtgctgctggtgatgccgttcttgacgctgttgccggcggatcatccgctggcggtgtccacctataccctgacgctggcgggcaagatcctgtgctacgcggtggtggcggtggcgctcgatctggtgtggggctatgccgggctgctgtcgctcggccacgggctgttcttcgcgctcggcggctacgccatgggcatgtacctgatgcggcaggcggcgggcgacgggctgccggcgtttatggcgttcctctcctggaatgagctgccgtggttctggagcggcacccagcatttcgcctgggcgctgtgcctgatcgtactggtgccgggcctgctggccttcctgttcggctacttcgccttccgctcaaaaatcaaaggggtgtatttctcgatcatgacccaggcgctgacctatgccggcatgctgctgttctttcgcaacgagaccggcttcggcggcaataacggctttaccggttttaccacgctgctcagctttcccatcaccgcccccggcacgcgggtggcgctgtttctggcgacggtgctgctgctggccgccagcctggccatcggctttgcgctggcgcgcagcaagttcggccgggtgctgaccgcggtgcgcgatgcggaaaaccggctgaccttctgcggctacgacccgaagggcttcaagctgttcgtctggacgctgtcggcggtgctgtgcgggctggccggcgcgctctatgtgccgcaggtcggcatcatcaaccccggcgaaatgtcgccgaccaactcgatcgaggccgccatctgggtggcgctcggtgggcgcggcacgctggtggggccgctgctcggcgccggcatcgtcaacggcgccaagagctggttcaccatggccattcccgaatactggcagttcttcctcggcctgatgtttatcgtcgtcacgctgtttctgcccaaaggggtgatcggcctgctgcgccggaggaaaacctcatga

SEQ ID NO: 422142 - DNA, 807 bp, Serratia marcescens
atgaaagcgatgcaagtgaccgacgagctgtttacccacccgctgccggcggataaataccggcagcaaaccgatccggtgctgcagctcgacaacgtcaacgtcagcttcgacggttttcgcgcgctgaccgatctgtcgctgcgcattggcgtcggcgaactgcgctgcgtgatcggccccaacggcgccggcaagaccacgctgatggatgtgatcaccggcaagacccggccggacagcggcaaggtgttttacgatcagaccgtcgatctgacccggctggcgccgatgcagatcgcccacgccggcatcggccgcaagtttcaaaaaccgacggtgttcgaggcgctgacggtgttcgaaaatctggagatcgcgcagaaaacccgcaagtcggtgtgggcctgccttcgcgcccgcctgagcagcgaacagcgcgaccgcatcgacgagatgctgaagaccctgcggctggggcatgaacgccaccggcccgccgggctgctgtcccacgggcaaaaacagtttctcgagatcggcatgctgctggtgcaggagccgcacctgctgctgctcgacgaaccggcggccggcatgactgacgccgaaaccgactacaccgccgaactgttccgcgagctggcgggcaagcattcgctgatggtggtggagcacgacatggggtttgtggaaaccattgccgatcgcgtgacggtgctgcatcaggggcaggtgctggcggaaggatcgctggcgcaggtgcaggccgatgaacgggtgattgaggtatatctggggcgctga

SEQ ID NO: 422143 - DNA, 699 bp, Serratia marcescens
atgctgcaggtagaagaattgaatcaatattacggcggcagccacattctgcgcggcctgtcgttcgaggcgcgcatcggcgaggtgacctgcctgctggggcgcaacggcgtgggcaagaccacgctgctgaaatgcctgatgggattggtcccggcgcgcagcggcagcgtgcgttggcagggcgaaaccatcaccggtaaaaagccgcatcagcgggtgcgggcgggcatcgcctatgtgccgcaggggcgggagattttcccgcgcctgacggtggaggaaaatctgctgatggggctggcgcgcttttccggcgccgctgcacgcacggtgccggatccgatctatgaactgtttccggtgctgcggcaaatgaaggatcggcgcggcggcgatctctccggcgggcagcagcagcagttggcgatcggccgggcgctggcctgccggccgcagctactgatcctcgacgagccgacggaagggatccagccttcggtgatcaaggagatcggcgcggtgatcaaacagctggcggcgaagggcgatatggcgatcctgctggtggagcagttctatgactttgccgccgacctggcggacagctatctggtgatgtcgcgcggcagcatcgtgcagcgcggcgccggcagcaatatggaacaggacggtgtacgcgggctggtggcgatttga

SEQ ID NO: 422144 - DNA, 264 bp, Serratia marcescens
atgggcagaacattaacggtagatctgggtgacgaactgcgtagcttcgtcgaagacctggtggccagcggcgattaccgcacgcccagcgaagtcatccgcgaatccgtgcgcactttgcgcgaacgtaccgccgcctcaaaactggaagagcttaggcgcctgattgccgaaggagagcacagcggcgaagccgtcgaatgggatcgtgatgtgttcatggaaagaatacggagcaaagcaaaaggatgcgcaggaaagtaa

SEQ ID NO: 422145 - DNA, 513 bp, Serratia marcescens
atgaacgaaatcactgtgtcacgcctcggctgcatcgtcctgtccctgtttccggccctgtgggggctgttcagcctgttgaacaatacggcggatttcgccggtaccgcgcgcaatgcggtgggcccgctgctcgccatgcaggatacctatcagacgccggggttgatgtggcgcgcgatcggcgccgactgggcctgtatgttggggttggctgtcatcaccacgctggaaacgctggccggcctattcgcggccgcaggcgtggtgctgatgatcgggcgatttaaaggcccttacgccgccttcgccaagggcaaaatctgggcgatgctgggggcgctttgcgcgatcgcggtgtggggcgtcggctttatggtggtcgccggcgactggtttatggcctggcaggccaagcaggatccgctggcggtgcagctgggggcactgatctacctggcgcccaatgcgtttgccttgctgttcctgatgctgcagcgggagccgcgctaa

SEQ ID NO: 422146 - DNA, 513 bp, Serratia marcescens
atgttcaccgtccgtcaggcattgctggaagatttaacccaggtgcgcgatatcggcatccgcacctatcgcgcgcacttcggtgagctgtggcgctacccgcacgagctggaggcctttctggccgaggattttgccgtctccgcgctggaacggacgctgcgcgatcccgacgtgtgctggctgttggcctatgaggatgacgccctggtcggctatgcgcggctcaacgtcgacagcttgctggcgccaacgcaaacccgcggcgcagagctgcagaaaatctatttcctgccgggcaatgccggaaacggctatggccagcgcctgttcgaacaggtgcagcagcgggccatcgagcgccggcagaagacgctgtggctggaggtgctgcaacgcaacaccggcgcccaacgcttttatcagcgccaaagattgagcatttgtggcgagacctgctacaccagcgcccagggctcgataggcatctggtatatgagcaaggcgctgtaa

SEQ ID NO: 422147 - DNA, 1218 bp, Serratia marcescens
atgccgtcatcaccgatcacaccgtacgccaccacctgctgcatcgtggggggcggccccgccgggctgatgctcggctatctgctggcgcgggcggggatcgacgtgacggtgctggagaagcacgccgacttcctgcgcgattttcgcggtgacaccattcacccgtcgacgctggaagtcatgcaccagctgggcctgctcgacgaactgctgacgctgccacaccagcgtgcggaatccctgcacgccgaagtcgccgggcgcgacatcaagctggcggatttcacccgcctgccgacgcgctgcaaatttatcgcctttatgccgcagtgggagttcctcaactttttggcacagcaggccgccgcattcccccatttcaggctgctcacctcgacgcaggttcataagctgctctacgaccgcggccaggtatgcggcgtgctggccgacacgccggaaggcccgatccgcgtgcgcagccagctggtgatcggcaccgacggccgcaactcggtggtacgcgagcaggcggcgctcagcagccgctccttcggcgccccgcgcgacgtattgtggatgaagctcagcaagcagccgggcgatccggcctggtcgatgggccataccgggccgaagcagaacttcatcatgatcgatcgcggcgactactggcagtgcggctactcgatcgataaaggcagcttcgacgcgatccgccgcagcggcctggagaaatttttgctgcacctcgccgaggtggcgccattccaggacgatcgcctgcaggagatcgtcgagtgggatcaggtgaagctgctgagcatccgcatcgatcgtctggatcgctgggccaaaccgggggtgctgtgcatcggtgacgccgcgcacgccatgtcgccgatcggcggcgtgggcgtcaacctggcgattcaggacgcggtggccgccgccaacgccctgatcccaccgctgcgccagcatcggctgcagctgaagcatctgctgagcgtgcagcgccggcgcgaattccccacccgggccatccagtttttgcagatcaaaatgagccagcgcaagccgggcgaacgccgcgcagcgggcggttcgcgcctgatcgcccacgtcggcaacagccgctggctgccgcgcctgttcggccgcatcatcggcctgggttttcgccgcgaaacgccgcggcatcttgaaagttaa

SEQ ID NO: 422148 - DNA, 870 bp, Serratia marcescens
atgaggcgaataacgttcgatctcgaggatttgcgcagcttcgtcaccggcgtcgagctgggcagcttcgccaaggcggctgaacggctggggcgttcgacgtcggcggtcagcgctcacctgaaaaagctggaacagcaggtcggcgcgccgatcctgcgcaaggccgggcgcggcatggtgatgaccgaggcgggggaaacgctgctcggttacgcgcgccgcctgctggagctcaatgacgaagccgccgccgcggtgcgcgggttggatttgcagggcacggtgcggctggggctgcaggaggatttcggcgagacgtttctgccgcaggtgttgggcagcttcgcgcgcgccaatccaaaggtgcgcatcgaggcgcgcatcgcgcgcaatgccgagctgatcgactgggtgctgaaaggtcaactggatctgtcgctggcgtgggatggcggtttgagcacgccgtttaatctggcgctggggcagcggcagctgcactggatcgcctcgcccggcttcgcgctggcgccctggcgagaaggggatgagccgttgccgttggtgatgtttgacgcgccttgcctgatgcgcagcgcggcgacgcaggcgctggatcgcgccggcataccctggcgcatcgcctttaccagccgcagcctgaacggcgtgtgggcggcggtgagcgccggattgggcgtcacggtgcgcacggcggcgggtttgccgcccggcctggcgccgctggcccccgatctgctgcccgctctcggccagctcggcgtggtgctgcaccgcgccgaggatcagccttcggccgccgtgcagcggctggcgcagatcgtggtcgagcggatcgaaacttaa

SEQ ID NO: 422149 - DNA, 846 bp, Serratia marcescens
atgaattctccgtttctggtgacccctcaatggcttgcgcaacatatcaacgatgaaaatctggtggtgatcgacgtccggatgtcgccggtggggctgacgccgaagaaagatatgcttgccgagttcgaacgcggccatatccccggcgcggtctatttcgatatcgacgaggtggcggacaaaagcaccgcactgccgcatatgctgccgacggcgtcggaattcgccgcggcggcgggccaattgggcatcagcgaacgcgataccctggtgatttacgacgaaggcaaccagttctccgcgccgcgcggctggtggactttccgcaatttcggcgccgagcgcgtttacgtgctggacgaagggctgaacggctggaccgcgcagggccaggcgctggcaaccggcccggcgcagcctgccccgcagacgttcaacgcccggttcaacgccgacgcggtggtggatatgcggcaagtggagcaggcgttaggcacgccggtgcaaattctcgacgcgcgcgccgcgccgcgcttttatgccgaagcgccggagccgcgccccggcctgcaccgcggccatattcccggcagcatcaacattccgtacggcgagctgctggaaaacggccgcttcaaatcgctggaggcgctgcgccaaacattcaacgacaagggggtggatatcaacggcccgatcatcaccagctgcggctccggcgtgacggcggcggtgctggcgttcggcctgctgtcgctcggcgcgccgcaggtcaagctgtatgacggcgcctggagcgaatggggccagctgagcggcaagcagccgatcgcccaagattaa

SEQ ID NO: 422150 - DNA, 423 bp, Serratia marcescens
atgacggatcgggcgtttggcggagccaagatcgcgctgctgtgcgacggccgcctgctggtttaccaacgggacgacaagccgggcattccgtggcccgggatgtgggatctgcccggcggcgggcgggaaaacggcgagacgccgctgcagtgcgtgctgcgggaaacgcaggaagagttcggggtgttgctcgccgaacgccaggttgtctggcagcggcgttacgacggtattcagcccggctacccgccgacctggtttatggccggggtgatcaccccggcgcagatcgccgccattcgctttggcgatgaagggcagcgctggcgaatgatgccggtagagcagtttattcatcacccgcagggcatcggtcatctgcgccgccgggtggcggagtattggcttcagtccgcctga

SEQ ID NO: 422151 - DNA, 1440 bp, Serratia marcescens
atgacacgctacgccactctggccgccattctcagccaacgcattcagcaagggctgtatcccgccggccatcgcctgccttcggtgcgcgcgctgagccaggagcacggcgtcagcatcagcacggtgcagcaagcctaccggctgctggaagaacagcgcctggtggaggcgcggccgaagtcgggctacttcgtgcatacgcggcgcgcgcaggccgagctgcccgccatgacggcgccggtgcagcggccggtggacatttcgcaatgggagcaggtgctggagctggtgcgcagccggccgcgcgagggcctgatccagctggggcgcggcatgccggatatcgccgagccgacgatgaaaccgctgatcgtcgccctgcgcaacgccgcccgccacggcgatctgcgcagcctgtattacgacagcattcagggcgtggccgcgctgcgcgagcaggtcgcccgcctgctgctggattccggctgccaaatcggccccgaccagttgctgattaccaccggctgccaggaagcgatctccgccgggctgcgcgccgtttgccaacccggcgacatcgtggcggtcgattcgccctgcttccacggcaccatgcagacgctgaagggcctgggcatcaaggcgctggaaatccccaccgatccgctcaccggcgtcagcctggcggcgctggagatggcgctggaacagtggccgatcaaagccattctgctgacgcccaactgcaacaatccgctgggctacatcatgcccgacgcccacaaacagcggttgctgacgctggcgcagcgccacgacgcggcgatcatcgaggacgacgtctacggcgacatcgcctatcactacccgcggccgcgcaccatcaagtcgttcgacgaagacggccgcgtgctgctgtgcagctcgttttccaaaacgctggcgccggggctgcgggtgggctggatcgcgcccggccgctacctggagcgggtgctgcacatgaagttcatcggctccggcgccaccgccacccagccgcagctggcgatcgccgaattcatccgcggcgggcactatctgcagcacctgcggcgcatgcgcacccgctaccagcagaaccgcgatcgcatgaccgaccttatcctgaaacacttcccggccggcacccgcgtcagccggccgcgcggcggctttatgctgtggatcgaactggacgaggcgttcgacaccctgcggctgaaccgccatctcgagcagcagggcgtgcagatcgccgtcggcagtatcttttccgccgccggcaaataccgcaactgcctgcgcatcaactatgcgccgaagctgacggcggagatcgaacaggcggtgcagcgggtcggcgccaccatcctggcactgatgccgagcggcgtgctgcaacctcaggcggactga

SEQ ID NO: 422152 - DNA, 183 bp, Serratia marcescens
atggcactgtttgatggcatgacgacgtggcgacgggtaggctggtcacgctggcgttggtatttgttgcgccgcagtacgcgcagagagttactgctgctgaacgacaggcaattggcggatatcggcctgacgcgggcggatgcgcggcgcgaaggcgataaaccgttctggagagggtaa

SEQ ID NO: 422153 - DNA, 624 bp, Serratia marcescens
atgctgaaattattgggcaaagcctcatcgatcaacgtgcgcaaggtattgtggacctgccaggagctggggttgccgctggcgcgggaggactggggcagcggctttcgctccacgcaggagccggcgtttctggcgctgaatcccaacggcctggtgccggtgctgatcgacggcgagcgggtgctgtgggagtcgaacaccatctgccgctacctggccggacgggaagggcgccgcgatctgctgccgcaggaacccggcgcgcgcgcggcggtggagatgtggatggactggcaggccaccgatctgaacggcgcctggcgctatgtgttcatgtctcgggtgcgcgggcatgcggattatcaggatgccgccagcctggccaccgccgagcgtgagtggaaccggctgatggggctgctggacaggcatttggcgcagcacggcccttatgccgccggcgcggccttcacgctggcggacgtggtgctggggctgtcgctgaatcgctggctgatgacgccgttcgagcggccgaattatgcggcgctggcggcctatcagcagcgcctgctgcaacgccctggctacgtgcagcatggcgccaacggtttaccttga

SEQ ID NO: 422154 - DNA, 1131 bp, Serratia marcescens
atgaaacaggtacgcgttgggttaatcggcaccggctatatcgggcgttgtcacgccatcgcctatgcgcaggccgccacggtctttcctctgaaaggggagctggtgctggagatgctggcggaagtgacgcccgagctggcggcgcagcgcgcaaccgagttcggctttgcgcgctcgaccggcgattggcggcagctggtggccgatccggcgatcgacgtggtggacatctgcgcgcccaacttcttgcacaaagagatggcgctggaggcgatccgccacggcaagcacgtgtattcggaaaagccgctggcgctggacgccgccgacgcggcggagatggtgcaggccgcccgcgccaagggcgtgaaaacgctggtcggtttcaactacatgaagaacccgaccagccagctggcgcgcgaggtcatcgccaacggtgaaatcggcgaggtggtgcatttttacggcacccacaatgaggattatctggccgacccgcgcacgccgctcgactggcactgccgccgcgccagcgccgggctgggcgcgctgggggatctggcggcgcacatcgtcaacatggcgcactacctggtgggcgacatcgtggcggtctgtggcgatatgcaaacggtgatcaaacagcgcccggacccgcaagacccggcgcgcctgttgccggtggaaaacgaagatcaggccggcgcgctgctgcgcttcgccggcggggcgatgggcactatcgaaacctcgcgcattgcctgcgggcgcaagatgggactgacctatgtggtcaccggcaccaagggcacgctgagctatacccaggagcggatggcggagctgaagctgtatcggcacgatgagccggcggagcggcaggggttcaagacgctgctggtagggccgaagcacccggactacgcggcgttctgcatcagcgccgggcacggcatcggctttaacgatcagaagacggtggagatccgcgatctggtcaacggcatcgccgcgggcgatcgcatgtggccggactttgaagaaggctggaaggtgtcttgcgtgctggatgcgatagccgcctccgccgagcagcggcgctggctggagattaaccgcgattga

SEQ ID NO: 422155 - DNA, 1872 bp, Serratia marcescens
atgaaccaccacgcttcattgatcatcaccaacggcaagtttcacactgtcgatcgccaaaatcccaccgcacaggcggtcgccatccgcgacggcaaatttctggcggtcggcagcgaaagcgaagtcatgcagcacgccgggccggaaacccaggtgatcgacctgcacggccacaccgccattccgggcctgaacgactcgcacctgcacctgatccgcggcggcctgaactataacctggagctgcgctgggaaggcgtgccttcgctggccgacgcgctgcgcatgttgaaagaacaggcgctgcgcacaccgagcccgcaatgggtgcgggtggtcggcggttggaccgaattccagttcgccgagcgccgcatgccgacgctcgacgaaatcaaccaggcggcgccggacacgccggtgttcattctgcacctctacgatcgcgcgctgctcaaccgcgcggcgctgaaggtggtcggctacaccaaagacacgccgaacccgccgggcggcgagatccagcgcgacgccaacggcaacccgaccggcatgctgatcgccaagcccaacgccatgatcctgtacgccacgctggcgaaagggccgaagctgccgctggagcagcaggtcaactccacccgccagtttatgcgcgagctgaaccgtctgggcctcaccagcgccatcgacgccggcggcggcttccagaactacccggaggattatcaggtgatcgccgagctgcacgagaaaaagcagctgaccattcgcatcgcctataacctgttcacccagcggccgaagcaggagctggaagacttcgagctgtggaccgacatgctcaagccgggccagggcaccgacttttatcgccacaacggcgccggcgagatgctggtgttctccgccgccgacttcgaagacttcctgcagccgcgcccggatctgccgccgggcaccgaggacgagctggagcgggtggtgcgccatctggtcgagcaccgctggccgttccgcctgcacgccacctatgacgaatccatcagccgcatgctggacgtgttcgagaaggtgaaccgcgacattccgttcaacgggctgcactggctgttcgaccacgccgaaaccattaccgaacgcaatatcgaacgggtcaaggcattgggcggcggcattgcggtgcagcaccgcatggcattccagggcgaatatttcgccgagcgctacggcatcgaagccaccaaacatacgccgccggtggcgaaaatgctggcggccgagctgccggtcgggctgggcaccgacgccacccgcgtcgccagctacaacccgtggacagcgctgtactggctggtctccggccgcaccgtcggcggcatggcgatgtacgacgacagcgcgcggctggatcgcgaaacggcgctgatgctgtggacgcaaggcagcgcctggttctccaccgagcagggcaagaaaggccagatcaaggtcggccagctggcggatgtggcggtgctgtcgcaggactatttcagcgtgccggaagagcagatcaaaggcattgagtcggtaatgacggtggtggacggcaaggtggtctacgccgccggcagcttctcgccgctggcgccgccgccgctgccggtgctgccggagtggtcgccggtcacccaggtgccgggccactaccgttccgcgccgccgtcggcggcggccaaagtcggcgtgctgagccaggcgcaccaatgctgcggcccgtgcggcgtacacgcgcaccagcatgacatcgcgcgccgctccagcatcccggtgtcggatgaaaacgccttctggggcgcgttcggctgttcgtgcttctcgttctaa

SEQ ID NO: 422156 - DNA, 546 bp, Serratia marcescens
atggcccatccgcagcatgtcacgctggtgatcacccaccgtttggccccggggaacgagcaggcctatgaggcctggctgaaccgcatcatgccggacgccgcgggcttcaccggccatttgggcgtcaacgtgattcgcccttccggcgacgagcaggcctatacggtgctggtccgcttcgacaacctcgacaatctgtaccgctggatccactcgccgctgcgcaagcaatacatcgaagaagtcaccccgctgttgctggagagcgaccatatcgagatccgccccggcgcggagttctggtttaccccgcccagccccggcgtgcgccagccgccccagtggaagcagttcatcatcaccctgctggtgatcttcccttccaccaatctggtgccctggttttgggggctggcgctgccgcagctgaacggcacgctgctcggccattttctcaatgacgccaccgtggtcgccctggtggtgtacctgtggatgcctatcgtgacccgcgtttttcatcaatggctgacccgccgctag

SEQ ID NO: 422157 - DNA, 645 bp, Serratia marcescens
atgtccaagtttcaactgcttgataaagacaactccgcactgatttttatcgaccatcaaccgcaaatggccttcggcgtggctaatattgatcgtcagcaactgaaaaacaacgttgttggtttggcgaaggcgggcaagattttcaacgtgccaacccttttcacctcggtagaaaccgaaagcttcagcggctatatctggccggaactgctggcggtacaccctgaaatcaccccgattgaacgcacctcgatgaactcctgggaagacgcggccttcgttaaagccgtggaagccaccggccgcaaaaagctggtgatctccgcgctgtggaccgaagtgtgcctgaccttcccggcgctgatggcgctggaagccggctatgaagtgtatgtggtgaccgacacctccggcggcacctccgtcgatgcgcatgagcgttcgatcgatcgcatggtgcaggccggcgccgtgccggtgacctggcagcaggtgctgctggagtaccagcgcgactgggcgcgcaaaggcacctacgacgcggtgatggcgctggtgcgcgagcacagcggcgcgtacggcatgggcgtcgactacgcttacaccatggtgcaccacgcaccggcccgcacgctgaaataa

SEQ ID NO: 422158 - DNA, 912 bp, Serratia marcescens
atgagattaaacctggaagcgctgctgattttggacgcgctggaccggcacggatctttcgccgccgcggccgccgcactgtttaaaaccccttcggcactcagctatatggtgcaaaagctggagaacgatctcgacatcaccctgctggaccgctccggccaccgggcgaagttcaccgataccggcaagctgatgctggaaaaagggcgggtgttgctgcgggcggcgcaggatctggagcagcaggcgcgctacgtggagaacggctgggaaagcgagatcacgctcgggatcgatgcctccttcccgtttgcccgcctgttgccgctgatcgacgagttctatcggcagcatcatcatacccggctgcgtttcagccacgaggtgctggccggctcctgggaatcgctggtttacggctgcgccgacattatcatcggcgccatctgcgagccgccgtcgcgggtgggttatgcgttcagccggctggggcagttggattacgtgttcgccgtcgcgccacagcatccgctggcggcgctgccggaaccgttgccgaaagatgagatccgtcagcaccgggcggtggtggtgcgcgatacctcgcgggtcaacgcgccgcagagcctgaacctgctggaagaacaggatacgctgacggtcttcggcttcgacgccaagctgcaggcgcagttggccgggctgggctgcggctatctaccgcgttctctggcggaaccttacctgaacagcggcgaactggtggcgaaacgcgttgaatctgagcgctgcagcgacgttgcctatttcggctggcgggaaagcgccagcggtctggcagccaagtggtggcgcgagcggctgcagcgttacgcggatgacggcgaggcttacccggcggcgcagtga

SEQ ID NO: 422159 - DNA, 369 bp, Serratia marcescens
atgaaaaagacactaggcctgttggcgctgttgctgttaagcggctgcggcgccgggcgtcaggccggcatcccgttgccggagccgcaggccgaggcgcaggccacggcgccgctcagctatccggtgcgggtgcataacgcggtgagccgcgagctgcgtttgcctgaacgcgcgcgcggccaacgctgcaccatcagcattcggttgcggccggacggcaagctggcgagcagcaagatcgtacggggtgacgcgccactgtgcgcggcggcgagcgcggcagtgcagtgcgcgcagtttccgccgatggccaccgccaccgagtacgcgctgttcaacgccgtggtgctcgatttcgttccctga

SEQ ID NO: 422160 - DNA, 1032 bp, Serratia marcescens
atgtcctacgcccactatttgcaccccgaacagcgcgaacgaatcaggcagctttatcggcgccggcattggcggctggagctgcccacctgggggatcatggcggcggtgtacggcggctggttcggcgtggcgctggggtggcaaacgctgggcccgtggcttggcgcgccgctgctgatcctgctgaccacctggtacatgtcgttgcagcacgagctgatccacggccatccgacgcgctggccgcgcgtcaatcagctgttcggcctgttgccgctggcggtgtggtatccctacgggctgtatcgcgattcgcatctgcgccaccatcgcaacgaccacctgaccgatccgcacgaagatcccgaaagctattacttcagcgccgcgcagtggcggcgctatccccggctgctgccgctgctggccgccgtgcgcaatacgctgatcggccgggtgctccttggcccggcgctggatatcgccgcgaccctggtcggggcggtgaaagcgcttgccgccggggagtggcgcgtctgggcgaggtggttggtgcacctgtcgctgttggcgatgctgctcgactggctgcaggcgcagggtatcggcgcggcgttttacctgctggccatcagctacccggcgctggcgctgaccaaggtaagatcgttttttgagcatcgcgccgtggacgcaccgcaggcacgttctattattaatgaggcgggttggccgtggcggctgctgtttctcaatctgaactatcatttagtgcatcacgatctgcccggcctgccctggtatggtttgcgcgaagtctatctggcggagcgcgaggcgtaccagcgtcgcagccagggatttgtcgcgcagggctacggcgagtggctgcgcgattacgccctgacgccgatcgacgtcggcgtgcatccgttgcgcgccggtgaaccgcagggggagggcgatgtcctgccgacggaaaaatttattgcgcgctggaagcgcgtttctcaggattttccaacctaa

SEQ ID NO: 422161 - DNA, 930 bp, Serratia marcescens
atggcaatcaccttatcacgcggacgttcctttgccgtcgcgctggctctgctggccaccggcggtctggcgcaggcggccgactcggtgcgcgtcggctccaagatcgacaccgaaggttcgctgctcggcaacatcatcgtgcaggtgctggaagccaacggcatccagaccaccaacaagctgcagctcggcaccaccaaggtgctgcgcggcgccatcacgtccggcgagatcgacatctacccggaatacaccggcaacggcgcgtttttcttctccgatgagaaagatccggcgtggaagaacgcccaggccggtttcgagaaggtgaaacagctcgactacgacaaaaacaaaatcgtctggttggacgcggcgccggccaacaacacctggaccatcgccattcgccaggacgtggcggaggccaatcacctgaagacgctgtcggatctcggcaagtggatcaacggcggcggcaagttcaagctggcggcctcggcggaatttatcgagcggccggatgcgctgccggcgttccagaatgcctacggcttcaagctgaatcaggatcagctgctgtccctggccggcggcgatacggcggtgaccatcaaggcggcggcggagcagacctccggcgtcaacgcggcgatggcctacggcaccgatggcccggtggcggcgctggggctgcagacgctggcggatccgaaaggcgtacagccgatctacgcgccggcgccgatcgtgcgcgaagcggcgctgaaggcgcacgccaatctgcctgagctgctgaagccggtgttcgcctcgctggacgggccgacgctgcaaaaactcaacgcgcagatcgccgtggaaggccaggacgccaaacaggtggcggccgcttacctgaaagagaaagggtttgttaagggataa

SEQ ID NO: 422162 - DNA, 1161 bp, Serratia marcescens
ttgactatcgccgtaaaacatcgcgtcttgttgacgctgttcatgctgttgctgctggccgcgttcggcctgccgttcctcagttatgcccccaatcgcctgttgtcgggcaaaagcctctccttgttatccctgctgcacggcccggcgctgtggctgctgttgccgctggcggcattggcgatcctcagcctgttgccgccgacgcgggggcgggcgctgctggcggcgctggccgcctgcggggtgctgacgctggccttctggatcagcgggcaggccgccgggcgtctggcgcaggagggatcgcgcctggcgcgcacctcctggggcagcgggtgctggctgacgatggcgctgagcctgctgatcgccgccgacgccatggcgcgcatcaccgcgtcgcacctgtggcgcatgctgggcaacgcgctggtgctggtgccgccggcgctgctgctgttcgggcatcagctcgatcagctgtcgctgctgaaggagtaccacaatcgccaggaggtgtttgacgccgcgctgctgcagcacctgaccattctgctggcgacgatggcgccggcgctggcgatcggcgtgccgctcggggtgctgtgttttcgctccgagcgctggcagcggccgattttctccgcgctgaacattatccagaccgtgccgtccattgcgctgttcggcctgctgatcgcgccgttggcggggctggcgacggcggtgccctggctggcggaacacggcgtcagcggcatcggcatggcgccggcgatcgtggcgctggtgctgtacgcgctgttgccgctggtgcgcagcgtggtggcggggctgcaaagcgtgccggcgggggtgatcgaatccgccaccggcatggggctgacgcgcgggcagatcttcctgcgcgtgcagctgccgttggcgctgccgctgttcctgaccggcgtgcgcattttggcggtgcaaaccgtcggcatggcggtggtggcggcgctgatcggcgccggcggctttggcgccatcgtctttcaggggctgctcagcagcgcgctggatctggttctgctgggggtgatcccggtggtcatgatggcggtcatcgtcgattcgctgtttaaattttgggtttcaatcctggacgtatcgcgccgatga

SEQ ID NO: 422163 - DNA, 936 bp, Serratia marcescens
atgattcactttgagcaagtcagcaaaatttttcagggcaagccggcggtagacgatctcacgctgcacatcgccgagggcgaattcaccgtgttgatcggcacctcgggttccggcaagtccacgacgttaaaaatgatcaatcgcctgatcgagcacgatcggggcaagattctctttgccggcgaagagatccagtcgttcaaaccgcaggatctgcggcggcgcatgggctatgcgatccaatcgatcggcctgtttccgcactggacggtggaggaaaacatcgccaccgtgccgcagctgctgaaatggccgcgcgcgcgcattcgcgatcgggtaaccgaactgctggagctgttgcatctggagccggatctgtttcgccgtcgctatccgcaccagctgtccggcgggcagcagcaacgggtaggggtagcgcgcgcgctggccgccgatcccgaggtgttgctgatggacgaaccgttcggcgcgctggatcctgtcacccgcgcggcgttgcaggcggagatcgcgcgcatccatcagctctccggacgcactatcgtgttggtgacgcacgacatcgacgaggcgctgggcttggcggatcgcctggtgctgctcgatcaggggcgggtggtgcaacagggcacgccgctggcgctgctgaccgcgccggccaatgacttcgtgcgggacttcttcgggcgcagcgatcgcggcatcaagctgctgtcgctgggaacggtggcggagcgagtgcggcccggcgccgccgagggcgagccgatcgccgccgccatgagcctgcgggaggcgctgtcggtgtttgtggcgcgcggcagcgactgcctgccggtggtggatgaacggggcgaagcgttgggggtgttgcacttcaacgatctgatcgccgggcaggcgctgtcatga

SEQ ID NO: 422164 - DNA, 774 bp, Serratia marcescens
atgagcgggcgcatctggcgcctgctgcgcgatccgctgccctggacgctggcgctgctgttggcgctggtgttcggcatggatcatctgcgcggcctgtttgccgcctggttccccgatctggagcggcccatttatcagcaggacagctttattgcgctggtgggggcgcacctgtcgctggtggcgatctccagcctgatcgcggtggctctcggcgtggcggccggcgtggcggtaacccggcgcagcggccgggagtttcgttcgctggtggaaacggtggtggcggtggggcagaccttcccgccggtagcggtgctggcggtagcggtgccggtgatgggcttcagcgaacagccggcgatcattgcgctggtgctgtacggcctgctgccgatcctgcagggcacgctggcgggcatcgaatcggtgccgcccgccacgcgcgagattgcccgcggcgtggggatgagcgcctggcaaatcctgtggcgggtcgaattgccgctggcggcgccggtgatcgtcgccgggatccgcacgtcggtgatcatcaacatcggcacggcggccatcgcttccaccgtcggcaccaagaccctcggctcgccgatcatcatcggtctgagcggctttaacaccgcctatgtgatccagggcgcggcggtggtggcattgttggctattatcaccgatatgctgttcgaacgttgggtgcgttatctcaccgcctggcgtcagcagacgctggcgaccactccggcggggtaa

SEQ ID NO: 422165 - DNA, 783 bp, Serratia marcescens
atgatgcaggtgtctctaccgatgtacggcgttggccgggagcaggccgaatctttctggcaggtattgcgcgacaagctgctgcgcctggggctgccggcggcgccggagcggctcagttggccggacgatttggcgcagcactggcggcgcgacgatctgctgctcagccaaacctgcggttatccgttggtcggcactctgccgcaggtgcagctgatcggcacctaccattatcgggttgaggggtgcgacgggccgaattaccgcagctggctggtggtgcgcgcgggcgaccccggcgaacggttggcggattttcgcggccggacggcggcctataacagcaccgattcccaatccggctacaacggcctgcgcgcgctgatcgcgccgctggcgcaggacgggaaattctttggtgcggcgattgcctccggcgcgcattatcagtcgctgaagctgatccgcagcgggcaggcggatatcgccgccatcgatgcgatcagcatggaactgctgcgccgggcgcagccgcaggcgctggaggggctgaaaatcatcggccgcacggcggcggtgcccggtttgccgctgatcaccgcggcgggtacgccgccggaacaggtggaaatcctgcgcgccggcgcccgggcgatgctggatgaggcggtcagcgatcgcctgctgatcggcgatttcagcctggtgccgcgttcggcctaccagattatcaccgtgctggaacagcaggctgccgcgcagggcgtgacggcgctctag

SEQ ID NO: 422166 - DNA, 207 bp, Serratia marcescens
atgttccaagcaacctgcgaaattattcctatgctgaaaaaagcgttcgtcatcgtcatcgccctgtgcgccttcggttctttgggcggcgtattcctcgccgggctgaacatctacacccgttccaccaccccgcacgaagaaagcgcgcctgccggggatgccgccgccacgccggcgcaaaccgaaacccttcaggccaagtga

SEQ ID NO: 422167 - DNA, 921 bp, Serratia marcescens
atgcttagccaacaaagccgtagcgtcctgccgttgatcggggcgttgttcacgttatatatcgtttggggttccacctatttcgtcattcgcctcggcgtcgcgcagtggccgccgctgatgatggccggcattcgctttctggctgccggcatcgtgctgttcagtttcctggcctggcgcggccacgcgctgccgacgccgaagcagtggctggccgccggcgccatcggcattctgctgctggcggtgggcaacggcctggtgacggtggcggagcaccaacacgtgccgtccggcatcgccgcggtgatggtggcgacggtgccgctgttcaccctctgcttcagcctgctgtgggggatgcgcaacaccaaactggaatgggccggcatcgcgctcggtctggtgggcatcgtgctgcttaataccggcaacaacctggtgggcaacccgaccggcgcgctgctgattttgctggcgtcggccagctgggccttcgggtcggtactgggatcgcgcatctcgctgccggccgggccgatggccggctcggcggaaatgctggtcgccggcgtggtgttattggcagccagtcagctgagcggcgagcgtctgactcagatgccgagcaccggcggctttctggcgctgggctatctgatcgtcttcggctcgatgctggcgatcagcgcctatatgttcttgttgaagaacgtgcgcccggcggtcgccaccagctacgcctacgtcaacccggtggtggcggtgctgctcggcatcggctttgccggcgaatcgctggcgccgcgcgagtggctggcgctggtgatcatcgtggcggcggtggtgctggtaacgctgggaaaatacctgttcgcccgcccggcccgcgtgcaggccatcgacagcgaacggtag

SEQ ID NO: 422168 - DNA, 495 bp, Serratia marcescens
atgaagaagccgcatgccggattctggctggcgacgctgggactgggcgtctgctggctgctggcgctgctgactcgcgatcggctcaacggcatcctgctggccggcgcggcgctggcgctgatctttaccccggccgcccgccgcaaaggcgcggccctggccgccctgggcggtattggcatggatgggctgtggagctacagcggcgtgctgcactacagcgggcaacacggcctgccgctctggaccatcgcgctgtggatcggcttcggctgctggtggtattggctgctggacgtggtcagagcggccccctggccgctggcggtgctgggcgccgccgtcggcccctttgcctacgccgtgtcctggaagctggacgccttgctgcccggcgtgccgccggagttcatgctgctgctgctggccgtcggctggtcgatttacctgcctgccgtcagctggctgcagtggaagcggcgggacagctga

SEQ ID NO: 422169 - DNA, 654 bp, Serratia marcescens
atgtcaagaataaacttggaaaatagcggcagcaccgcacaatcggtcagtgaccgcttgctgacgctattgaaaacccgcggcccacagcaagcttctgacgcaggaaaggtgctcggcaccaccggtgaggcggcccgccagcagttcgtcaagctggcgaaagaggggctggtcgaagcggtggcggaaacgcgcggcgtgggccgcccggtgcagctgtggcatttgacctcggccggcaacgcgcgctttcccgacacccatgcggatctgacggtgcagctgctgcgcaccgtgcgcgacaagctgggcgaacaggcgctcgacgtgctgatcgagacccgcgagcaggaaaaccgcatcaactacaagcaggcgatgatcggcgccgccgatctgcaggagcgcgtggcgcgcctgaccgaaatccgctgccgcgaaggctatatggccgaatggcgtcaggaggaagacggttcctatctgctggtggaaaaccactgcccgatctgcgccgccgccaccgtctgccagggcttctgccgggcggagctgagcatcttcaccgaagtgctgcaggcgcaggtggagcgcgccgaacacattctggccggctcgcgccgctgcgcctaccggatttcgctcctgtaa

SEQ ID NO: 422170 - DNA, 1455 bp, Serratia marcescens
gtgataacccatgacgatagccgctggagcgaccttttctccggcaaaaatgcggccagtgcgatcgcgctttcgctcggcgtggcgctgcatgccatcaatattctggtcgccaccaccattctgccctcggtggtgcaggatatcggcggtctggatctctacgcctggaacaccacgctgttcgtggtggcgtcgatcctcggttccgcgctgtcggcccggctgctcagcggctacggcgcgcgcagcgcctatctggtggcttcgctgttcttcatcgccggggcggcgctgtgcgcgctggcgccgagcatgccggtgatgctgatcggccgtacggtgcagggcttcggcggcgggctgatctttgcgctctcctacgcgatgatcaacctggtgttcgagcagcgattgtggccgcgcgccatggcgctcatctcggcgatgtggggcatcgccaccctggtggggccggcggtgggcggcattttcgccgagctgaacgcctggcgttgggccttcggcattctgctgccgatcatggcgctgtacgccgcatttaccttcctgatcctgcccaagggtaaagcgcagcaggcggccgcgccgttgccgactgcgcagctgctgttgctgaccgtggcggtgctggcggtgtccgccggcagtctggcgcacagcgcctggatcaacctggcgggcatcgcgctctcgctggtgctgatggcctggctgctgaagcgcgaagcgcactcgcgcgcccgcctgttgccgcacggcgcgctgcggcgcggctcatcgctggcggcgctctacatcacgaccgcgttgctggtgatcggcatgaccagcgagatcttcgtgccctattttctgcagctgctgcacggccagtcgccgctgatctccggctatattgccgccgccatggccgccggctggacgctgtccgagatcctcagctccggttggcgcggggcgggcattcgccgggcgatcgtcagcggaccgctgtttgtgctggtggggctgctggcgctggcgatcctgatgccggtgccgtccggcggccactggcaggcgctggcgccgatcgtcattgcgctgttgctggtggggttcggcatcggcttcggctggccgcacctgctgacgcgcattttgcaggtggcgcccgaagcggacaaagatatcgccggcgcttcgattaccacggtgcagctgttcgccaccgcattcggtgcggcgctggccgggatgatcgccaatctggcggggctgaacgatccgggcggcgcggcgggcgcggcgtcggcggcgcgctggctgttcctggcgttcgcgctggcgccgctgctggcggtattcagcgcctggcgctgcgcggcgatcgcgccgccgggcgccgagacgggcaatcttgtacaaaacccgccctcgcgcgagtgctag

SEQ ID NO: 422171 - DNA, 570 bp, Serratia marcescens
atggataacggtttggagactgccgacctgaggttggcgcagcggctggcggatttgcgccagcagcagggatggtcgctggaagagttggcgcagcgcaccggcctcagccgggcgacgctctcgcgggtggagcgcgccgaaaccagcccgacggcgtcgctgctgaaccggctgtgcgccgcctacgggttgaccatgtcgcgcctgttgagcgaaatcgaagacgaaccgccggagctgttgcggccgccgcaacagccggtatgggtcgatcgcgccagcggtttccaccgtcgctccgtttctcctcccgccgcgctgtataaggccgagtttatcgaagcccggctcgatgccggcgcgcagattgattacgacctgccgtcgataccggcgctggagcatcacctctggctgctgtccgggcaactggagctgacgctggaagggcgcgttttccggctgtcgcccggcgattgcctgcgctaccgcctgttcggcgcgtcccgtttccatgtccccgacgatgagccggcccattacacgctcgttatctgcaggccatag

SEQ ID NO: 422172 - DNA, 519 bp, Serratia marcescens
atgattgaattgcaacagtggggcgccgacgcggcgcaaagcgccgtggccgacttggccgagatgctgcacgccagcgtggcgcacggcgccagcatcggttttgtcatgccctttacggtggagcaggcgcgggcattttggcaggggctgctgccggccctggcgcggggagagcgtgcgatgctggtggcgctggcgaacggtcggccggtcggcacagtgcagctgctgttggcgatgccggacaatggccgccaccgggcggaagtggtcaagctgatggtgcacccgcaggcgcggcggcagggcgtcgcgcggctgttgatgcaggaagtgcaggcgctggcggcgcgtcatcgccgcagcctgttggtgctggataccctgagcggcagcgcggcgcaggggttgtaccgccaattggggttcgaagcggcaggtgacatcccacaatacgcccgcgccagcgacggcggggcgttggaagccacctgctatatgtacaaactgctgtga

SEQ ID NO: 422173 - DNA, 222 bp, Serratia marcescens
atgtatgtacgtgagcctggtaatggtattggtcgtaaattattacatgctctggaacaacaggctcgatggttggggtatcgccaactgtggctggaaactcgaagagtgaacctgcgtgccatcaagttttatctggctcaggggtatcggatacgcgaaaattatggccgttatcgaggtaacccgcaggcggtctgtttcgaaaaagttctggaatga

SEQ ID NO: 422174 - DNA, 831 bp, Serratia marcescens
atggcaggaaaacaggcaaggacactcaccctcggcgcgtcgattggcgtcgcgctgctgacgttggccggttgcgcgcagccgccgcacaccgacgcgcaggcccagcagcggctggcgcatcagtcggtgctggcggtgaactggttccaacagtccggcgaataccgcgcgctggcgcatcaggcgttcaacagcgcgcagcgcgccttcgatcaggccagggccgcgccgggccgtaaaaaggcggtggtggtcgatctggatgaaaccatgctggacaacagcgcctactccggctggcaggcgcagcagggccagccatacgacggcgccacctgggccaaatggacgcaggccgaacaggccggcgcggtgccgggcgcggtgtcgttcgcccgctacgtcaacgcccatcagggcacgatgttctacgtgtcgaaccgcaagcagagcgaatacgccgccacggtggccaacatgcagaagctcggtttcaccggcatgtcggaaaagaccgtgctgctcagcaccgatacctccaataagcaggcgcgcttcgacgccatcaaacaagccggctacgacatcgtggtgtacgcgggcgacaacctgaacgacttcggcgccgcgacttaccaccaggacaacgcgcagcgccgggcattcgtcagcgagaaccagaacaagttcggcaccgaattcatcgtgctgcccaacccgctgtacggcgattgggaaagcgggctggcccgcgactacaacaagctgacgccgcagcagaagctgcaggtgcgccaacaggcgatcaaagcctggcgcgggcgctga

SEQ ID NO: 422175 - DNA, 852 bp, Serratia marcescens
atgcataacgacggacgcttcgacttccacaacgccctgcgctacagcagcgacgaactggcgaatatcctcagccactgctttgaaaactacatcgtgcgcttcgttgtcgacgggccgaccttcgctgcccgtttcggcgccgaagatctcagcctgaacgacagcctgatcgtcacccaccgccatgaaccggtggcggtggcgctgatcgcccgccgcggccggcacagccgggtcgcggccttttccgtgcgcccggagatgcgcggccagggcctgggcaagacgctgatgcagcggctggtggcagacgcccgccaccgcggcgaccggcggctgtcgctggaagtgatcgaaggcaacgacgccgcgctggcgctgtaccaccgcgccgggctgcgcatcgtgcgcaccctgaccggccatcaggcgccggcggaagctccgccaggcacggcggaactgcaggcggtcgatccgctgaccgtcagccatcgcctgacggcggaaggcgccaccgatctgccctggctgatcgcccccgaatcgctgttcaagctgccgggcacaccgcgagcctatacgctcaatcgtcaggcctacgccgtggtgatgcccggcgccgagcactgctggctgcgcctgatctacgtgccgccgcagcaccgcggccaggggcatgcgcgcgccttgctggccgccctgcaaacaaggttcgcccctttgccgctgactgccaacgtcgttgtgcccgaggtggccgcccccttctttacgcatcttggctggcggcaggatcccctgcgccagttcgagatggatatgctgctggacagcccacaagaataa

SEQ ID NO: 422176 - DNA, 1098 bp, Serratia marcescens
atgaaacgtaatcttctggccgttattattccggcacttttacttgcgcaagcggcacaggcagcagaaatctacaataaagacggcaacaaactcgatttttacggtcgtgtaaaggccctgcattatttctccgatgatgccggcaacgacggtgataaaacctacgtgcgtatcggctttaaaggcgcgactcagattaacgatatgctgaccggctacggccagtgggaatatcagatcgccgccaaccacacggaatccgacggcactaaagacaccaaaacgcgtctgggcttcgccggtctgaaatataaggatctcggttccttcgactacggccgcaactacggcatcatttacgacgtcggcgcctggacggatatgatccctgaattcggcgacgatgcttatatcaagaccgacaactttatgaacggccgtaccaacggcgtcgccacctaccgtaataacaacttcttcggactggtcgacggcttgaaatttgccgtgcagtaccagggcaagaacgaaaacgacggccgctccgccagcaaggcgaacggcgacggctggggcctctcctccagctacgaaatcatcgacggcctgagcgtgggcgccgcctatgcctcttccaaccgcaccaccacgcaaaaagcgggcaccttcggtaaaggcgacaaggccgatatctgggccggtggtctgaaatacgacaacaacaacgtctacctggccgcgacttattcgcagagccgcaatatcgcgcctatttccggcaccgccaccatcaataacaatgccacttccgttagcggcttcgccaataaagcggaagggattgaattggtcgcgcaatatcagttcgacttcggtctgcgcccatcgctgggttacgttcagcagaaaggcaaagatattgaaggcatcggcgacgtcgatctggtgaaatatttcgacgtagcggcaacctattacttcaacaaaaacatgtccacttatgtcgaatataaaatcaaccagctcgatgacgacaacaagctgggtctgaaaaacgacgacgtggttgttgtcgccctgacctaccagttctga

SEQ ID NO: 422177 - DNA, 657 bp, Serratia marcescens
atgcacgatacttatactttgttcggcacgcagggctgcggctcgacgatcgtggccgccgcgttggtgttgaccgctttcccctggggctatgaggaggtggactacacgcaggacggcccggagcgcgatcgcctgctggcgctgaacccgttgggccaggtgcccaccttagtgttgcccaatgacgaagtgatgacggagagtgcggcgatcattctgttgctgcacgatcgcgcgccgcacgccgaactggcgccgcccggcggctcgccgctgttgccgcgttttctgcgctggctgctgttcatcaacgcggagatttaccccaccttcacctatgccgaccatccgcagcgctggcagccgcaagcggcgggcgcggaacagctgaaaaacgcggtaatggattatcgcgagcgcttattgcggcagctgaacgccgccgccggcgctgcgggcccgtggtttctcggcaagagcttcagcgcgttggatctgtacgtggcggtgatgtgcaactggcggccgggccgcgcgtggttccggcaacactgcccgcggctgtacgccatcgcagagcgggtggaacagcggccggagctgaatgcgttgctgagcgcccatttcgacggtgttgccccgctggaatcgtga

SEQ ID NO: 422178 - DNA, 333 bp, Serratia marcescens
atgccatcagaatcccaggccgggcagcaggcgttcggcgatattgcccccaagctggcgcagctcagcgacagcgttttgtttgacgatatttggcagcggccggcgctgagcccgcgcgagcgtagcctgattaccgtcgccgcgctggtggcgctcaaccgcgtggaacagctgccgtttcacctgcagctggcgcagcgcaacggcgtgacgcgccagcagctggccgagctcatcacccatctggcgttctacgccggctggcccgcggcggcgtcggccgtggcgcgcctgcgtgaactggaacaggaggacaaccatgccgtttag

SEQ ID NO: 422179 - DNA, 393 bp, Serratia marcescens
atgccgtttagccgcatcgccctgcatcagggcaagtccgccgactatctgcaaaccttgtccggcagcctgcatcaggcgctggtggaggccttcgaggtgccgccgacggataaatttcaggtgatcgatcaataccgccccggcgaactgatctacgatcgcgactatctcggcgggccgcgcagcgcggatttcgtgctgttttacatcaccgccgggcggccgcgcgacaccgataccaagcggcacttctacgggcggctggcggcgctgctggcggaaaacctgcggctgcgccccgaggatgtgatggtggtgatcaccaccacccagttggacgagtggtcgttcagcgccgggcgcgcctcgatgatcgatccgcaggcgtaa

SEQ ID NO: 422180 - DNA, 2199 bp, Serratia marcescens
atggcgctctcctccgcagttaaagatcagattggccagtggtacaaagccctgcagcagcaaataccggatttcatttcccgtgcgccccagcgccagatgatcgccgaggtggcgaagacgctggccggcgactacccgcgccatctggcgatcgaggcgccgaccggcgtcggcaaaacgctgtcatacctgatcccgggcatcgccgtcgggcgggcggagagtaaaccgctggtggtcagcaccgccaacgtggcgctgcaggaccagatctacagcaaggatttgccgctgctgaaaaagattatccccgatctgaaatttaccggcgcctttggccgcgggcgttacgtgtgcccgcgcaatctggcggcgatgagcaccgacgttagccaacagggcgatctgacgctgttcctcgacgacgagctggcgccgtccagcggcgaagagcaagcgctgtgccagaagctgaccaaggcgctggcccgcttcgagtgggacgggctgcgcgatcactatcagcagagcatcgacgatccgctgtgggccaagctgagcaccgacaaggccaactgcctggggcgcaactgccactacattcgcgaatgcccgttctatatcgcccgcaaagagatcgagagcgccgacgtggtggtggccaaccacgccctggtgatggcggcgctggagacggaatcggtgctgccgaacccgaaagagctgttgctggtgctggacgaaggccaccatttgccggaggtggcgcgcgacgcgctggagatcgacggggaaatcaccgcgctgtcgaccaacctgcaactggacatgatcgtgcgccaggtcgagcagtgcatgacgcagtaccggccgaagaatccgccggggctggccaacagtgagcggctgaaaaaccattgcgaggagctgcgcgagctggtgcagatcttcgagcatcaggtcagtgcctatctgcccggtgacagcgtggcggccgagcaccgttttgaaatgggcgagctgccggcggagatggtggagagctgcgcgcggttgttcaaactgaccgacgcgctgcgcgggctggcggagttcgtgcttaacgatctcaccgagcagaccggcaagcatgacatcgtgcgcctgcaccggtcgatcattcagatgagccgcacgctgggttatctggaggcgatgagcaagctgtggcggctggcggcgctcgacaaatcctccaacgcgccgatctccaaatgggtcacgcgcgagctgcgcgataacgtcactcatctttacctgcactgcgtcggcatccgcgtcagcgaccagttggagaagctgctgtggcgcaaggtaccgcacgtggtggtcacctcggccacgctgcgttcgctgaacagcttcgcgcgtttgcaggagatgagcgggttgagcgagaaggccggcgatcgtttcgaaacgctctcttcgccgttcaatcacgtcgaacagggcaagattgtcattccgcagatgcgctacgaaccggcgctcgccaacgaggcggaacacctcgaggagatggcgcgatgtttccgcgccgagcaggcgagcggcaaacacaaaggcatgctgatcctgttcagcagccaccgggcgatgcagactttcctcagctacgtgaccgatctgcggctgatgctgctggtgcagggcgaccagccgcgctaccggctggtggaagagcaccgcaagcgggtggagaagggcgtcgccagcgtgctggtggggctgcaatcgttcgccgaagggctggatctgaaaggcgagctgctgacccaggtacacattcacaaaattgcgttcccgccgatcgacagcccggtgatcattaccgaaggcgagtggctgaaatcgctgaagcgctatccgttcgaagtgcagagcctgccgagcgcctcgttcaacctgatccagcaggtcggccgcctgatccgcagcaaccaatgctacggcgagatcgtgatctacgatcgccggctgttgaccaaaaactacggttcgcggctgttggcgtcgctgccggtgttcccgatcgaacagcgcgcggtgccggaggccgacaaggcgcatctggcggcgctgaaatccgccgccgacgcggccaaaaaagagaagaagcgcggcaacccgttcgcccgcaagcggcggcgttaa

SEQ ID NO: 422181 - DNA, 435 bp, Serratia marcescens
atggatgatatcgatcgccaaatcctgaccattctggcggaagatgcgcgtgcatcgttgaagacgctgagcgcgcaggtggggctgtcgtcgccgagcacgtcggaaaggctgcggcggctggaggaaagcggcgtgatccagggctataccctgaacgtcaatctgcaggcggtgggctacgccttcgagtcgctggtgcgcatcaagccgctgccgggcatgctgaagaaggttgaacagctgattcaggcgatcccggaagtggtcgagtgcgacaaggtgaccggcgaagactgctttatcgtgcggctggtggcgcactcgatggcgcagctcgaccacaccctcgatcggctggccgaacacgcacagagcaacacctcgatcgtgaaaaccacgccggtcaaacgccgcctgccgccgctgctctga

SEQ ID NO: 422182 - DNA, 909 bp, Serratia marcescens
atgaatgcagagataaaacgcggctcgctggagatgacggcggcgatgctgatttccggctccatcggctggtttgtgctgatgtccggccagccggtggtcaacgtggtgttttggcgctgcgcggtgggggcgctggtgctgctggcggtgtgcggcgcgctggggcagctgcggcgcgatgtgctgacgcgcgccacgctgctgctggcgatcgccggtggggtggcgctggtgatcaactggctgctgctgtttgccgcctattcctatgcctctatctccatcgccacggcggtgtacaacacccagccgtttatgctggtggggctgggggcgctgtttctgggggaacggctgaccgcccgcaagctgctgtggctggggctggcgttcggcggcatgatgctggtggtgctggcgcagccgcggcaggcgggggaacagagtcattatttggcgggcattgcgctggcgctcggcgcggcgtttttttacgccctgatggcgctggcggccaagcggctgaagggcacgccgccgcatcttattgcgctgatccaggtggcggtaggggcggtgatgctgttgccgctggtggatttccacgtttcggccagcgctgggcagtggggcatgctggcgacgctcggcgtgctgcacaccggcctgatgtacgtgctgatgtacggcgcgctgcagaagctgccgaccaaccttatcggctcgctgtcgttcatctacccgatcgccgccatgctggtggatcgcctggcgtttggccaccggctgtcggcctggcagctgttgggcgcggcgatcatcctgctggcggcggcgggcatgaacctgctgggcgagcggcgagcgcggctgctgccggcctcggacggccggcgcgccggctga

SEQ ID NO: 422183 - DNA, 1590 bp, Serratia marcescens
atgagcgatcacgtcacgccggacaaaccggtgatctggaccgtctccatcacccgcctgttcgatctgttccgagacatcagcctcgagttcgaccatctggcgaccatcatcccgatccgcctcggctttgaggaggcggtgcagcacatccgcgcccgcctggctaccgagccttgcgacgccatcatcgccgccggctccaacggcgcctacctgaaaagccgcctgtcggtgccggtcatcctggtcaagcccggcggcttcgacctgctgcaggcgctgagcaaggcgcgcagaaccgccgatcggatcggcgtcatcacctataaaacccctctgcccgcgctgctggagttccagcagaccttcgatctgccgctggagcagcgcagctacgtcaccgaagaggacgcgcgcggccagatcgccgagctgaaagccgccggcattcaggccgtggttggagcgggcctcatcagcgagttggcggaagaggccgggctcaccgccatttttctctattccgccgccaccctgcgcgccgccttcagcgatgcgctggacgtgacgcgcctgatgctgggcggcggcaaacgcggcggcgattacgccgcgcgcaataccctgcagccgcgctacgggctgagcgatttgcaaggcgactccccgcagatggagcagacgcggcgcaccatcatgctgtacgcccgctcgccggcggcggtattaattgagggagaaaccggcaccggcaaggagctggcggcgcaggcgatccaccgggaatacttttcccggcgcggcgcgccggccagaggcgcgacgccgccgttcgtcgccatcaactgcggcgccatagccgaatcgctgctggaggcggagctgttcggctatgaggaaggcgcctttaccggctcacggcgcggcggccggcgcgggctgttggaaaccgccaacggcggcaccctgtttctggatgagatcggcgaaatgccgctgcacctgcaaacccggctgctgcgcgcgctggaagagaaggccgtcacccgggtcggcgggcagcagccggtggcggtcgactttcgcgtcatcagcgccacccacaaccacctggagcaggcgattcaacggggcggctttcgcgccgatctgttctaccgcctgagcgccctgcggctgcagctgccgccattgcgggcgcgcggcgacgatatcgcgatgctggcggaacactttctgaagcggtcgctggcggcgctcgacgtgccgctgacggagccgctgcgcgccgccctggccggctgttacgccacgctgagtcattacgcctggcccggcaacctgcgcgaactgcgcaacatgatggagcgggtggcgctgatgctgagcaccggcaccgcgccgagcggcgagacgctgcgctggctgctgccggagctggcggcggccacgccgcccgagacgccgccagcgcccgtctccgcccacgaagcgctggcgcgatgcggaggcgaccacgccgccgccgcccgattgctcgggatcagccgcaccaccttatggcgccggctgaaaaaaacgaactga

SEQ ID NO: 422184 - DNA, 891 bp, Serratia marcescens
atgacgctgcgctcacccgggctcgcctttcgtcaggccctgagtaaagaaaaacccctgcaaatcgccggcgcgatcaacgccaaccatgcgctgctggcccagcgggccggattccaggccatctacctttccggcggcggcgtggcggccggttcgctggggctgccggatctgggcatttcgaccttggacgatgtgctgaccgacattcggcgcatcaccgacgtttgcccgctgccgctgctggtggatgtcgacagcggtttcggcacttcggcgttcaacgtcgcccgcacggtgcgatcggtgagcaaggccggggcggcggcgctgcatatcgaagatcaggtcggcgccaagcgctgcggccatcgtcccaataaggccatcgtttccaccggagagatggtagatcgcatcaaggcggcggtggatgcgcgcagcgatccggacttcgtgatcatggcgcgcaccgatgcgctggcggtggaggggctggaggcggccatcgaacgcgctcaggcttacgtggcggccggggccgacatgctgtttccggaagcgatcaccgagctgggcatgtaccgccgctttgctgaggcgacgcaggtgccgatcctggccaatatcaccgaattcggcgcgacgccgctgtttaccaccgacgagctgcgcagcgcccaggtggatatggcgctgtatccgctgtcggccttccgggcgatgaaccgcgcggcggagcgggtgtaccgcgccctgcgcgaggagggcacgcagaaaagcgtcatcgacaccatgcagacccgcaacgagctgtatgaaagcatcaactattatttgttcgaagagaaactcgacgccctgttcgctcgccagcgcgacgaatag

SEQ ID NO: 422185 - DNA, 1164 bp, Serratia marcescens
atgagccaagcgatccccccgcaaagcccgactggcgttaagccgaaaaaatccgtggcgttatccggcgtgcccgccgggaataccgcgctgtgctccgtagggcgcagcggcaacgatctgcactatcgcggttacgacattctcgatctcgcgcgccactgcgagtttgaagaggtcgcccacctgctgatccacggcaagttgcccaaccgcgatgagctacaggcctacaaacaccgtctcaaagccctgcgcggcctgcccgccagcgtgcgcacggtgctcgaggcgttgcctgcggcgtctcacccgatggatgtgatgcgcaccggcgtctcggcccttggctgcacgctgccggaaaaagagcagcacggcgcggccggcgcgcgcgacatcgccgaccggctgctggcgtcgctgggatcgatgctgctgtattggtatcactacagccacaacggcgagcgcattcagccggagaccgacgacgactccatcggcggccacttcctgcacctgctgcacggcgaagcgccttccgccagttgggagcaggcgatgcacgcgtcattgatcctgtacgccgagcatgagttcaacgcctcgaccttcgccggccgggtgatcgccggcaccggatccgacgtctattcggcgatcgtcggcgccattggcgcgctgcgcgggccgaaacatggcggcgccaacgaggtgtcgctggagatccagcaacgctatgaaacgccggacgaagcggaagccgacattcgccgccgcatcgacaacaaagaggtggtgattggcttcgggcacccggtgtacaccgtctccgatccgcgccatcaggtgatcaaagagatcgcgctgcgcctgtcgcgggaggcgggggcgatgaagctgtatgacatcgccgatcggctggaaagcgtgatgcgcgacaccaaaaagatgttccccaacctcgactggttctcggcggtgtcttatcaccagctgggggtgcccaccgaaatgttcacgccgctgtttgtcatggcgcgggtgagcggctggtcggcgcacatcatcgagcaacggcaggacaacaaaatcattcgcccgtccgccaactataccgggccggaagcgcgggcgttcgtaccgctggatcagcgctga

SEQ ID NO: 422186 - DNA, 1455 bp, Serratia marcescens
atgatgcttgagtctgccaatacccgccgtccgccgttcgatcgcgaaatggtcgatatcgtcgattatgtgatgaaagaggccgtcgataccccggcggcgtaccgcaccgcccactattgcctgctcgataccctcggctgcgggctggaggcgctgagctatccggcctgcaagaaactgctggggccggtggtgccgggcgccgaggtgctgaacggcagccgggtgccgggcacccgcttccagctggatccggtgcaggcggcgttcaatatcggcgccatgatccgctggctcgacttcaacgacacctggctggcggcggagtgggggcacccgtcggacaacctgggcgggatcctggcggtggccgactggctctcgcgccaggcggtggcggcgggcaaagcgccgctgaccatgcggcaggtgctgatcgccatgatcaaggcgcatgagatccagggctgcctggcgctggaaaatgcctttaaccgggtggggttggatcacgtgctgctggtgaaggtggcgtccaccgcggtggtggcgcagatgctcggcctgagccgggcggagatcctgaacgcggtgtcgctggcgtgggtggacgggcagtcgctgcgtacctatcgccacgcgccgaacgccggcacccgcaaatcctgggcggcgggggatgcgaccgcccgcgcggtgcggctggcgctgatggccgccaccggcgagatgggctatccctcggcgctgacggcgccgacctggggattctacgacgtctcgttcaacggcaagcctttccgcttccagcggccgtacggcgcgtatgtgatggagaacgtgctgtttaaaatttcgttcccggcggagttccatgcccagaccgccgtggaggcggccatgacgctgcatcgccagatgcaggccgccggtaaaaccgccgccgacatcgccgcagtgagcatccgcacccacgaggcctgcctgcgcattatcgacaagcaggggccgctggataacccggcggatcgcgatcactgcattcagtatatggtggcgatcccactgctgttcggccggctgacggcggcggactacgaggatcgggtggccgaggatccgcgcatcgacgcgttgcgcggcaagatccactgccatgaagatcccgtcttcacccgcgattatcacgatccggaaaaacgctcgatcgccaatgcgctgacggtggagttcgccgacggcagccgtctggatgaggtggcggtggagtatcctatcggccatgcgcggcggcgcgaagagggcatcccgctgctggtcgagaagttcaaaaccaacctggcgcgccagttcccggctctgcagcagcagcgcattctcgaggtgtcgctggaccggcagcggctggcgcagatgccggtcaacgagtatctcgatctgtgggtgatctga

SEQ ID NO: 422187 - DNA, 630 bp, Serratia marcescens
atgattgatgccgcaacgctgttgttgttttccggtgcctgcgtggcgctggcgctgacccccggcccggatatgctgctgatcgcttcgcgcagcgtcagccaggggcggcgcgccggtttcgcttcgctggcgggcattcagctcggcacgtattgtcacgcgctggcggcggcgctggggttgtcgcaactgttcgtcgcggtgccgctggcttacgacgcagtgagaatgctgggcgccgcctatctgctctatctggcgtggaaaacgctgcgatccggcagcagtttgcaggcttccgccgggttgcaggcggtgccgacggcgcgcatcttccgccaggggctgttcaccaatatcctcaacccgaaaatggcgctgttcgtgctggcgctgtttccgcagtttatcgatccgcgttcaggctcggtggtggtgcagatgctggcgctggcgacggtgctgaatctggtgggcttgctgattaacggcggggtgatcctggcggtcagcggcatgaaaagccgcttcgccggccgccgcttcagcgcccgctggccgaactacctgctgagcggggtgttcgccgggctggcctgcaagctcattttcgacagccgccgctaa

SEQ ID NO: 422188 - DNA, 840 bp, Serratia marcescens
atgcccccacgcaccctcgagcgcactcgccacgaactggcggattttctgcgtcaaaagcgagaacagctgtcgccacaggcggtcggtttgccgagcggcagccgccgccgcacgccgggattgcggcgcgaggaggtcgcggcgctggccggcgtcggccttacctggtacacctggctggaacaaggcagggaaatcaatgcgtcggtggcgtttttggaaaacctggcgcgggtgctgcagctcgacgccgccggccgctaccacctgtttttattggcgcatcagcgcccgccggtgccggtcggccatcagtggtgccaggtctcgccgctggtgcggcggctgctggacgatttggcgctgcggccggcctacgtcatgaacctgagttgggacatcatcgcctggaacccggcggcacagcggctgttcgccatcgccgaacgcccgccggcagagcgcaacatgttgtggatgctgtttgccgatccgcagctcaatgcgcgcctgctggagtggcgggcgcaggcgccgcaaatcctggccagcttccgccgcgactacgctcgcgcgccggaggatgaggtgatgcgccaacgggtacaggcgctggagcgggtgtcgccgcagttccgccagctctggcggcagcacgacattcacgggcgctgccagggacggcgcagcttcgccatcccggaaatcggcccggtcacctttgaccacgcctctttcatcgtcgacgaagagaatcacctgcggctggtgatgtacagcgcgctgccggacgaaccggccagcgcggcgtttgaagcgctgctgcgcgagggttag

SEQ ID NO: 422189 - DNA, 1425 bp, Serratia marcescens
atggaacattcattatctcgtgaacggcgagggttggccggcctgccggtgctgctgttgggcggcttcgtcacggtgttcgatctgtttgtggtcaacgtggcggcgccggtgatccagcgagaattcgccgctgattttgccggcgtcgggttgatcgtcgccggttatgaactggcgttcggggtgctgttgatcgccggcgggcgtctgggcgatcgcttcggacgtcggcgtctgttcagcctcggcatgctgggattcacgctgacttcactgctgtgcgggttggcgggatcgctcagcctgctgatcgccgcgcgtattctgcagggggcggcggcggcgctgctgtttccgcaaatttacgccttgatgcgggtgctgtacgagccgcaacagcggcggcgcgccttcgcctggctgggcatgacgctggggctggcggcaatcttcggccagatcctcggtggttttatcatcgaggccaacctgttcggcagcggctggcgcatgatctttctgattaatctgccgatcggcgcgctggcgctgtgggcggcgcggcgcattcccgaatcgcgggtggcgcaggcgcagcggctggatggcgttggcctggggctggcggcgaccggcctgtcgctgttgctgctgccgctgctggaagggccggcgcgcggctggccgtggtggatcgcgccgatgttggcgctggcaatgctgacgctgtggggcttcctgcgttgggagcgccgtctggcgcagcgcggcgacgatgcggtgctcgatccggcgctgttccgccaggcgggcttcgcgccgggtatggcggtggtgctggcgatttatgccaccgcttcctcgtttttcttgtgtttcgcgctgctgctgcaggcgggggcggggctgacgccttttcaggcgggcagcctgttcgccccggccagcgcggcctttatgctggcgtcgatgttggcgccccggctggcgctgcgttggggcaaccgtgcgttgagcgcgggcgtggcgatttacgccgccgggctggcgctgctgatggcgcaggcgctgtggggcgcggcgctggcgcatccgctgcggctgctgccggggttggtggtgctgggattcggccaggcgctgagcatgacgccgctgctgaatctggtgctcggtttggcgcacgagcggcaggcgggcatggcggcggggctggttgccaccgtgcagcaggtggggggcgcgctgggcatcgtggtcagcggcgtcggtttcgtgccgctgctggcgcacggcggcgcggcggagcgctatgccgaggcctttgccggcgccatggtatttaatctgttggcgatgggcgtcgccctgatcttgttaaaccggatcacgcgaaatagtcagaaagcggatcttaagtag

SEQ ID NO: 422190 - DNA, 630 bp, Serratia marcescens
atgtttcaacccgccgcatttcgcgaagacgatctggatgcccaactggcgctggtgcgcgcccacccgttggggctgctggtcagccacggcgagcagggattgacggccgatccgctgccgtttctggccgatgtcgaacaggggcagatccggctgcgggcgcacctggcgcgcgccaacgagcactggcggcggctgcagcacgcggcggaatgcctggtgatttttcaggggttggagggctatgtgtcgcccggctggtatccgagcaagcgccagaccggcaaagtggtgccaacctggaattacagcgtggtgcagctgtatggcgtgccgaaggtgacggacgacccggcctggctgcggcgccagctgatcgatctgaccgcgcagcaggaaggagggcgcccggcgccctggcggctcgacgacgcgccggccaactacatcgccgcgcagcttaaaggcatcgtcggtattgagatcgccgtcacccggcgcgaaggcaaatggaagatgagccaaaaccgcagcgccgacgatgccgatggggtgatcgccgggctgcgcgacggcgatgaaacgcagcggcggctggcggaggaggttgagcggcggcgcggatag

SEQ ID NO: 422191 - DNA, 960 bp, Serratia marcescens
atggattacaccaaaattatcaaagaaataggccgcggcaaaaaccatgcgcgcgacctggaccggcagaccgcctttgagctgtatcaggcgatgctggccggggcggtccccgagctggagctgggcggcattctgatcgcgctgcgcatcaagggtgaggccgaagaggagatgctgggcttctaccaggcgatgcagcagcaggtgttgccgctgcaagcgccgcaggggcggccgctgccggtagtgctgccgagctataacggcgcgcgcaagcaggccagcctgacgccgctgctggcgttgctgctcgcgaaagtgggcctgccggtggtggtgcatggcgtgctggacgacagcactcgcgtgaccagcgccgagattttccgcgccctggggctgccgtggtcggaacaggccgttcacgcccagcagcgtctcgataacggcgaggcggtattcatgccggtttccacgctgtcggcgccgctggcgcggcagctcgggctgcgttggcgcatgggggtgcgcaacagcgcccatacgctggccaagctggcgacgccgttcggcgaacaggatgcgctgcgcctcgccagcgtctcacacccggagtatgtcggccgggtggcgtcgtttttccgccagatcggcgcccgcgggctgttgatgcacggcaccgaaggcgaagcctacgccaacccgctgcgctgcccgcagattcattatattgccggcggcgaacagcgcgtgttgctggagcgcaccttgcaggatgaaacgccgacgttgccggcggcgaaagacgcggaaaccaccgcgcgctggaccgagcgctgcctggcgggcgaggtggcgatcccgcaggccatccagcggcagatcgcctgttgcctggtggccgctggcgagagcgagacgctggaacaggggctgcagcgcctgcatcaggcctga

SEQ ID NO: 422192 - DNA, 1857 bp, Serratia marcescens
atgcaacaggctctcgattacttcaatcaattgaaccaggattacctcgacgtacaccgcgccaaagaagagctgttctggcaaaactacatgggcaccggcggtgaagaggtgtcggcgcgctttgccgccgcggaaagcgcctataagcgctttatcgccgaaccgcgccggctggcggagatccgcaatctgctggccgggctggaagcgttgccgcagacggcgcagcgcgatgcgctgatccacggcctgcaaggttggctgcgtttcttcgactgcaacgccatcgaagatccgcaggcgcaggcgctgttggatcagatcatccacgccgaatccgatctctacgcgcgccgcaagggctatcaggttacgcacctgaacgccgaaggccggcgggtggcggcctcgctcggcgagctgttgaccaaccaggcgaccaacccgaacgaagactaccgccgcagctcgcagcaggcgctgcgcgatctggagcaatggctgctgcataacggcctgccggaactgattggcctgcgcaaccgctttgcgcgccagatgggctatcgcaactatttcgactacaaggtgaacaaaaccgagcgcatgacgccggagcagctgttcgccattctggatcgcttcgagcgggaaacccgcgaggccaacgcgcgcagcctgcagcagctggcggccgacaagggcagccaggcgctggagccgtggaacgtgcgctttgccagcgccggcgacgtcacccgccaactggatccttacttcccgttttcgcgttcgctggagcgctgggtcgacagcttcaaacgtctgcacatcggctttggcggcgccgagatgaacctcgatctgctggtgcgcaaaggcaagtatgagaacggctttatgcacggcccggtgccgccgtttgtgcgccagggggaatgggtgccggcgcgcatcaacttcaccagcctggcgcagccggggcaggtgggcagcggcgcttacgggctcaacaccctgttccacgagggcggccacgcggcgcatttcgccaacattcgccagaatgcgccgtgcttctcgcaggaattcccaccgacctcgatggcctatgccgaaacccagtcgatgttctgcgacagcctgctggacgacgccgactggttgaaacgctatgcgaaaaacgccgccggcgaagcggtgcccgatgcgctaatcgaagccggtatcgcggcgcgccagccgatgcgcgcgttcaacgaacgccatatcctgctggtaccgtacttcgagtgggcgctgtatcagtgggatgacgagcagcgcacgccggaagccatcaccgcgctggcgcgcgaggtcgagcagaagatcctcggcatcagcggcagcccgcgcccgacgctggcgatcccgcacctgctgtcgctggagtccgcctgctcttatcagggttatctgctggcgatgatggcggtggaacaaacccgccagttcttcctgcagcgcgacggttacctgacggacaacccggccatcggcccggatctggcgcaacactactggttgccgggcaacagcgtcagccatgacgacacgctgcgcagcctgaccggcgaagggttcaacccggactctctggcgcaggcctgtaaccagacggtggcgcaggcgtggcgcgaggcgcagcagacgatggccgccgccgccgcgcgcccgcagccgccggcggatttcgatttggaggcgcatattcgggtggtggacggcgagacggtattggcggacaacgccgacggcgacgaacggatgtgtcgcgatttcgccgcggcgatagaggcgcgtttggtttaa

SEQ ID NO: 422193 - DNA, 636 bp, Serratia marcescens
atgcaacatatcattgaaggtttcctcagtttccagaaagagattttcccgcagcgtaaggaactctttcgcagcctggcctccagccaaaatcccaaagcgctgtttatttcctgttctgacagccgcctggtgcccgagctggtgacgcagcaagagcctgggcaactgttcgttattcgcaacgccggtaacatcgtcccttcctttggcccggagccgggtggggtttctgcgactatcgaatacgcggtagtggcgctgggcgtaactgatatcgtgatttgtggccactcgaactgtggcgccatgaaggctatcgcgtcctgccaatgcctcgatcccatgcctgcggtagcccactggctgcactacgcggatgcggccaaagcggtggtcgagaagaaaacctggaatagcgaaacagacaaagttaacgctatggtggaagagaacgttatcgcccagctaaataatatcaaaacccacccttccgttgcggtgggtctgcgcaacagcgggctgcgcctgcacggctgggtgtacgacatcgaaagcggcgaaattcgtacgctggatagaaacaccaagagcttcgtttccctggccgataatcccgacgtctatttcgaataa

SEQ ID NO: 422194 - DNA, 261 bp, Serratia marcescens
atgaaaaccatcaaaacttttgctgccgctatcgccctggccaccgtttctttcaccactttcgccgctgaacacgtcagcgcccaggatgccgcccaattcgaaaaagccggcgtgatcgtcgccagcggcgcgaccgacctgagcagcctgaagtctcaactggccgccaaagccgatgcggcaggcgccaaggccttcaccatcacttcgaccagcggtaacaacctgatgcacgccaccgcggttatctacaaataa

SEQ ID NO: 422195 - DNA, 630 bp, Serratia marcescens
atgagccgtgaatctcgttattattatgaacccgccgccggccacggcctgccgcacgatccgctgaacgccatcgtcggcccgcgccccatcggctggatctcttcccgcagcgccgccggcttgcgcaatctggcgccctacagctttttcaactgcttcaactaccgtccgcccatcatcggtttcgccagcaccggctggaaagacagcgtggcgaatatcgtggaaaccggcgaattcgtctggaacctggcgacacgcccgctggcggaagcgatgaacaacagttccatccccctgccgcgcggcgaggatgaattcgccttcgccggcgtcacgccgctgcccgggcgccgggtcaaagccgagcgcgtggccgaaagcccggttaacttcgaatgccggctgacccagtgcattcagctgcaaaccgccgccggtgaacaggtggaaacctggctggtattgggcgaggtggtggcggtgcacctcgatccggcgctgctggacgaacacggcgtctaccagaccgccgctgccgaacctattctgcgcgccggcggcccgaccgcctactacggcatttccgaacagcaccgtttcgatttggcgcgcccgacgcgctga

SEQ ID NO: 422196 - DNA, 1050 bp, Serratia marcescens
gtgccgggtttcccgccgctgcgccattgcgggcgggatgtgttatcttacgcgccggaaataccttcaagagagcccgtcacggtggaaaaaaagaaaaccttcccgcagcagaaaagcggcctgcatccgcgcaaccgtcatcgttcacgctatgacttcccggcgctgatcgccagctgcccggcgttggcgccgttcgtaaaaccgaacgcctggggcgatgtgtcggtggacttcgccgatccggcggcggtgaaaatgctcaaccgtgcgttgctgcagcacttttacggcatcgaacactgggatattccggcggactacctgtgcccgccgatccccggccgcgccgattatctgcaccacctggcggatctgctggcgaccagcaacggcggcgagatcccgcgcggcaagggcgtggcgatcctcgacgtcggcgtcggcgccaactgcatttacccgatcgtcggcctgcgcgaatacggctggcgtttcaccgggtctgaaatcgattcggtgtcgctcaacgcggccaaaatgatcgtcgagatgaacccgacgctgcgcaacagcgtgcgtctacggttgcaaaaacagcctgagctgatttttagcggcatcatcggcgcggccgagaaatttgacgccaccctgtgcaacccgccgttccacgcgtccgagcaggaagcgcgcgccagcacccgccgcaagctgcataaattgggcaaaggggaagtggccgacaagccggtgcaaaacttcggcggcaagaacaacgaactgtggtgcgaaggtggcgaagaagccttcgtgcgcaagatggtggaagagagcgtcggcaaggccaacaactgcctgtggttcacttcgctcatctcgaaaaacaccacgctgccggccatttaccatgcgctgaaggtggcgggcacggccgaggtgcgcaccatcgagatggcgcaagggcagaagatcagccgctttgtcgcctggaccttccacgacgccgagcaacaggccgcctgggcagccgaacgctggcgctaa

SEQ ID NO: 422197 - DNA, 3003 bp, Serratia marcescens
atgattcctttagctacgcaacaagaggtcggcgccttaattatcggcattttcgggcgtttgccgacggcggcggaaatcgattactacgacagcgcatttgatatcggcagccagccgcccgcctatatggccagtattttaatgagccaacccgatgccgcttggatgaacggccaaagcgaatacgacattctcagccaggtttatttctccgtttacaataccgctcccgatccggattacatcaatgccttgctgcagcaggggcatttcaacagcgctgtcgccagcgttgtcatcgaactcttcaactatccgggggacgatccggtaatgctggcgcagcgtgatgcgctcgatcagcgcattgcagaaggtttgtatcccggcactgcagccgatgccgccggcggaagcggcgacgcgcaggcgatgttttatctgctgcgagcgccctggcagaccgatgaaattgcccatgacggcaagctgctcaatcaggggggcaatctggcggcgttggcgcagagcaagattgccaccctgccaatcaacgatctttccgatcatgacttcattttgcatctgttcgctcagggatttgaacggccaccgacggctcctgaacttgccacttaccagcaacgactggcggagggcgcgacgcgtggcgatctgctggtggatatgatcgcgcagttgcgcggggtggtggcgccggaagatgctgcggctcaacagcatttcaatgcggcgggccaggaatattcgccgggcgaactgccggcgaccgagtatctggagcaaatagcggcgctgttccgtgcattgcccgagcgggcggtggacagcgcttcgctggacaattggagcaagacgctggcctccggcacgttgagctataccgaattggtcacggcccttctggcgacgccggaatttcaggcgcaggtcggtggtttgcagggcgacgactttattcagcacgtctatcaggcggtgcatggccgggcggcggatgaacagcagctggaacactatcgggcattgggcggcgacaaggcactggtcacgcaggcggtgattgccgatctgatcaatgcgccgccggcaggtgacgttcagtatgaacagtggatgttcgcgcgcgatgtcggcgccagcctggcgtataaaacgaccgcttctctcgccaccagcgagggcggcggcaacgcgtcgggtacggtgaatacgcatgctcaccatacgctgagcaatgcggaaaccgccgtgctgttcagggtattcctgcatgctgacgcggacgtcatggttgacctgagctatgcctcgcagctttcttatctgatcgtcaatggcgacgctgcggcggatatctggctgcataataaccctgccgctcggtatggggtggacatgacggtaaacaatgccaatgtgataatgcatggcacctatggcgacgatcgggtgcagctcacctcgcaggccgacctcgccgccgcccaagggcacttttatctgaacaacggtaatgacagtctgctgtggggaggcaatgccaatggcggcgccaatcatgtggggtgggtgttcagcgccgatggcggtgacgggcacgatattttgtccgccaacctgatcgtcaaaatgacctcgacgctcgatctttttggcgcgcgcatcagtacggtgagcagcaacgccgccaatttcagtcatttcgaacagatagatatggcgggttatatcggccaggcggaagccacgttgacgcaaatcggttggaacggttacagcacgaaagcgctggcgacgagtgctcatgtgtttgactacggggtattgagtggcaacgccaccgtagagggaacggacggcgggacgatcgtacagagctgggcggcgcaggcgcttggccgtgagggattactgttgtccggccgggcggataacgtcaaggtgatcaacgccaatgccgatgcggcacgccttgaaatcagcggcatcggcgatcatgcggacagccggcttgagatagccttccttgagaatgccaccgctcgtttcgacctgttgttatccgggcgcggtaacgccggctcattggcgcttgactcgcatggcgatgaaaacccattgacgctgatcgccgtcaccaccggcgcctggggaaatggcgcgctgacgctgacggggcaaaatgatcaggtgcaagacattacgttgtccggcggcgcgaatttcaacctgacgctgaccgaggggtatactcaggtccgcctggttgacgcttcggccttcgccggtaatgggttcaccctgacgtcctctcatggcggcagcggtgacggcacgatcattcaaatgttggattcgctgccgttaagtggtgacgcgcaggccaaattggcgccgctgctggaagatcttgggctacagggcgaacagctgctggtcaaaggcgggggaggcagcgatcaatttaacgtgctgggagacacgacgatcgtggccggcgcagggaaaagccacgtgacgctgcacagcagcacggcggcgtcaggcgtgacgttaaaagacttttcgctgacgcagggcagcatcgacgatgtgctctcaggcctgcggatcgttcatggtaccggcggcggcgcgctggcagattatggcgtcagcgatgcgcaaggcgtggaggcgagaatcggcgccctgacggccgaacaaggaagcagtgccagccagctgttggccgcgttgctcgatctcggccagcccggcgcgttgagcgccaaggtcggggtcagtagcgttctcggcgggcaaaacagcagctatctcattgtcgataacaatgatgaccaccgtctggatgaagcggacagcgtcatcctgcttttgggacaggatcatcaaagtttgctcaacgaactgcgctatattccggaaatcatgctcaacggcacggtggttgagccggagcctctggtcgcgtaa

SEQ ID NO: 422198 - DNA, 1305 bp, Serratia marcescens
atgctgttacgattcagtcagttaactacccacaaaggcgccgaactgagcgcgatagaacacgccgttccgatgatcgtattctcgcccgatggcacggtattgcgcgccaacgatcttttcctcaacacgctgggatttcaacgcgataacgtgattggccggcatcaccgtattttctgcgatccgaactatgttgccagcccgctataccgcaaacattgggagacgctgaataagggccaacccattacggacaccataaagcgcatcgcgaaaaacggcgaggcggtgtggctgcaaggcacctatgcgccggtgctgaataaacagggtaaggtggtggagatcgtcaagattgccagcgaagtgaccgagcgagtgacccaggcgcaggagcatcgcagcctgctggcggcgctgaatcgatcgatggcgatgatcgctttcacgccgcagggcaccatcgtcagcgctaacgacaatatgctggcgctgatgggctatcggctggaagaggcgtgcgggcagtcgcatgcggtgctgtgcccgccggagttcgccaattccgacgattatcggcggcattggcagcgcctggcgcgcggcgagttcatcaccgggcgttttgagcgcctcaaccggcgcggcgaacgggtatggctggaggccagttacaacccgatcctcgacaacgaaggccaggtggtgaaggtggtgaagattgcccaggacatcacccggctgatgcaacagcagcagcatgaagaagagatggtgcgcaacgcgcatcatctgtcgctcgataccgatcggcaggcggcgcagggcgcgatcatcgtgcagcaggcggtgaaaggcatgcagcaggtcgaagcggcggcgcgcgaaacctcggacgtggtcaccgagctgggcaagtgttctcagcagatcggcaccatcgtcgaagccattcgtaaaatcgcttcccaaaccaacctgctggcgattaacgcctcgatcgaagccgcccacgccggtgagcacgggcgcggttttgcggtggtcgccaacgaagtgcgcacgctggcggaacagtcgcgtaaggcggcgaccgagattgagcgcatgaccaagtctatccagcaaggcgtggcggcggcgattgccggcatggcaacctgcgtagagcaggccggcggcggcgtggcgctgacccacgatgccggggaagtgatcaaccaggtcaacatcggcatgcacgacgtcgtgaaactgatgcaggcgtttacgtcggtgaagcagggcgacgcgctgcactga

SEQ ID NO: 422199 - DNA, 570 bp, Serratia marcescens
atgggaaaccgagaaaagattgtcgaggccgcgctgcacagctttacccataagggatttcaccagaccagcatgcgggatatcgcgcagacggcgggcgtcagcgtcggcaacctctataaccactttaccggcaaggaggcgttgatcggcgagattgcgctgctggaaaacggcgtattcaccgagtttgccgccggattgtgggccgacagaaagcggccgaagcaggctctgtcggccttttttaccgcctatcacgcttttgtcgctgagccggccaatgtgcagttgtcggcggagatcgtggcggaggtggcgcgcaacccggcgttggccgagccgttcggcgctaaccagcggcagctgattgaggcgctggcgacggttatcgccgaggctcagcaaaccggtgagattgcaccggcgatagcgccgttaccgcttgcgcagctggtgttggacgtgatcgaaagtcaggcctggcggcaggcgatctttgcgtcgtccgcgccggaggagaccacgccggtgcggctgttggaacagctgctctaccggcatccctag

SEQ ID NO: 422200 - DNA, 465 bp, Serratia marcescens
gtggtgaagcaggatgaacaggtggtggcggcctttgccctcaatgcggccgctggcgagaacaacgccgggcggcgtccgcatgccttgccgatttggcggctgtgccgccgctatggttggctgaacgtttggcgcatgtatctgcaaatggcggtgttgcggcacaccccggcggccgatgaactgtatctctcttacttggcggtagccgagagtcagcacggcaaaggggtgggcaagcggctgctgcaatggatgaacgactacgctgccgggcaaggcgcgggccggtgcctgagcctgcacgtcagccggcgcaacgtggatgcgctgcgcctgtatcggcgctgcggttttcaggtgcggcgagaagagcattacgctgcgttgggatggctgttcggtcaggccgactgggtgttgatggagagacgctgcggggaggcgacgtgcgcaaaatag

SEQ ID NO: 422201 - DNA, 570 bp, Serratia marcescens
atgccggcggtggcgcgtttgcgccccgacatcgccttcacgctggcgctggcgccggcgatcaactggctgcggcaagggcgttataacacccgggcggcgatggcggcggcaggggatgatgaagcgctgatccaggcgcgcgaggcgcattggcgccacattcagacgctgctcgaacagccggacggctacgcgcagtaccgccgcgagtatggcgccgccgctgcattgagcgccgaccgctggcactttatccgcgctaacatggccagcgacgcgacggcggaattgcggcatttcaccacgccggtgcacctgatcctgggcgggcgcgacgtcaacgtggacgcggacgaaaccgagcgcgtgtatcggcaaacgatcccggcctcactgctgacggtgacgcgcatcgacgaggccgatcatgtgatgatcaaaccgctgttcgcccgccatccgtggctgatcaacgtggttggcctgtttgcgccgcgctcggtgcaatacgacgcctaccgacaggacgtggcggcctttctggccgctcagccctgcgggcgctaa

SEQ ID NO: 422202 - DNA, 2226 bp, Serratia marcescens
atgccgccaaacgcagactcccgacgaggttctcatctgcgagaacacctgcttttcctgctgctgttgctgaccctgaacgtcttcgcgccaccggcgctggcgcaaaacgcgccgcccgcgcccgccgacaagagcgagcagcagaaggccgcctacgccgcgctggccgatctgctgcaagacgacaaagcgcgcgcggcactcatcaaccacctgaaacaggccgccggcgacgcccccgccgccgccccaacaacgccggaggaatcaacgccggccacgctgagcgacagcctgaactcgctggcgcaggagggcatcggcacctttaaccagaagctcggcgcgctgcaaaagctgatcgactccggtccgaagcgcgttttcaatcccgccggctttttccgcgcgctgggttactttctgctgacggtggcggtcacctttgcgctgttccacctgatccggcggctgatcgcgccgttgtacaaacgcatgggcagctgggggcacaacgcgcggctacagcgcggcccgtggtataagcgccccgccgccattctcggcgctttcgccgtcgatctgctggtgctgctgctggcgctggcggcgggcaacctgttcgcccgccacgtccacgccgacagcgccaccattctgcggctgcagaccctgtttctcagcgccttcgcggtgattgagtttttcaaagcggtgctgcggctgattttcgcccccaacttcgactacctgcgccccttccccttcagcgaccagagcgcgcgctactggaacacgcgcctcgcctggctcagcggcctgatcggctacggcctgatggtggtggtgccggtggtggcggtgcagatcagctacccggccgccgccgccgtcaatctggtggtgatgctggcgctgacgctgtacgccatctggctgatcctgcacaaccgcaagccgatacagcaacagatcaacctgctggccgaacggtcgatggcgtttttcagcgcgatcctgcgcggcctggggcatatctggcatctgctggcgatcgcctattttctggtgttgttcgtgctgtcccagttcgacatcggcaacagcctgcgctttatgatgagcgccacggtgaaaagcctgctggtggtcggcgtcggcgctctgctgtccggcatgctgacccgctggattttccgccgcatttcgctgccgaccgacgttaatctgcgctatccgatgctcgagcggcgcatcaactcctacatccccaacgggctgaagatactgcgggtgatggtggtgctggcggtgacgctgttcctgctcgatgcctggcacctgatcaacctgtaccagtgggcgggcagcgaaaatggccagcgaacgctcggcgggctggtgcatatcctgctgatcctgctgatcgccgtcttcagttggacgctgatggccagcatcatcgagcaccgcctggcgttggaactgagcaacggcgtgcggccgagcgcgcgcgaacgcacgctgctgacgctgtttcgcaacgtgctggccatcgttatcagcaccattaccgtgatgatcgtgctgtcgcaggtggggctgaacatcgcgccgctgctggcgggcgccggcgcgctggggctggccatcagcttcggcgcccagacgctggtgaaagacgtgatcaccggcgtgttcatccagttcgaaaacggcatgaacaccggcgaatatgtcaccgtcagcggcatcaccggcaccgtggagcgcatgaccatccgctcgatcggcctgcgcgacgactacggcgtctaccacatcgtgccgtactcctcgatcaccacgctggccaactatgcgcgtgagttcggagtgtatcgcgccaactacaccgtcagccgcgacgaggacatcgatcgggtcaataaggtgctgcatcaggccgtcgctgcgctgaagcaggatgaacaggtgaagcatttcctgattggcgagccggtcttcaacggcgtggtggcgttgggcgaccgctcgttcaccacccgcgtgacggtgcgcacgcaggcgctgaaacagtgggtggtgcaatacgccctcgatcggctggtgaaaatccatttcgatcgggccggcatcggcatgccgcagcaggcgatgcagatctcccgcgcgccgcagccgcacgaagaacaggcgccgccctcggtccccggcggttag

SEQ ID NO: 422203 - DNA, 723 bp, Serratia marcescens
gtgattgaatttaaaaacgtctccaagcattttggccaaacccaggtgctgcataacatcgatttgaagatcgacaaaggcgaagtggtggtgatcatcgggccgtccggctccggcaaatccaccctgctgcgctgcatcaacaagctggaagaggtcaccagcggcgatctgatcgtcgacggcctgaaagccaacgatccgaaagtggacgatcggttgatccgccaggaagccggcatggtgttccagcagttctacctgttcccacacctgacggcgctggaaaacgtcgccttcggcccgatccgcgtgcgcggcgcgaagaagtccgatgcggaaaagctggcgcgcgagctgctggccaaggtcggtctggcggagcgtgcccaccactacccgtccgaactgtcgggcgggcagcagcagcgcgtggcgattgcgcgcgcgctggcggtgaagccgaaaatgatgctgttcgacgagccgacctccgcgctcgatccggaattgcgccacgaagtgctgaaggtgatgcaggatctggccgaggaaggcatgacgatggtcatcgtcacccacgaagtcggctttgccgaaaaagtggcgtcgcgcctgatctttatcgataagggccggattgccgaagacggcaacccgcacgacctgatcaaccatccgccaagcccgcgtctgcaggagttcctgcagcacgtatcctga

SEQ ID NO: 422204 - DNA, 660 bp, Serratia marcescens
atgcagttcgactggagcgccatctggcccgccattcctatcttgttagagggcgccaaaatgaccctgtggatttcggtcctcggtctgattggcggcctgatcatcggcctcgtcgccggctttgcccgcacctacggcggttggatcgccaaccacatcgcgttggtgtttatcgaagtgatccgcggcacgccgatcgtggtgcaggtgatgttcatctacttcgccctgccgatggcgttcaccgatttgcgcatcgatccgttcaccgcggcggtggtgaccatcatgatcaactccggcgcctacattgcggaaatcacccgcggcgcggtgctgtcgattcataacggtttccgcgaggccggcctggcgctcggcctgtcgcgccgcgaaaccatccgctacgtcattatgccgctggcgctgcgccgcatgctgccgccgctgggcaaccagtggatcatcagcatcaaagacacctcgctgttcatcgtgatcggcgtggcggagctgacccgtcagggtcaggaaattattgccggtaacttccgcgcgctggaaatctggagcgccgtggcggttatctatctgattattaccctggtgctgagcttcgtgctgcgtcgtctggaaagaaggatgaaaatcctgtga

SEQ ID NO: 422205 - DNA, 744 bp, Serratia marcescens
atgaagtcgatttttaaagtctccctggccgcactctctctggcctttgccgtaagttcccacgcagcagacaaactggtggtcgccaccgacaccgctttcgttccttttgagttcaaacaaggcgacaaatacgtcggcttcgacatcgacctgtgggccgccgtcgccaaagagctgaagctggactacaccctgaagccaatggacttcggcggcatcattccggcgctgcagaccaaaaacgtcgatctggcgctggccggcatcaccatcaccgatgagcgcaagaaagccatcgacttctccgacggctactacaagagcggcctgctggtgatggtcaacgccgacaacaacagcgtgaaaagcatcgacgatctgaacggcaaagtggtggcggtgaagagcggcaccggctcggtggattacgccaagcagcacatcaaaaccaaggatctgcgtcagttccctaacatcgacaacgcctacatggagctgggcaccaagcgcgccgatgcggtgctgcacgacacgccaaacatcctgtacttcatcaagacggccggcgccggcaaattcaaaaccgtaggcgattcgctggaagcacagcagtatggcatcgccttccctaaaggcagcgacgagctgcgcgagaaggtgaacggcgcgctgaagaccctgcgtgagaacggcacctataacgagatctacaagaagtggttcggcaccgaacctaagtaa

SEQ ID NO: 422206 - DNA, 267 bp, Serratia marcescens
atggccagcggctgggcggcggacggcgccgtacaagatcagattgattccaccgtcgacgatgcggtgcagcgcgcgcgtgaagcgctcgggcacggcgagagcgagcgctattgccaggaatgcggagaaccgatccccgaggcgcgccgcaaggcgttaatcggcgtgcgtttttgcctcgcctgccagaccgaacaagacaaaaaacacgcggccgccagcctgtacaaccggcgcggcagcaaagacagccagttgcgctag

SEQ ID NO: 422207 - DNA, 504 bp, Serratia marcescens
atgagtaccgctaaactggtgaaaacgaaatcttctgatctgctgtatacccgtaacgatctggacgaaaaagtcaaactggccgccatcaaggcgctgaaccatcaggtcgtgcaattcatcgatctttcgttgatcaccaagcaggcgcactggaatatgcgcggcgcaaacttcatcgcggtccatgaaatgctggacggcttccgcaccgccatcatcgagcatcaggacaccttcgccgaacgcgtggtgcaactgggcggcgtggcactgggcaccgtacaggtggttaacgatcggacgccgctgaaaagctatccgaccaatatccacagcgtgcaagagcacctgaaagcgctggccgatcgctacggcgcggtcgcgaatgatatccgtaaagccattaccgaagtggaagacgaagataccgccgacatgttcaccgccgcttcgcgcgatctggacaagttcctgtggttcatcgaatccaacatcgaataa

SEQ ID NO: 422208 - DNA, 555 bp, Serratia marcescens
atgatgaaaattaacgtcgtcggcaccagcggcagcggtaaaagcaccctggcgcgtcaactggcggaacgtcttgacgttccctatatcgagatggacaggctctattggcggcccgagtggcaggggacgcccgatgacgcgttcttggcgcggcttgagcagacgctggccgaagcgggaggaggctgggtgctggacggcaactacagccgcacgcaggcgatcaagtggcgcgaggtcgattatatcctgtggctggactacggcttctgccgcacgctgtggcaggccgtgcgccgcgcgtgccggcgcgcggccagcaaacgcgagctgtggccgggcaccggcaatcgggaaagtttccgccgttctttcttcagccgcgagtcgatcgtgctgtggacgatccgcacttactcgaagaaccggcgaaaatacctggcggagatggcccgtaccgatgcagggcgccgtttcaagcgcttgcgctctccccgccaggccgccgattttctacggacgctgccgcaggttcacagcagcaggcggtga

SEQ ID NO: 422209 - DNA, 468 bp, Serratia marcescens
gtgattcacaacagcctgttcaacccccgcttcggccgcggactcgcgccggcgctggtttcaaccctgaccgagttacgccgatgcgacctgcccgaactggcgctgggccatcacccgatcgacggcgacaacatctttatggacgtgatgacgctgaccaccgtgccggcggcggaaaagcgcgccgaaatgcatcaggagtacatcgcgctgcatctgctgatcagcggcgaagaacgcatcgaatacggcctggcgggcgactggcaccgcgaacatccccacgcggaaaatagcgaccttctgctgctggacatcaaacgccacccgcaaacgctgcacatgacgcacggcatgttcgcgatctttttccagatggaagcgcacaaaaccggctgcctgtggcagcggccgcagcacatcaagaaagcggtagtgaggatccatcaccgcctgctgctgtga

SEQ ID NO: 422210 - DNA, 888 bp, Serratia marcescens
atgtcgttatctacttccggcagagcgccctccgcgcttctgcccatctgtctgttgatcatcgccatggtgtctatccagagcggcgcctcgttggccaaaagcctgttcccgatcgtgggcgccgaaggcattacgacgctgcgccttttcatcggcaccctgattctgttcattatcttccgcccgtggcgtatgcgcatcgtcgccggcagccgcttgccgctgctgatttacggcctgtcgctcggcgcgatgaactacctgttctacctgtcgctgcgcaccgtgccgctcggcatcgccgtggcgctggagtttaccggcccgttggcggtggccatgttctcgtcgcgccggccgatcgactttctttgggtggcgctggcgatcgccgggttatggttcctgttgccgctcggccacggcgtgggcgggatcgatccgttcggtgccgcctgtgcgctcggcgccggcgcctgctgggcggtctatatcatcttcggccagaaggccggcggcgatcacggccccggtacggtggcgctcggctccttgatcgccgcgctggtgttctgcccgatcggcgcctggcaaaccggcagcgtactgttcaacctcgatattctgccggtggcgctggcggtggcgatcctctccaccgcgctgccatattcgctggagatcatcgcgctgcccaaaattccggcgcgcaccttcggcaccttaatgagcctcgaaccggcgatggcggcgctgtccggcatgctgttcctcggcgaacacctgagcggcgtgcaatggctggcgctggcggcgattatcgccgcctccatgggctccgccctgaccattcgccccaagccgcgcctcgaaagcctttcctga

SEQ ID NO: 422211 - DNA, 519 bp, Serratia marcescens
atgaaaaaaattgcatgtctttccgcagtagcagcttgcgtattagcagttagcgcaggtaccgcattcgctggtcagagcaccgtatccgctggctatgcgcagggtgatctccaaggcgttgctaacaaggccgacggtttcaacctgaaataccgttacgagttcgacaacaacccactgggtgtgatcggctccttcacccacctggaaaaaaatcgttctgaaaacggtttctacaagaaatctcagtacgattccatcaccgcaggtccagcttaccgcttcaacgactgggcgagcatctacggtgtgatcggtgttggctacggcaaaaacatcgacaacgcccaggctggtggtaacaaaggtggcaacagcgactacggcttcacctacggtgccggtctgcagttcaacccaatcgaaaacgttgccctggacgttggctacgagcagagccgcatccgcagcgtggacgttggcagctggaacgttggcgtaggctaccgcttctaa

SEQ ID NO: 422212 - DNA, 984 bp, Serratia marcescens
atgaccatctcattgcgcgccgccacggtgcagttccagcatcgcgccaacgataagaattacaacctgtcgatcattgagcgctttatcgctcaggcggccgagcagcaggtacagctgctggccttcccggaaatgtgcatcaccggctattggcacgtgcgccatctgtccgacgtcgaagtgcgggcgctggcggaaccgatcgccgccagcccttcgctggcgcgcattcgcccgctggcggagcgatacaacatggcgatcggcgtcgggctgatcgagctgggcgacgacggccgttgctacaacgcctacgccgtatgcctgccggacggcgcgctgcatgtgcaccgtaaactgcacgccttcgaacacccggctatcgccagcggcgatcgctataccgtattcgacaccccctggggcgtgcgcgtgggcgtattgatctgctgggacaataatctggtggagaatgtgcgcgcaacggcgctgctgggcgcggaggtgttgatggccccgcaccagaccggcggcacccattcgcgcagcccgcacggcatgaagccgatcccacaggcgctgtggcagcggcgggcggaagatccgcaggcgatagaagccgcctttcgcggcgaacacggccgcggctggctgatgcgctggctgccctcgcgcgctcacgacaacgggctgtttttgctgttcagcaacggcgtgggccgcgatgacgatgaggtacgcaccggcaatgcgatgatcctcgatccctacggccgcatcgtggcggagacctgggcggcggaagaccggatggtcagcgccgatctcgatctgacgctgatcccgctcagcaccggccgccgctggatttacggacgccgccccgagctgtacggtttactgaccgaaccgcaaggctatgagcgcgatgcccgcagcgcacgcttttcgacgcagccgacggggcgcggcggccaatga

SEQ ID NO: 422213 - DNA, 873 bp, Serratia marcescens
atggacataaaacaactgcgcgccctggtggcgctggccgagcagggcaactatcgacaggcggcgagccggctgtgcatcagccagccggcgctgagcaagcagattcaggcgctggaaacccagctcggcgttcgattgttcgagcgtggccgacagggcgcggcgctcaccgccggcgggcagcggctctacccggaggtgcaggcgctggtggaacagtaccagcagtttcagcggcgcgcccggcgggtggcgctcggggaagcggggcggctggcgctgggatttggcctctccagctttcatctggcgccgcagctggtggcggcttttcgccaacggtttcccgaggtggcgatcggcctggaggacatcccgtcggagcggcagtatcagttgctgttacagggggagttgcaggcggggttcgtgcgtttgccggtcaatacgccgctgtgcggcgtggcaatgctgagtgaccggttggtgctggccgcgccgggcgcgctggcgctgcgcgccgacgatctgatggcgcgtttcaatcagctgccgctgttgcagttgactccgaagcgcgggcgcgggctgagcgatcagtcgctgcggtttatcgccgctcaccgcttgacgccgaacgtggtgcagcaggccggcgatattcagacgctgttggcgctggtcgccgccggcgtcggcgttgcgctgctgccgcacagcatcacgcatatcgcgccggccggcatcgacattttaccgctgagcggcgaggaaacggagtggcaggtcggtatcgcctgggacccgcagcgcgccgacgcgctgcgggacaactttgttcagacggcgttggcgatgcaacgcggttag

SEQ ID NO: 422214 - DNA, 531 bp, Serratia marcescens
atgaccgtaatcaacaccgcgccaacgcttgtcaccgaacgcctgcggctggacgcgcacaggctggacgacttcgagtcgctggccgcattgtgggccgatccgctggtggtacgctatatcggcggcacgccgcgcgaccgggaagactcctgggggcgcctgatgcgctacgctggccactgggcgctgttggggtatggaaattgggcggtgcgtgacaaacagagcggcgagtacctcggcagcatcggcttcttcgacggcctgcgcgatatcaccccggcgctcgacgcgccggaaatgggctggacgctggtgagttctgcgcacggcaaaggctacgccaccgaggcactgcgggcggcgctggcctggggtaaaacgcacctgccgggggagaaaaccgtctgcatcatctcgccggaaaaccaggcttcgctggcgctggcgaaaaaagtcggctttagcgaaagccgccgcagcgagtatcaccagagcccgatcgtcgtgatgcattgcccgctctaa

SEQ ID NO: 422215 - DNA, 1371 bp, Serratia marcescens
atgtctacctctctgctgttgctgattgccgttctcggcgtggtgctgctgttattgatggtcatcaaggcgaaggtgcaaccctttgtcgcgctgttggtggtcagtctgctggtggcgttggccagcggcattccgaccggtgaagtaatgaaagtgatgaccgccgggatgggcggcgtgctcggctcggtgaccatcatcatcggcctgggggcgatgcttggccgcatgatcgaacactcgggcggcgccgagtcgctggcgcagcgcttcagccaagggctggggccgaaacgcaccgtcgccgcgctgaccctcgccgcgtttatcctcggcattccggtgttcttcgacgtcggctttatcattctggcgccgattatctacggcttcgccaaggtcgccaaagtgtcgccgctgaagttcggcctgccgatggccggcgtgatgttgacggtccacgtcgcgctgccgccgcaccccggcccggtggccgccgccggtttgctcaacgccgacatcggttggctgaccatcatcggcctcgcgatctgtattccggtcggcgcgatcggctatttcgccgccaactacctcaaccgcaaaacctatccgttatcgatagaggtgctggaacagctgcagctggcggcgccggaaccgcgtccggaagggcaagcgccgctcagcgatcgcatcaacccgcccggcgccgggctggtggcagcgctgatcgtcatcccgatcgccatcatcatgctcggcaccgtctccgccacgctgttgcctgccggctcggcgctgcgcgatacgctgtcgctgctgggctcgccggcggtggcgctgatgatcgccctgctgctggccttctacttcctggcgctgcgccgcggctggagcctgcaacacgccagcgatgtgatgggcgctgcgctgccgaccgctgcggtggtgatcctggtgaccggcgcgggcggcgtgttcggcaaggtgctggtggaatccggcgtcggcaaggcgctggcggaggtgctgacggccatcggcctgccgctggtgcccgccgcctttatcatttcgctggcgctgcgcgcttcgcagggatccgccaccgtggcgatcctgaccaccggcggcctgttgtcggaggcggtcagcggcttgaatcagctgcagctggtgctggtgacgctggcgacctgtttcggcgggctggggctttcccacgtcaacgactccggtttttggatcgtcacgcgctatctggggctgtcagtggccgacggcctgaaaacctggacggtgctgaccaccctgctcggcctgagcggctttctgttcacctggctgttgtggctggcggtgtga

SEQ ID NO: 422216 - DNA, 777 bp, Serratia marcescens
atgcctaaatttgccgccaatttatcgatgatgtttaacgaagtgccgttcctcgagcgcttcgccgccgctgccaaacaaggcttcaacgcggtggagttcctgttcccttacgagcatcccgccgagctgttggcggaaaaactgcgcaaacacggcctgcaacaggtgctgttcaacaccgcgcccggcgatgtcgccgccggcgaatgggggctggcggcgctgccgggccgcgagcaggatgctcgcgccgatatcgatcgcgcgctggcctacgccatcgccctcgcctgcccctgcgtgcacctgatggccggcgtggtacccgcgggcgcggaccggcagcgttatctcgacacctttatcgccaatgcgcgctatgccgccgacgccttcgccccgcacggcgtcaaggtgctgatcgaagcgctcagcccaccggtcaaacccgactacctgttcgccagtcaacatcaggcggcggaggcggtggcggctatcgagagaccgaacgtgttcattcagttcgactttttccacgcgcagttagtggatggcaatatcagcgggttgctggaaacgctggccgggcgctacgcgcatatccagatagcctcggtgccggatcgccatgagccggatgacggcgaactgaattacccgtggctgttcgacaagttggatgcgctcggttatcaaggctgggtaggttgcgaataccggccgcgcggcgacaccgccgccgggctcggctggctgaaaccttaccgctaa

SEQ ID NO: 422217 - DNA, 633 bp, Serratia marcescens
atgaccacgaccatcgaacagcaggcacgagaagagatggtgcgcctgggcgcctcgtttttccaacgcggttacgccaccggctcggccggcaacctctcgctgttgctgccggacggcgcgctgctggcgacgccgaccggctcctgtctcggcgagctgcaggccgaccgcctgtctaaagtgagcctgaacggcgactggctgtccggcgacaagccgtcgaaagagatcagctttcaccgcgcgctgtatctgaacaacccggaatgcaaagcggtggtgcacctgcattgcacctacctcacggcgctctcttgcctgcaggggctggacgtcgacaacgccatcaaaccgttcaccccctatgtggtgatgcgcgtcggcaaggtgccggtggtgccctactatcgccccggcgacgaaaggctggcgcaggatctggcccgcctggcgcccacccaccgcgcctttttgctggccaaccacgggccggtggtgacgggtaaagacctgcgagcggcggcggacaataccgaagagatggaagatgcggcgcggctgatcttcaccctcggcgatcgtccgatccgctatttgaccgatgatgaaattgccgaattacggagctga

SEQ ID NO: 422218 - DNA, 1260 bp, Serratia marcescens
atgctgctcggcgtaatcgcggatgattttaccggcgcgaccgatatcgccagttttctggtgcaaaacggcctgccgacggtgcagttgaacggcgtgccgcaagacgaaacgccggtcagcgcgcaggcggcggtcatcagcctgaaatcgcgctcctgcccggcagagcaggcggtcgaactgtcgttgcaggcgctggcctggctgcaaaaacagggctgccgccagttctacttcaaatactgctccactttcgacagcaccgcgcagggcaatatcggcccggtgaccgacgccctgctcgccgcgctgggggaaagtttcactgtggtatctccggcgttgccgataaacggccgcacggtctatcagggccacctgttcgtcggggaacagctgctgtccgaatccggcatgcgtcatcacccggtcacgccgatgaccgacagcaacctgctgcgcctgatggaatcccaggccaccgggcgctgcgggctggtgacggcggcggaaatggatcgcggcgccggggcgatcagcgagaaactgcggcaattggcgcaggaaggcgtgcgctacgcggtgctggatacgctcaacgaacggcatctgctcagccagggcgaagcgttgaaaacgatgaagctagtgaccggcggttcgggcctggcgatcggcctggcgcggcagtgggcgcagaacggcgagcgttcggcagaggcggccggcgcgccgcagggcgagaaagcggcggtgctgtccggttcttgctccgtcatgactaaccggcaggtggcgcactactgcgaacgcgcggcggcgcaggccatcgatatcggccgctgtctcgatccgcaggcgcgcgccgcctacgccgccgagctggcgcattgggcgcagcgtcacgccggggaggcgcttgccccgctgatctacgccaccgcagcgccggaagcgctgcagcaaacgcaacggcagtacggtagcgccgccagcgaggcggtggaggcgttgttcgccgagctggtggtgcaactgcgccagttgggattcagccgctttatcgtcgccggcggcgaaacctccggcgtggtcacgcaggcgctgggcattcgcggcttccatatcggccctagcatttcccccggcgttccctgggtgcgcgccagcgatcgggccatttccctggcattgaaatcaggcaattttggcgatgaagccttcttcacgcgcgcgcaaacggagtttccagtatga

SEQ ID NO: 422219 - DNA, 915 bp, Serratia marcescens
atgacacacccagggaattatgccgtctgcgtcattgggctgggcgcgatgggcatgggcgcggcgcgctcgtgcctccgcgccggattgaccacctacggggcggacctgaatccgcaggcgctggcggcgctgcaacaggccggcgcaaaacacgcgtctaccagcgcgcgcgatttcgccgccgaactggacgccgtgctgctgctggtggtgaacgccgcccaggtgaagcagatcctgttcggcgaacaaggcctggcgccaaagctcaagccgggcaccgcggtgatggtctcttcgaccatttccgccgatgacgccaaacagatcgagcaacggctgctggactacgggctgccgatgctggatgcgccggtttccggcggagcggccaaggcggaggaaggccagatgacggtgatggccgccggcgccgacgccaccttcgagcgcctgcaacccgtgctggacgccatcgccggcaaggtttaccgcatcggcgaggcgatcggcctgggcgcgacggttaaaatcatccaccagctgttggccggggtacacatcgccgccggagcggaagccatggcgctggccgcccgcgccggcatcccgctggacgtgatgtacgacgtggtcacccacgccgccggcaactcctggatgttcgaaaatcgcatgcgccacgtggtcgacggcgactatgcgcccaaatcggcggtggatatcttcgtcaaggatctggggctggtggccgataccgccaaggcgctgcacttcccgctgccgctggcctccaccgccttcaccatgtttaccgccgccagcaacgccggttacggtaaagaagacgacagtgcggtaatcaaaatctttgccggcatcgatttgccgcagaaaaaggaggcaatctga

SEQ ID NO: 422220 - DNA, 771 bp, Serratia marcescens
gtgatacctgtagaacgccatcaacaaattcttgcgctggtatccgaacgcggcgtcgtcagcattgccgagctgaccgaacggctgggggtgtcgcatatgacgatccgccgcgatttgcaaaagctggaggaacagggcgcggtgcagtcggtctcgggcggcgtgcaggcgcccgagcgggtggcgagcgaaccttcgcatcaggccaaagaggggatgttcagccggcagaaaatcgccatcggccggctggcggcgcggcaaattcccgccaatagctgtatttatctggatgccggcaccaccacgctggcgctggcgaagcagatcggtgaacgtgacgatttgacggtggtgaccaacgactttgtcatcgccggcttcctgatcgaacacagccagtgcagaatcatccacaccggcggcaccgtgtgccgggaaaaccgctcctgcgtcggcgaagcggcggcgcaggcgctgcgcggtctgtttatcgatctggcgtttatctccgcctcttcgtggagcatgcgcggcctgtcgacgccgaacgaagacaaggtgatggtaaagaaggccatcgtcgaggccagccgccgctgcattctgctcagcgacacctcgaaatacggcaagatcgcgacctacctggctctgccgatcgccgcctttgacgccgtcattaccgacgaggggctgcccgccgccgcgcgggaggcaatcgagcaagcggggcttgcgttgctgacggcaggggaagaagagtaa

SEQ ID NO: 422221 - DNA, 195 bp, Serratia marcescens
atgtcatcgaaatcccgcataacccccataacaccccatacttaccagcagcacgttaaggaacaacgcctgaaagagatgcaagccttccacgaagagtggtgggaacaaaggcgccgcgaatggcgtgaacgcggcggcgttgaagcaagtgaaccgcccgcatgtggcatcgataccgaactttcatcctga

SEQ ID NO: 422222 - DNA, 768 bp, Serratia marcescens
atgaatgagaaaaagccgcgggcaaccgcgccaaaactggaaccggaccaaaaaaagcagctggtcaatctgcagcgccgcctgatgctgcgctccggcctgacgctgggcggcatcgccatgctcaccggttgcaacctgcaagacggcgatcgggtggataaggtgctgtgggccatgtcgcgctggaacgaccgggtgcaggcctggctgttcagcggccagcggctggcgcaaacttaccggcccgatcagattacccagcctttccccttcaacgcgttttacccggaatacaacgtccccgagatcgatctggccggctaccggcttgaggtcgcggggaaagtggagaaaaaagcgccctggacgctggaacagctgcaacggctgccgcagcaaagccagatcacgcgtctgatctgcattgagggctggagcgccatcggccaatggggcggcgtgccgctgcgcacctttctgcagcacgtcggggcggatctgaatgccggttacgtcggcttcaaatgcgccgatcgctactactccagcctcgacatggccaccgcgctgcacccgcagaccattctggcgctggatttcggcggcaaggcgctgccggcggactatggctacccgctgcggctgcgggtgcccaccaagctggggttcaaaaacgccaaacatatcgccgccatcttcgtcagcgacgtcaatccgggcggctattgggaagatcagggctacaactggttcagcggcatttag

SEQ ID NO: 422223 - DNA, 606 bp, Serratia marcescens
atgaaacccaacgcgtcgcggccggtgcatcgctggccggttcgaatcactcattggatcaacctgttcgccatggtgtgcatgtttatgagcggctgggagatctataacgcctcgccgctgttcgatttccgctttccgccgcagatgacgctgggcggttggctgggcggcgcgattggttggcatttggcggtgatgtggctattggcgctcaacgccacctgctatctgctgtggagcctgttcagcggccattttcgccgcgatctgttgccgcttcgcgtcggcgcgctgcggcaggatatctggctggcgttgacgctgcgcctgcgccaccggcatggccactacaacgccattcagaagctgatgtatctcggcgtgctggcgctgggcctattgctggtgctgtccggcctggcgatttggaagccggttcagctgcagggattggtcgccctgtttggcggcttcgatttcgcgcgctacgtgcatttcttcgccatggtcggcatcggcctgttcgtggcgatccacgtctttatggtgatcgtcgtgcccaaaacgctgtgggcgatgataacgggtggcaaacatgaatga

SEQ ID NO: 422224 - DNA, 627 bp, Serratia marcescens
atgattacccgtcatcgtatagccggtttactgttgtccaccttgctgctgtccagcggcctggccgccgccgcccaaacgccgggcaaggttatcgcgccgctgcgcggcaccatcagccaggtggccgacggcaatctgcagctgaccgatcgcaagggtgagacgctcagcgtcaagctgaacgatcagaccaaagtgctcagcgtttccaaggccacgctggacgacatcaaaccggacagctttatcggcaccgccgccgtgccgcagccggacggcacgctcaaagcgctggaggtgcacgtgttcgccgccagcctgcgcggcaccggcgaagggcactcggcctgggaatccgccgacggcaaagtagacaccatgaccaacggcaccgtcggcaaactggtgaaatccaacggccgcaccctgaccgtcacctacggcaaccagcagaaaaccgtcgtcgtgccggaagacgtgccaatcgtgacgctggatccgggcgatttgagcctgctgaaaccgggcgtgcacatcgtgctgttctccgccgccaacgataagggcgagcgcgtcgccacccgcatatccgccggcaaagacggcaccgtgccgccgatgtaa

SEQ ID NO: 422225 - DNA, 672 bp, Serratia marcescens
atgcgaatactggtagttgaagacgatatcggcacaggggattacctgaagaaagggctgagcgaggcggggtacggcgtcgatttggcgcgcaccggcaccgacgggttgtttcgcgcgttggagcaagactacgatgcgatcgtgctcgacgtgatgctgccggggctggacggttggcagatcatcgaggtgctgcgcaagaaaagcgacgtgccgattctgtttctcaccgctcgcgacggcgtgcaggatcgcatccacggtctggagctgggcgcggacgattatctgattaaaccgttttcgttcaccgaactggtgctgcgtttacgcaccttgctgcgccgtgggccggcgcgcgaagccgatcattacgccatcgccgatctgcagctggacgtgctgcgccgccgggcggtgcgtcaggaacaggtgatcccgttgaccaacaaggagttcatgctgctgcacctgctggtgcggcgcgagggcgaagtgctgtcgcgcacgcagatcgcctctcaggtgtgggacatgaattttgacagcgacaccaatgtggttgacgtggcgatcaaacgcctgcgcgccaaaatagaccggccgttcgacgtcaagctgatccacagcgtgcgcggcatcggctatgtctgcgagccacgctcgtga

SEQ ID NO: 422226 - DNA, 1422 bp, Serratia marcescens
gtgaacgggcgcacttcacgtcggccggtgtcgctgacgctgcgcaccgccacgctgttcgcgctggtggccgctttggtggtgagcgggacgggcgggtatctgtatagcgccatgcgccaggaaatgacgctgcgcagcgatctgcaggtgaccgggcgcgtagagtatttccgccatttgctgggacagcgctttcctttggcgcgcctgaccgccaataacggcctgtttgaaaacatgctgggcaatgaacaggacgtgctgattttccaaattccggggcaaaaaccgctcatcaacgtgaacccggccggggtggcattgccgccgatcgcgccgacgccggccggccaggcgcagacgttggccgccgtgcgcggcggggaaacggcgcagggggtgccgctgcgcgcggcgtcggcgatggtgcgcctggaagacggcagcctgttgcagatctccgccgcgcatgtgatggtcaacgagcagaagatgctggcgcgttacctgtggcgcatcgtcgcggcggtggcggtggctttcctgctgattgcgctgctggggtatggggttatgcgccggggattgaagccgttatggcgcatggcggcgcaggcgtcgcagattgcgcccaatacgctgtcgacgcgcctcagcgagcagggagcgccgaaggaattgcagcagttgacccgttcgttcaatgcgatgctcgatcggttgaatgaaggctatcagcgcctgacgcagttttccgccgatctggcccatgagatccgcaccccgataggggcgctgatgggccagtgccaggtggcgctttaccagccccgcagcgtggaggagtacgaaaccctgctgtcgaacaatatggatgagctggagcgcatttcccgcatggtggaaaacatcctgtttctggcgcgcgccggggaggcgcagtctgcgctgaactacggccgtctggatgtggcgctggaactgcggcgggtggcggattacttcgaagggctggcggaagaacgcggcatcgcgctgagctgcgaaggggaaggcgagttgaaggcggacgcgatgttgttccagcgggcgctgagcaacctggtggccaacgcggtgcgctatgccgatgaaaacagcctgatcgcgttgcgggctgaatggcgcgccgatgcctggtgggtgcaggttatcaatcaggggccgccgatcgcgccggcacagctggaaaaattgttcgatcgtttctaccgcgccgatcccgcgcgcagcgccggcaatcatgccagtgggctggggctgtctatcgtgcgcgccatcatgacgctgcacggcggtgaggtgcgcgcgcagtgttccgctggccaggatgctgcttgcttgacctttagcctgatattcccttcatcagttcaatga

SEQ ID NO: 422227 - DNA, 840 bp, Serratia marcescens
atgaaatatagatttaatgaccatattctctttgacgcagacaccagaacccttagcccaactgatttttctgacgatcccatatccatatccagtccttccaagcggttgttgctgctgctgattgcccaccatggcgaggccgtggggcgtgaattgatattcaagaaggtctgggacgattacggcatggtttccagcaataataatcttaatcagtgcgtcagcaaattacgccgggtgattaaaaatctgggcgtcgaagaagaggttattgtcactgtccctaaagtgggttttatgctgcgtgatgagattaccatcgagtcttatgaggaagcggaagatagacacgatgcagaacccgccgcctctttgccggagcctgcgcccgaagcggcgataaacccgccatccgcaaccgtcatcaaccgggccacctcttttttcggtgattcccgccgcggctggctgatgatctgtgcattggtcctggggggcatcctcatggccattgctgtcaccgcctatttcagcggctcggaggcccggcaggagagctacctgggaaagtccggcaattgtaaggttttcatgtccttgcctgccgcctcggcgtcggtcaacgccagcctgaatcgggacattctggcttacgccgctcaccaaacgggagaatgcagcggcgatgagtttttgctggtggtgcgcagcaatcaggtcagggcttacatttccggcatttcccgcttattcctgctgcgctgcaagattttgcgtgaacataaaatggagatctgttccggtttggaaagcgacaatgccgagtttattaattga

SEQ ID NO: 422228 - DNA, 630 bp, Serratia marcescens
atggttaaagccgatttcggtgatgcgctgctattttttgaacccagctatttagtgagaacaggaatggaagcatttctcgttacccgatcaagtgacaggtattttatcgatgccttgagcgagctggagggagcattgaaaggagggaagccgcgcgcgcttattatggagttatatcatcagaacgaatatttgtatgatgtattgcggttcgttctgacggcaaaaaatgtctggccggaaattcccttggtgattttcaccgcggtagaacaccccggtatattagcgctgttagcgacggatgcgcgcatagctatagtggcaaaggaggagcctttgcattgcctgcgtgatgccattgcggctgcgggggagttctccggctatcgttccccgcatattcgtgcccggttggcccattcgcctgtcgcattatctgacggtgaatggcgagttttggccatgatggctgccggcgcatctccacgaagtattgccaacctgacccggcgaagttacaaaaccatcagctcccataaactgaatattatgcgaaaactgagcctcaatcaggccggttttatgcggcttattcttaccctgagaacccgctatccttcctga

SEQ ID NO: 422229 - DNA, 588 bp, Serratia marcescens
atgaagaaaatgacactggctctggcgatcgtttccgcctttgcagcggtcagcactgctcaagccgccgacgttaccgctcaggcgttggcaacctggtctgcgaccgccaagaaagacaccaccagcaaactggttgtgacgccgattggcagcctgaccttcaactatgcagaaggcattaagggtttcaacagtcagaaaggcctgtttgacgtcaccgtggaaggcgataccacggccaccgctttcaaactgacctcaaaactggtctccaatacgctgactcagctggatacttccggttctacgctggaagtcggggtgaactacaacggtgctgcggtagagaaaacggctgaaaccaccatgatcgacaccaccgccggcattttgggcggcaatctgagcgccctgtccaacgcctataaccaggccggccgcaccagcgcgcaggatcaattcaccttcagcatcatcggcgcgacgtcaaacggcaccaccgccgttacggatttcagcacgttgccggaaggtatctggagcggcgacgtcagcgtcgagttcaacgcgacctggacttcctaa

SEQ ID NO: 422230 - DNA, 669 bp, Serratia marcescens
atgacacgcttttctctcgccgtcaccctgatgttaatgctgctgcggccggctttggctctcgatgtgggtgagatcagctccttcatgcctggcgacagcgcgcgcctgagcaaggaaatcaaaaacaccaccgacagcggccggctggtgaacatcaagatcgaacgcatttccagccccctggcctccggtacggcgatcccgatgagcagccgggatgaaatgctgctgtcgcccgccagcctgatcttgccggccaacgccagcgacgtgatccgcttttactacaagggaccgaacgatgctcaggagcgctactaccgcatcgtttggttcgatcaggcgctgagcgaggcggggcaaaactcggatcggcgtaatgccgtggccaccacgtcggcgcgcatcggcaccattttggtggtggcgcctcggcaggatcgcttcgcctatcagttcgccaacggacggatcaaaaacaccggcaacgccacgttcaaagtggtggcctacggcaattgtaggaacaagcaagacggcagcgactgcaaggagaactatttcgtgatgccgggcaaggatcgcgccttcagcaaggttgacgtcaacgacaaaaaagggcgcgtcgcgctgtggcacggcgaacagtttatcccggtgaagtaa

SEQ ID NO: 422231 - DNA, 2520 bp, Serratia marcescens
gtgaacgctgtgctgttgaaaacgcttttggctgccggtgcgctggcgctgccgacgctgttgcctggccgtatggcgatggcggccggtttgacgcagtttaacggcgtgctgatcccgcaaaccttcagcctggcgttgcgcgaggggatgagtattccgctgttgttgcattatgaaaagagcgatggcgtcaaagacgacagccgcatcggccatgcctttctctacctggatcaggacaggctaacgattcgtcgggtgacgctggaggataacgacgacggcgcccggctgacggcggcgatagccggccagctgcaggctttgcaggatgcgccattcgatcggcagcagcatatccggatcgcggacgacgcttggctggcgctggatttccggcagctcaacctgcagctggtggtgaaggaatccgcgctcggaacggtgctgcgcgcccgctccagcgacatcggcgcgtccagcgtggatgccgtaagcagcacgctggattataacctcggagtctacgataaccgggcccgcgccagcgaaggcaatacctccagttatttatcgctcaacagcgttaccgcattgcgtgaacaccacgtggagttgaacggttccatctacggtatcggcagcggcgatgaaaacgccacgctgtacaaagcgatgtacgagcgtgatttcgccggccgccgtttcgccgccggcatgctggacagctggaatctgcagtcgctggggccggtcaccaccatcaactcgagcaagatttatggtctgtcctacggcaaccgcgccaactcgacggtattcgataattcccaatcgctgacgccgatcgtggtttttttcccctcggccggcgaggtgcatttgtcgcgcgatgggcggctgctcagcgtgcaaaacttcacgatgggcaaccatgaagtggacaccggcagcctgccctacggcatttatgacgtcgaggtggagatcgtggtcaacggcaaagtggtggataaacgcatgcagcgagtgaataaactgttcagccccaatcgcggcgccaatgcgccgctggcctggcaattttggggcgggatgctgcgcatggacgactggcgcggcgagcgagagcgccaccgcccggcaaaggactcttatttgcttggcgcttcggctaccggcaatctgcacacgctgaattgggcgctgtcggggtattcgtttgacggcaacgccgtcggcgagagccgtgtcagcctgccggtgaccgagtcgattcagatcaacctgcaaaacatggcggcctccgatcgctcctggagcctggtcaatagcgtcagcgccgcgttgcccggcggcttcagcagcgtatggatcaatcaggagaaaacgcagattggcgatcgtctgttgcaaaatgacgcctataaccgcgccgttggcggcagccttaatctgggggcgctgtggtctccgctgggcaccctgagcgccagctacaacgacgataagaagaacgacagtcactattacaacgccgactattaccagaacatctttaccggccgcttcggcacgctgggcgtgcgggcgggcgtgcaacgctacaacaacggcagcagcagcgccaataccggcaagtacatcgcgctcgatttttcgctgccgatgggcaactggctcagcgccggcgtttccaaccagaacggctacaccaccgccaacctggcggcgcgcaaggacatcaaggacgggccgatccgcaccctgggcgccaacctgtcgcgggcgatttccggtgatacccgcggcgacaaccgtttcaacggtggtggctatgcgcgcttcgacaccaagtattctgccggcacgctcaacgtcagcagctccgccgacggctatgttaacagcagcctgaccgcgagcggcagcatgggctggcaagggcgtgatattgccatcagcggccgcaacgaaggcaacgccgggattatcttcaataccggcattgaaaacgacggcctgctgaccgcacgggttgacggccggatggtgaagctgagcggcaataagaattacctgcctttgtcgccttacggtcagtacgacgttgagctgatgaacaacaaaaactcggcggagagcttcgacatcgtcaccaagcgcaagagcaggctcaccctgtatccgggcaacgtggcggtgatctcgccggagataaaacagatggtgacggtgttcggccgcatcaaggcggaggacggcacgctgctggccaacgcctatatcaagaatcatatcggccgcacccgcaccgatgagaaaggcgaatttatcatggacgtcgacaagaaattcccggttatcgattttacccacagcggcaatcagacatgcgaagtggatttggatctcagcaaggcgcaaggcgcggtgtgggtcggcgacgtgatctgcaccgggctgaaaacctatgcgggcaatctgtcatccggggagtctgaccatgagagctaa

SEQ ID NO: 422232 - DNA, 1635 bp, Serratia marcescens
atgagagctaacgttgcgctgttgttgttggcgctggtcgcccccgcgctgcaggcggcggtcagccagaccaactggccggatgcggcggtaatgaaatttgtcttcgtggagaacaacgccgacgacaactttttcgttacgccggccggcgggctggatccgcgcatgaccggcgccaacaagtggaccgggctgaaatacggcggttccggcactatctatcagcagagcctggggtacgtggacaatggttacaacacggggctgaatgccaactggcgctatgacatgtggctggaaaatgcgccgataaagaatccgttcctcggcttgcgttgcatcaactggtatgccggttgcaatatggataccagcttgattctgccgcagaccaccgacgaaaagggattttacggcgccgtggtcacgcccggcggcgcaaaatggatgcacggcatgatgtcgccgagcttctatcagtatctgaagcagatggcggcgggtgacgctttcagcatgcagatcaacggttgccaaacgtcggtggcttacgacgccgcggccggcggccgctgccaggatcaggccagcggcagctggtacaagcgcaccgtcacgcacagcaaggcggcgcacctgcgctttatcaataccaacgccgtatcggaggtgttcgtcaacagcgatggggtgccgatcatcggcgagggcaatgccgattgcaagaaccagactatcggcgcccgctcgggcatcatgtgcaagatggtcagctatgatttgcagaccgacggcagcgtcagcaatacctcgattcatgttttcccggcgattaaccatgcggcgctgtcatccgcggtgaacgccgccgacctgcagttcagtctgaacggcaacacctggaaaaacacgtcgggcaccggcagctactatacctttaacgaactgaagagcagcaatgccgtctatgtgttcttctccagtaacttcttcaaacagatggttgcgctggggatttccgacagcggcacccgcgatctgatcaatttccgttttcagaacaccacctcgccggagtcgggatggtatgagttttccacctcaaaccagctgattatcaagccgcgcgatttcagcatcagcattatttccgatgattacgacaacagccctcatcgtgaaggttatgtcggcccgacggagccggcgctggagttcggctacctggtgactaccagcggcaaaaccgccgccgatcaggtgagggtgatggcgaccgggccgactcgggcgatcaacggggtgaactattgcctcttttcttccgcggataacagtacccaggtgccgtttcccgccaccctcggcatcaccaccagcaccaacggccagcagagcttcgccgccggctgcgatggccagtggcacgacatgaccaatgcgctctggagcagcaccccgtggaatgatatttccggcgaagtgggggtgctgaacaagacccgcgtgacctttagtattccgatgaataatccgatctcgctgagaaccgtcgacggcaacggttggtacggcgacgtcagcgccgccggtgaaattcatgtcgaagccacctggcgcaacatcaattga

SEQ ID NO: 422233 - DNA, 660 bp, Serratia marcescens
atgctgatagggttgctgtgtttgtccttcccctttaccgccgctgcaatcaatgtcggcaccctgacgtttgccatggatcaggatcgctcattcaccgccaagcgggtgttgaataacaaccgcagcgcgcgcctgtatcaggtgagcattcgcgccatcgatcggccgggagagcgcgaggtgcgcagccggccggcggatggcgaactgctgttcgcgccgcgccagctgactctgcaggccgggcaggcggagtactacaagtttttctaccgcgggccgcaggataatcgcgagcgttattaccgggtgtcatttcgcgaagtgccgacccgattgttcgagccggggccgcgtcggggcgccggggtcaacctggagccgatcgtggtgatggacaccattctggtggtgcgcccgcgtcaggtaaactttgcctatcggctcgatacccagcgcggtacgctcaccaacaccggcaacacctacttcaagttcctgctcaagccgggctgcaacagcacggatgaagagggcgtcaccgaatacctgcgccccggcgatacgctgacccatgccggtattcggctgaaggggcagaaattcattatctataacgacaaatttatcagcgtcgatcgcagctgcctcgattaa

SEQ ID NO: 422234 - DNA, 1467 bp, Serratia marcescens
atgaaaaaccttacgttagcgcaacgcctcacgctgatcttcgcgctgctgatcgtcatcggctgcgccttttccggctggatgcaggtgcgcagcagcacccagtacagccaggcggtgatccagcgcctgtccggcaacctggcgcagcatattgccgacagcaacccgctgctgggggtgaacgggccggatccgcaggcggtgcataccctgttcgatcagctgatggcggtgaatcccagcgttgaggtttacctgctcgacaaacagggcacgattatcggcaacgccgcgccggccgggcatctgaagcggcagcgggtcgcgctgccgccgctgcaggcgctgctcggtggcgcgccgatgccggtgtatggcgacgatccgcgcagcgcggacgggcgcaaggtgttcagcgtcgcgccgctaaaggttgatggccggatcgaaggctatctgtacgtggtgctgctcggcgaagagtacacggcgctggccagcaacgcccagttcaactcggcggtcaggatggcgctgtggacctccgggctgatggtgctgttcagcctgctggccggcggtttggcgttttattgggtgacgcgccctatccgtcgcctgacccggcaggtcagcgcgctggacagcggcggcatcgaggcggtgcaggcctacgcatcgctgccggcggtcagggccgggcgcgacgaagtcagccagctgcagcaggccttccaccgcatggcgcagcgccttgccgaacagtggcaaacgctggcgcagcaggatcggctgcggcgcgagttcatcgccaacgtctcgcacgatctgcgcaccccgctcacctcgctgcacggctatctggagacgctgtcggtcaaagccgccaccctgagcgaagccgatcggcagcgctacctggagatcgcgctggcgcagagccgcaaggtgggcaagctggcgcaggagctgttcgagctggcgcggctggagtatggcgtggtgaaaccgcagaaagagcccttctccctcagcgagctgttgcaggacgtgttccaaaagttcgagctggcggcggaggcgcgcaaccagcggctgcacgccgacatcgcccccggcattccgccggtgttcgccgatctcagcatgattgagcgggtgctgaccaacctgttggacaacgccattcgccatacgccgcccggcggcgacatcggcgtgcggctgtggcggcaggacgatcgggtgatggtgcaggtcagcgacagcggccccggtattccgcagacgctgcgcgccgatctgttcgtgcgcccgtctgtcctgagcggcgcccggcgcccttccggcgggctggggttgatgatcgtgcggcgcattttgcagctgcacgacagcgatattcagctgatcgaacaagcgcaaagcggtgcctgtttccggtttgccattccgccacgttaa

SEQ ID NO: 422235 - DNA, 720 bp, Serratia marcescens
atgagaatggacaagccaaaacgaattttgatcgtcgaggacgacggcgacatcgccgaactgctgcagctgcatctgcgcgacgagggttacgccatcagccacgccgccgacggcaaccggggcatggcgatgctggaacagggcggctgggacgccctcatcctcgatctgatgctgccgggcgtggacggattggaaatttgccgccgggcgcgcaccatgacgcgctacacgccgatcatcatcatcagcgcgcgctccagcgaggtacaccgcgtgctggggctggaactgggcgccgacgactatctggccaagcccttctccatgctggagctggtggcacgggtcaaggcgctgttccgccgccaggaagcgatgagccgcaacctgcgcatggacgccggcgtgctcagtttcaacgatctgaccatcgatcccatcgcccgcgaagtgcacctgcaccagcagccggtcgagctgacgccgcgcgaattcgacctgctgtactttttcgcccgccacccgggccaggtgttctcgcgcctgagcctgttgaatcaggtctggggctatcagcacgaggggtatgagcacaccgtcaacacccatatcaaccggctgcgcatcaagatagagcgcaacccggcggaacccgagcgcatcctcacggtgtggggcatgggctataaattcgcggccgcgccgcaagagtga

SEQ ID NO: 422236 - DNA, 612 bp, Serratia marcescens
atgaacctcactctcaccccggaacaacgacagacggtgcatccgctgtggctgcggttgacgcactggctgaatgcgctggcgatgctgatcatggtgaccagcggctggcgcatctacaacgcctcgccgctgttcaacttcagctttctcaatgagctgacgctcggcggctggctgggcggcgcgctgcagtggcacttcgccggcatgtggctgttcggcgtcaacgggctgtgctacctgctgatcaacctggccagcgggcgtttcaaacgcaaatattggccgctcagcccacggcagtttctcgccgatataggcgccgcgctgcgcggcaggctgcaacacgccgacctgcgccactacaacatggtgcagcgcgtggcctatctgtcggtgatgatcctcggcgtgatgagcgcgctgtccgggctggtgctgtggaaatcggtgcagtttccgctgctgcgcacgctgctcggcggctatgaggcggcgcgctatatccactttttcgccatgtcggcgctggtggccttcgtcgcgattcacctggtgatggtggcgctggtgccgcgcacgctgctggccatgctgcgcggacgctaa

SEQ ID NO: 422237 - DNA, 777 bp, Serratia marcescens
atggaaaaggataaacagatcatgacgatcgatgaagggcaggcgatcgtcaaagaagcgcagcggctgttgagcgcgtcatcccgccgccgctttctgcgcaatggcctgacgctgggcggcatcgccatgctcaccggctgcgatctcagcgacaacgccaacgtcgaacaggcacttagccgcatgtcgcgcttcaacgatcgggtgcagggctggctgttcgacggcgagcgcctggcgccggtctacccggaatcgatgatcacccggccgtttccgttcaacgctttctacgccgaggaggacgcgccggacatcaacggcgacgactaccggctggaggtggcgggactggtgcaggacaaacgcgcctggagcctgccgcagctgcaccggatggcgcaggtcagccaggtgacgcgccatatctgtgtcgagggctggagcgccatcggcaagtggggcggcgtgccgttcgcgacctttctcaaggtgattggcgcggatctgagcgcccgctacgtcagcttcaaatgcgccgacgactactacaccagcatcgacatggccaccgcgctgcatccgcagacgattatcgcgctgacttatgacggccagatcttgccgcgcaagtacggctacccgatgaagctgcgcatgccgaccaagctgggttacaagaacccgaaacacattcaggtgatcgaggtcaccaaccgcttcccgggcggttactgggaagaccagggctacaactggtttggcggcagctga

SEQ ID NO: 422238 - DNA, 291 bp, Serratia marcescens
atgaaaaagttattcgcaatgatgatgtgcagcgcgctgatgctgggcgtggccggcgccaacgccgctgatggcatgagcaaagacgcgatgaaaaaggacggcatgagccagatgtcgcacgacggcatggcgaaagatgggatgaagaaagagtgcatgggcaaggactgcatgaagaaagacaagatgggcaaagacgccatgaaaaaggatggcatggcgaaagacggtatggccaaagacggcatgaagaaagacgaaatgaagaaggacgcgatggggcactaa

SEQ ID NO: 422239 - DNA, 468 bp, Serratia marcescens
atgctggcgacatggctgcggcgctttcagcgctcgaacggggacgttatctttatgcgcgcggcgctggtggtgatcttcgccgccttcggctacgccaaatggtttgattacgaggcgcaggggctggtgccgctgatcggcaacagcccgctgctgagctggatgcatcaggcgttcggcatccgcggcgccagctatgcgctgggcgtcgccgagtggagcttcggtttgctgctgctggcgggattctggtcgcggcggctggggttgctgggggcgatcggttcgacggtgacctacctgaccacgctgacgctgatattttccacgccgggtgcctgggagccttccgccggcggttttccggccatggccggcgccaccagctttttgatcaaggatctggtgttgctggccggttccctggtgctgctgaaagccgatttgccggccgagcaggcataa

SEQ ID NO: 422240 - DNA, 2040 bp, Serratia marcescens
atgacaacacgcgaaacctcctccaaaccgcagcaggaccgcctcaaccctgtggttttcttcacctcggcggggctgatcctggccttctcgctgatgaccatctttttcaccgacttctccgggcagtggatcacccgcacgctgaattgggtgtcgaccaccttcggttggtactacctgctggcggcgacgctgtacatcgtgttcgtggtgtttatcgccgcttcgcgcttcggttcgatcaagctcgggccggaacagtccaagccggagttcagcctgatgagctgggcggcgatgctgttcgccgccggcatcggcatcgacctgatgttcttctcggtcgccgagccggtgacccagtacatgatgccgccggaaggcgacgcgcaaacgctggaggccgcgcgccaggcgatggtctggacgctgttccactacggcctgaccggctggtcgatgtatgcgctgatgggcatcgccctcggctacttcagctatcgctacaatctgccgctgaccatccgctcggcgctgtacccgatcttcggtaagcgcatcaatggcccgatcggccacagcgtggacatcgccgcggtgctcggcaccatcttcggcatcgccaccacgctgggcatcggcgtggtgcagctcaactacggcctcaaggtgctgttcgagatcccggaaaacctgacggtgcagggctcgctgatcctgctgtcggtgatcatggccaccatctcggtcacctcgggcgtcaacaagggcatccgcatcctgtccgagctgaacgtgctgctggcgctgggcctgatcctgttcgtgctgttcttcggcgacaccgagttcctgctcaatgcgctggtgctcaacgtcggcgattacatcaaccgctttatgggcatgacgctcaacagcttcgccttcgatcggccggtggagtggatgaacaactggacgctgttcttctgggcctggtgggtggcgtggtcgccgttcgtcggcctgttcctggcgcgcatctcgcgcgggcgcaccattcgccagttcgtggtcggcacgctgatcattccgttcgtgttcaccctgctgtggctgtcaatcttcggcaacagcgcgctgtaccagatcattcacggcaacgccgagtttgcgcaggaagtgatgcagttcccggagcgcggcttctacagcctgctggcgcaataccccggcttcaccttcagcgcctcggtggccaccatcaccggcctgttgttctacgtcacctcggcggactccggctcgctggtgctgggcaacttcacctcgcgcctggccgacatcaataatgatgcgccaaactggctgcggattttctggtcggtggccatcggcctgctgaccatcggcatgctgatgaccgatggcgtgccggcgctgcagaaaaccacggtgatcatgggcctgccgttcagcttcgtgatcttcttcgtgatggccgggctgtataaatcgctgcgggtggaagactaccgcaaggctagcgcgctcagcaccctggcgccggtgccggtctccagccacgacgtgctcaactggaaacagcgcctgtcgcgggtgatgaactacccgggcacccagtacacgcagaaaatgttggataaagtctgccgcccggcaatgcaggacgtggcgcgcgagctggagctgcgcggcgcgaaagtggagttcagtgaagtgccgccgaccgaagacgagcgcctgaaccacctggagctgctggtgcacctgggcgaggaacagaacttcatctatcagatctggccgatgcgctactcggtgccgggcttcacctaccgcgcccgctccggcaagtcgcactactaccggctggaaaccttcctgatggaaggcacccagggcaacgacctgatggactacagcaaggaacaggtgattggcgatatcctcgaccagtacgagaagcacctgaacttcctgcacattcatcgcgaagcgccggggggcaccctgaccttcccggatatgtga

SEQ ID NO: 422241 - DNA, 588 bp, Serratia marcescens
atgcagccaatcagaaggcagcagttgattgatgccacgctcgccgcggtaaacgaagtgggaatgcatgacgccaccatcgcgcagatcgcgcggcgggccggcgtttccaacggcatcatcagccattatttcaaggacaagaacggcctgctggaagccacgatgcgctatctgatcagccatctgggcgaggcggtgaagctgcgtttgcaggcgctgaccgataacagcccggcggcgcggctgcaggcgatcgtcgccggcaacttcgacgacagccagatcaacagcgcggcgatgaagacctggctggccttttgggccagcagtctgcaccaaccgcagctcaaccggctgcagcaggtgaacggccgccggctctattccaacctgtgcgccgagtttcgccgcgtcatgccgcagccgcaggcgcggttggcggccaaggggctggcggcgctgatcgacggactgtggctgcgcagcgcgctgcgcggctcggcgttcaatcaggcgcaggcgctggcgctcacgaccgaatacatcacgttccaactccgggggcagacgccgcccggaggataa

SEQ ID NO: 422242 - DNA, 1473 bp, Serratia marcescens
atgtcccgttttggcttgcagaagctctatattcatggcgcctatgtagacagcaccgctggaaaaaccttcaacgccatcaacccggcgaacggcgaagttctggcggaagtccaggccgccggcgctgaagacgtcgatcgtgcggtggccagcgcggccagcgggcagaaggtgtgggcggcgatgacggcgatggcgcgttcgcgcatcctgcgccgcgcggtggatattctgcgcgagcgcaacgatgagctggcggcgctggaaacgctggataccggcaaagcgatgtcggaaaccaccgcggtggacatcgtcaccggcgccgacgtgctggagtattacgccggcctgatcccggccattgaaggcgaacagatcccgctgcgcgaaacctcattcgtctacacccgccgcgaaccgctgggcgtggtggccggcatcggcgcctggaactacccgattcaaatcgcgctgtggaagtccgcgccggcgctggcggcgggcaatgcgatgatcttcaagccgagcgaagtcacctcgttgacggcgttgaagctggcggaaatttacaccgaagccggcctgccggacggcgtcttcaacgtggtgaccggcagcggcgcggaagttgggcagtacctgactgaccatccgggcatcgccaaagtctctttcaccggcggggtgaaaaccggcaagaaggtgatggccaacgcgtcggggtcgacgctgaaagaagtcaccatggagctgggcggcaagtcgccgctgattatcttcgacgacgccgatctggatcgcgccgccgatatcgccatgatggccaacttctacagctccggccaggtgtgcaccaacggcacccgcgtcttcgtgccggcggcgctgcaggcgcagtttgaggcgaaaatcctcgagcgcgtgaagcgcattcgcctcggcgatccgaccgatccgcagaccaacttcgggccgctggtcagcttcgcgcacatggaatcggtgctgcgctttatcgaaagcggcaagaacagcggcgcgcgcctgctgtgcggcggcgaacgcgtcacccacggcgaattcggcaagggcgcttacgtggcgccgacggtattcagcgactgccgcgacgacatggaaatcgtgcgcgaggagatcttcgggccggtgatgagcattctcagctaccagagcgaagaggaagtggtgcgccgcgccaacgataccaccttcggcctggccgcgggcgtggtgaccaacgatctggcgcgcgcgcaccgcgtgatccaccaactggaagccggcatttgctggatcaacacctggggcgagtcggcggcggaaatgccggtcggcggctacaagcagtccggcgttggccgtgagaacggcctgactacgctggaacactacacccagatcaaatcggtgcaggttgagctgggcgaatacgcctcggtattctga

SEQ ID NO: 422243 - DNA, 1668 bp, Serratia marcescens
atggaatttgactacatcattatcggtgccggttccgccggcaacgtgttagccacccgattgaccgaggacgccgacgtcagcgtcctgctgctggaagccggcggcccggattaccggatggatttccgtacccagatgccggccgcgctggcgtttccgctgcagggccgccgctataactgggcgtatgagaccgatcctgagccgcacatgaacaatcgccggatggaatgcggccgcggcaaagggctgggcggttcgtccctgatcaacggcatgtgttacattcgcggcaacgcgatggacttcgataactgggccaaagcgccgggtctggaagactggacctatctggactgcctgccgtatttccgcaaggcggaaacccgcgatatcggcccgaacgactatcacggcggcgagggtccggtgagcgtcaccacgccgaaagccggtaacaacgaactgttccacgccatggtggaagccggcgtgcaggcgggttacccgcgcaccgacgatctgaacggttaccaacaagaaggcttcggcccgatggatcgcaccgtgacgccgaaagggcgccgcgccagcaccgcccgcggctatctggatcaggcgcgttcgcggccgaacctgaagatcgtcacccatgcgctgaccgaccacattgtgttcgacggcaagcgtgcggtgggcgtcaactatttgcagggcgacagcaatcaactgacccacgccaaagcgcggcgcgaagtgctgctgtgcgccggcgccatcgcctcgccgcagatcctgcagcgttcgggcgtcggcccggcggcgctgctgaacagcctggatatcaaggtggtgcacgatctgccgggcgtcggggaaaacctgcaggatcacctggagatgtacctgcagtacgcctgtaagaaaccggtgtcgctgtacccggcgctgcaatggttcaaccagccgaagatcggcgcggaatggctgttcaacggtaccggcgttggcgccagcaaccagttcgaggccggcggcttcatccgcagccgcgcagaattcgcctggccgaacattcagtatcacttcctgccggtggcgattaactacaacggcagcaacgcggttaaagagcacggcttccaggcgcatgtcggctcgatgcgttcgccgagccgcggccgggtgcaggtgaagtcgaaagatccgcgccagcacccgagcattctgttcaactacatgtcgaccgaacaggattggcaggagttccgcgacgctattcgcatcacgcgcgagatcatggcgcagccggctttggacgaataccgtggccgcgagataagcccggggccggaagtgcagacagacgagcagctggacgccttcgtgcgcgagcacgccgaaaccgccttccacccgtcctgctcgtgcaagatgggcgaggatgagatggcggtggtcgatgggcagggccgggtgcacggcatggaaggattgcgggtggtggatgcgtcgatcatgccgctgatcatcaccggcaacctgaacgccaccaccatcatgatcgccgagaagttagccgatcgcattcgccagcgcgcgccgctgccgcgcagcaccgccgactattacgtcgccggcgatgcgccggtgcgcaaacagtaa

SEQ ID NO: 422244 - DNA, 1626 bp, Serratia marcescens
atgaagtcgtccttattcagccgctatacctgctttgtactgagcatcttgctcaccctggctttcttgatcatgatgcacaactatccgtggttctggctgccggccctggcctgcggttgcctgatggtgttgggtatctacgatctcacccagcagcgccacgccatctgccgtaactacccgatcatcggccgcatgcgcttcttcttcgagttcatccgcccggaactgcgccagtatttcctcgagcaggataatgaagagatcccgttttcgcgcacccagcgcacgctggtgtatcgccgggcgaaaaacgagatgggcgacaaaccgttcggcaccctgctggacgtctaccaaaccggctatgagtgcatcggccactccatgcggccggtggaagccgccgacccgaccagtttccgcatcaccatcggcggcgccgactgccgccagccctactccgcgtcgatcttcaacatttcggccatgagcttcggcgcgctctccgccaacgccattcgcgcgctcaacctcggcgcggccaagggcaatttctaccacgacaccggcgagggcagcatcagccgctatcaccgtgaaaacaacggcgatctggtgtgggagctgggcagcggctatttcggctgccgcaccgccgacggccatttcaatccgcggcgctttgccgaacaggcgcaaagcccgcaggtgaaaatgattgaaatcaagctcagccagggcgccaaacccggccacggcggcattctgccggcgaagaaggtggatgcggaaatcgccgccacccgcggcgtgccggaaggcgtcgattgcatctcgccggcctcgcacagcgccttcaccactccgctggaaatgatgcatttcatacaacagctgcgcgagctgtcaggcggcaaaccggtcggtttcaagctgtgcatcggccacccgtgggagttcgtcgccatcgtcaaggcgatgctgcacacccgcatcctgccggatttcatcgtggtggacggcaaggaaggcggcaccggcgccgcgccgcttgagctttccaactatatgggcatgccgctgcgcgaagggctgctgttcgtgcataacacgctggtaggctgcggcctgcgcgaccagatcaagataggcgccagcggcaagatcatcagcgcgttcgacatcgccagcgtgctggtgctcggcgccgattgggtgaactcggcgcgcggctttatgttcgccgtcggctgcatccagtcgcagagctgccacaccaaccactgcccgaccggcgtagcgacgcaagatccgctgcggcaaaaggcgctggtggtgccgaacaaggcggaacgcgtctaccacttccatcaaaatacggtgaaagcgctggcggacatgttggcggcggccggcgtcagccgcccggagcagctgacctcgcaccatatgctgcgccgcatcacgccgaccgagatcaaggtgtacgccgatatctattactacctggagccgggcgcgctgctgcaaccggagatcaaaagcgagttctacgcccgcatgtggcgcatggcgacgcccaccagtttcgatcaggcgatctcgctgccggcggcatga

SEQ ID NO: 422245 - DNA, 591 bp, Serratia marcescens
atgtctaaaaacaacgttcttgtgattagtgagtgtaagtacagctatgttggcctgtcggtgctgctgaagaaacactacggcgcgtacgatatccgcctgttttccgatttcatgcacggcggcgccaaagcagagaagatcaccaagcacgatatcgcgctgattttcacctcgcaaaacctggagcagagcgttaacgtgatcgaaagcctggtgtccctgcaccagcagtacaacagcaaaacgcgcctgttggtgttctacgacgacgagcgcgtggtgaaactgctgtcgatcctggggatttccgttgagttggtctccacccgcattccgctttattcgctgcaggaaaaaatccagcggctgctggaaagcaaggagccgggcggcatcagagtgcagaaaacccgcgagctcagcccggcggaaagcgacgtgatcttcaatctgctgcgcggcgacagcctgctgcacattgcggaaaagcgcggcacgcacccaaaaaccatcttttcgcagaaatacagcgcgatgaaaaagctgcggctgcgcagcatgagcaccatcttcgtcgccggcaaataa

SEQ ID NO: 422246 - DNA, 717 bp, Serratia marcescens
atgagcggttctttcagagagaaaaataacggcattaattatgtttttcagccaatgttcgcgaaatcgggacaattgctggccgtcgaatgtctgtctcgctttacgtttaatagcgaatacgctcatttttctcctgaacagttctttcgccacgccgatagcgccacccggattgagattttgatggatcagatcaatctgatcgataaatacaaacactggtttcatgaaaaccaagtgatagccactttgaatgttgacgattattctctgcaatcgctggcgaatactcactttgccgaaagaattaatgccatgcgctgtattcatttcgagatcagcgagaattcaacccggctggtgaaagatcgcgtgcacggcgatccgtcattgaatagttattcattttggctcgatgattttggttctggctatgcgggtttttccgcgttgtacaacagccagttccgcttcgttaagctcgaccgttttctgctctgggacttcatgaaaaagtccggcggcgagggcttgatgcgcgcattactgcgcttcttttaccttaatcattacaaggtaattatcgaaggagttgaaactcccgaacacaagaaatggctggatgaaatgccatattacgcactgcagggaaagctgtggaaggaatccagcatcaaggatttgaactcgcttcttacagctgaatacttttaa

SEQ ID NO: 422247 - DNA, 543 bp, Serratia marcescens
atgaaaaaagtattattgcctttggctgccctggtattgtctgcaactgcttccaacgcaatggcagcaaacggcactgttaaattcaccggtgaaatcaaacagtctacctgccaggtaactagcgatactcagaataaagaagtttacctgggtacttacccaacttctgctttcccaaccgtgggttctaaatccgcttctaaagctttccagatctctctggaaaaatgtgatgccggtgattacagcctgcgtttcgacggtaacaccgttgccggcaacccagacctgctgtccgtaagcaacgttggcggcactggcgctgcagctaccggcgtgggtatcgaaatcaccgataacaacggcaagccattcgctatcggcgacggttccaacatcaacgacgacgtagcgaaagtcaccatcgctgctgacggtaaagcgaccttcaacctgcaggctcgttaccgttcattcgacagcaacgtaactgcaggtctggctaacgccaccagcccgttcactatcgaatacaaataa

SEQ ID NO: 422248 - DNA, 687 bp, Serratia marcescens
atgaaaaagttctttgctgctctgctgatgctgggcacctttaacagctacgccggtatccaggtagatgccactcgcgtgatctataaaggcgacgacaaatccgcctctctgccgattcataacgatgcttcagaagcttatatggtgcagacctggctggacaccggtgacagaaaccaagtgccgaaaaatctgcctgtcgttgtcgttccaccgattctgaaattggacgctgccaaaactgcagttctgcgctttatctattccggtaatggcttacctcaggataaagaaaccctgctgtggattaacgtgcaggaaattccgccggcgccgaagcaagaaaacgtgctgcaggttgcggtgcgtactcgaatcaaacttttttaccggccggtggcgttgaaaacgacgctggacgagcaagtacaaaacttgcgttggcagcgtgaaggttcacgtctgcaagtgattaacgatggcccgctgcatattacctttggggcgctgcatttgaaaaacagcgcgggcaagaccgtggatgtggacgccaacatggtgagcccgaaagatcgcttatcgatcagcatcccggcgggcgtcagcgtcggcaacaagattgctttcagttatatcaacgattttggcggtagaacggaagtcaaggacgttccagtacaataa

SEQ ID NO: 422249 - DNA, 2595 bp, Serratia marcescens
atggcaaatcaacgaaaagtagcaggcggaacgacgcggctgacacagctgatccgaattgcaatcattgccgccagtgcgccgatgttctggagtgaagcggcgctggcagagtttaacatgtcgtttattcacggcgatgaaaacctgagcaatgcggaagcggtcgctcagggcgatgctttgcaaccgggcgtttacccattcgacatctacgtcaacctgactcaggtcgatcataaggatgttacttttcgtcaggttaaaggccagaccgcgtctcaaccctgcctgaaagttgaagacctgcgcaactacggcatcaaactgccggaaacgctgcaggccggcagctgcgttgatctgcctgcgttggttaaagacgccaccgtcagctatgacgcggcggtgcagcagatcaacatttccgtgcctcagaccatgatggatctgagcgctatcggcgcgatcccgccaagcatgtacgatgaaggcatcaacgcgctgttcgccaactataacttcaactacaacaagaacagctatcgcaaagatgacgctgacgacagcgagtacatgttcctcgcgctgaacagcggccttaacctgggcagatggcgcctgcgcaacaactccacctgggacaaacagagtggcagcagcagcaactggaccaacgtctcttcctgggccgagaccgacatcgtgccatggcgcagccgtttggtgatggggcaggcgagcaccaacaacagcgtgttcaacagcttccagttccgcggggtgcaactctccagcgttgacgacatgctgccggacagcctgcgcggttatgcgccggtggtgcgcggcgtggcggcgaccaacgcccgcgtcgagattcgccagaacggttacgtcatttacagcaccaacgttgcgccgggtcctttcgagatccacgacgtctatccgcataccaacaacggtgacctgcaggtgaccgtcaacgaggccgacggttcgcacaaaacgttcagcgtcgcctactcttccgtggccaacatgctgcgcgaaggcatttggaacttccagctgaccgccggtaaataccataacggtaacggtggctatcagccgaagctgattcagggtactgcggcatacggcatgaactatggcctgacgccgttcggcggcgccatcattgccgagcactaccgttccgctgccgtgggtatcggtaagagcctgggatcgtggggtgccatctccgtggacggttcgatctccgataccgagctggcgaacggcgatcgcaagcaggggcagagcttccgtttcctgtactccaaatcgctcaaccagatgggcaccaacttccagttggcgggctatcgctatgcgacttccggttactatgatctcagcgatgcggtccaggagcgcaacagctggcgcaacggcatttatgccaatgattactgggatccgaacgatctgcagccgggccagccttcctggagcaacaaccagaaacgcacccgatacaccgcgcgctacggcaacaagcgcgaacgcgtcgagctgtcgctcagccagcagctgtgggcgggggccagcctgtacgccaacgtgagccatcagaactactggggcgtatccggtaacgatcgtacgattcagctgggttacaacgacggcttcaagcgcatttcctacggcgtttatctacaggatacgcgcggccagtacggctattccgatcgcagcgtgaacttcacgatgtcgatcccgttggattggggccagagcaacaattcgaccactgccaacttcagcgcggcgcacagcaaacagagcggcgacagctactcgaccggcatcagcggcaccatgctggacgatcgtcgcatgaactattcggtttccaccgggcatacgcagtcctccggtcagagcagcaacctgaacctgggctacagcagcagcatcggtaacatcgacggtagctatgcctacagctcgaaataccgtcaggaaggggtgggcctctccggcggcctgctggtgcactccggcggcgcgacgctgacgcagccgttgcagaacactatcttgctggtggaagcgaaagacgccaaaggcgtgcgtctggaaaaccagccgggcgtgaccatcgatcgcttcggttatgcggttgtgccgtcggccaacccgtaccgctacaactatgtggcgctgcgcaccgaagatttcggcccgggcctggatgtgcctgtggccagtaagcaagtggtgccgaccgagaaatcggtggtgaaggtgagtttcgataccttcaagggcgtcagcctgctgattcacgctcgtctgggtgacaacggttatccggccatcggcgccggcgtgttcaacgagtccggccgcaacagcggcaccgtgggcctggaaggcgcaacctatgtttccggcgtgaaagcgggtgagaaactgacgatcaaatgggggccgaaagccgaccagcaatgcgtactgccgatcccggcggacgtgggcgacaaacaagcggccatgggatatcaggaactgaccctgcaatgccaaaaactgtaa

SEQ ID NO: 422250 - DNA, 1074 bp, Serratia marcescens
atgaacttgagcaaattagcacgtaatacacttctgtcagtggtggggctggcggggttggcgatggcgcaacaggcggcggcgatgcagtgccgtttcggcaactcgaccggcagtagcaggccaaccggcagcgtgacgcaggatatcgacgtcggccgcccgatcgtgttggctgccagcgactttgttaaaggcaacctgatttggcgttcgcagaactttacctccacctttacctgctgggataccgacaactacccgcgtggagagaacgcttacatctattggaacccgcagaactcgttcggcgcactggataagtcgttggagattggggtgtcgatcaacgggcgtgattatgatgcgatcaacctgaagcaaagttccaaccggccgacgggccctgatttggggccgggtaccaaaccgggcagtaatagaaggaaagccgatcctcaggcggtgaccgccacttattcggtgtatatcaaagccaccggggtgaaaccgccggcgggtaacttcccgccgctggcgcgcgcttcgctgttccagatcgatggtgagttgggcctgaacgccaccaaagacagcaactttaacgcctatatcaaaggtttggacaagatccgcgtgatccagtgcaatccgcagatcaccgtgttggccaacaacggcgccagcgtcgatttcggtgtgttgacgacgtccagcgccaaaaccggcactatcgccaagcaggtgccgttcgatatcaaggcgaccttgagcggcggcgagtgtgccggccagtctctgcaggccagtttcagcagcaccaacgccgatccgtcagataacacgcagatcctgccgaccaccaaaccgggcgtggcgatcttcctgactcagcaacgcgacaccaacaaaacgccgatcccactgcaaaccaacgtggatttcggcggcgtgctgcaggataagcagaacgaagtgaaagagacctttatcgcgaacctgaagtggttgaccaatacgccgaagaccggggtgttcaacgccaccgccaacgttgacgtcaccttcaaataa

SEQ ID NO: 422251 - DNA, 459 bp, Serratia marcescens
atggatcgcgtcaatatcattcacgatttactagactggattgaaactcatctggaccagccgctgctgctggataacgtcgccgccaagtcgggctactccaaatggcacctgcagcgcatgttccgcagcaccaccggccacgcgctcggcagctatatccgcgagcggcgcctgtcgcaggcggcgcaggcgctgcgctccaccccgcgcccgatcctggatatcgccctgcaataccacttcgattctcagccttcgttctcacgcgccttcaagaaacagttcggcaaaaccccggcggtgtatcgccgcaccacccgctgggacgtggcggaatggccggcgcagccggtggaagtggaggccgagccacgccacgatgcccccacgctgcctcgctggtacgctggcaaaccgccggaaggcgtttgcaccacctggatggggctgcgctga

SEQ ID NO: 422252 - DNA, 1581 bp, Serratia marcescens
atgagaaaattactcgtcctgattttcagtctcagcctgtttagcgttacgcagcaggcggcggctgaagagaagaataaaaccgtcgacgtggtgttgatcggcggcggcattatgagcgccaccttgggcacctatctgcatgagctggagccgacctggaccatcgacatgtacgagcgcatgaacggcgtggcggaagagagctccaacggctggaacaacgccggcaccggccactccgccttcagcgaaatgaactacacgccggaaaaagccgatggcaccatcgacatcagcaaggcggtgaaggtcaacgagtctttcgaaatctctcgccagttctggtcttatcaggtgaaaaacaatgtcctgaaagatccgaaatccttcattaacagcgtgccgcacatgagcttcgtgtggggcgacgacaacgtcaacttcctgcgtaaacgctacgcggcgctgcagcacagcaccctgttccgcggcatggaatactccgaagatcctgcgcaaatcaaacagtgggcgccgctggtgatgaacggccgcgatccggcgcagaaaatcgccgcgacccgcatgccgctgggtaccgacgtcaacttcggcgtgatcacccaccagctggttgacgcgctgagcaccagcgacaagttcaagctgaacctgagccacgaagtgcgcgacatcaagcgcaacgccgatcagacctggagcgtgaccgttgccgatctgaaccgcgacggtaaagaaaccaccgttaacgccaagttcgtgttcatcggcgcaggcggcgcctccctgaccctgctgcagaaatccggcatccctgaagccgacggctacggcggcttcccggtcggcggccagttcctggtcaccaccaacccggcgatcgccaaccagcacctggccaaagtgtatggcctggccagcgtaggttcgccgccgatgtccgtgccgcacctggatacccgcatgctggacggcaagcgcgtactgctgttcgggccattcgccaccttctccagcaagttcctgaagaacggttcgctgttcgatctgctgcactcgctgagcacctcgaacctgatgccgatgacccacgtcggtctggataacttcgatctggtgaaatacctggtcggccagctgatgatgaacgacgacgatcgcttcgccgcgctgaaagagtacttcccggacgccaagcaggaagactggaagctgtggaccgcaggccagcgcgtgcagatcatcaagaaagacgcggataaaggcggcgtgctgcagttcggcaccgaagtcgtgagctctgaagacggcagcatcgccgctctgctgggcgcgtcaccgggcgcttccaccgctgcgccaatcatgctgcacctgatggaaaccgtgttcaaagacaaagtggcgacgccggaatggcagagcaaactgaaagagatcatcccgtcctacggccacaagctgaacggcgatatcgagatgaccaacaagatccgcggctacaccagcagcgtgctgggtctgaactacattgaagtgaaaccggaaaccaactga

SEQ ID NO: 422253 - DNA, 1428 bp, Serratia marcescens
atgcaacctgctgtatccctgatcgccggcgccgtgctgtccgccctgctctgttcctccgccatcgcggcagaaaactcggccaatgccgatggcctgaccgagcgcgccgcgcgcggcaccctcaccgaaccgggcggcgcccgtcgtctggtcggcgatcagaccgccgcgctgaaggcgtcgctgtcggacaaaacggtgaaaaacgtgatcctgctgattggcgacggcatgggagattccgagatcaccgccgcacgtaactatgccgagggcgcaggcggttacttcaagggcatcgacgccctgccgctgaccgggcaatacacccactactcgctggacaagaaaacccacaaaccggattacgtaaccgactccgccgcttccgccaccgcctgggccaccggggtgaaaacctataacggcgcgctcggcgtggacgtgaacggcaaagaccagccgacgctgctggagatcgccaaggcggccggcaaggccaccggcaacgtctccaccgccgaactacaggacgccacgccggcggcgctggtgtcgcacgttacctcgcgcaaatgctacggcccggaggaaaccagcgagaaatgcgccgctaacgcgctggaaaagggcggccgcggttccatcaccgagcagttgctgaaaacccgtgccgacgtcacgctgggcggcggcgcgaaatccttcaaccaactggcgaaaagcggcgaatggcaaggaaaatcgctgaaagatcaagcggcggtgcaaggttatcagtgggtgagcaacgcggatgaactgcaggccgttaccctggccaatcagcaaaaaccgctgctgggcctgttcgccgacggcaacatgccggtgcgctggctggggccgaaagccagctatcacggcaacctcgacaaaccggcggtgacctgcgaaaacaacccggctcgcaccgcggccacgccaacgctggcggcgatgaccgaaaaagcgatcgcgctgctgaaagacaacacgaacggcttcttcctgcaggtagagggcgcgtcgatcgataagcaggatcacgccgccaacccgtgcgggcagattggtgagaccgtcgatctggacgaggcggtgcaaaaagcgctggccttcgcccgcgccgacggcaacacgctggtgatcgtcaccgccgaccacgcgcactccagccagatcgtcgccgccgacgccaaagcgccgggcctgacccagacactgaccaccaaagacggcgcgccgatgaccctcagctacggcaactcggaagaggaatcgcaggggcacaccggcacccagctgcgcgtcgcggcctacggcccgcacgccgccaacgtggtggggttgaccgatcagaccgatctgttcttcaccatgcgcgatgcgatgggcatcaagtaa

SEQ ID NO: 422254 - DNA, 708 bp, Serratia marcescens
atgctcgattccacccaattcccgatcgtcaaacgctggccggctcagcatcctgaaaggctgcagctctattccctgccgacgccgaacggcgtcaaagtgtccatcatgctggaagagatcggcctgccctatgaggcgcacctgatcgacatcggtaacaacgaaacctggacgccggaattcctggcgctgaacccgaacggcaagatcccgtcgatcatcgatcccgacggccccggcggccggccgctgccgttgttcgaatccggcgccattctgctctacctggcggaaaagagcggccgtttcctgccgcaggatccggcgcagcgttacgaaaccattcagtgggtgttcttccagatggccgccgtcggcccgatgttcggccagctcggtttcttccacaaattcgccggacgcgagtatgaagataagcggccgctggagcgctacaaaaacgaatcgaaacgcctgctcggcgtgctggaaacgcgcctggaaggccgcgactggatcatgggcgcggactacaccatcgccgatatctcgctgctgggctgggtgcgcaacctgatcggcttctatgaggcgcgcgagctggtggagttcgacagtttcccccgcgtcgcgcagtggctggagcgcggtctggcacggccggcggtgcagcgtgggctcactataccggcgcgcgcggcctga

SEQ ID NO: 422255 - DNA, 684 bp, Serratia marcescens
atgcttaacatcgacctagaagatcgtttggcggcgctgagcgccgccatcgccgaccgcacccgggcgcgcatgctgtgcctgttgatggatgggcgcgcctacaccgccaccgagctcagcgcggcggtcgaggtcgccccgtccaccgccagcgcacatctggcgaaactgctggagcagcggctgatcgcctgcgtcaaacaggggcgctaccgctattttcggctggccgggcaaccggtggccgaagcgctagaaggcctgatggcgctggcgggcgtgccgcgcacgtcggtgaaaagcagcacgcccaccacgctgcaatatgcccgcacctgctacgaccatatggcgggcgaggtggcggtgaaactgcacgatcggctgcatgcgctgaactggctgagcggtgaggaagactaccggttaagcgacgccggtcaggccgcgctggcgcggctgggcgtcgattgctcccccgcccccacccgccgccgcttcgcctgcggctgcctggactggagcgaacgccgttctcacctcggcggcgcgctgggcgccgcgctgttggccgcgtttatccaacgcggctggatcgtccgccggctcgacagccgcgagttgcagctgacccctgccggtaaaaaagcgctggccgcacattttgaactcacggtctaa

SEQ ID NO: 422256 - DNA, 348 bp, Serratia marcescens
atgatcgccgtgatttttgaactgcaggccgccgacgggcagcgcgatacctatctggcgctggcggcggagctgaagccgctgctggcgcagatcgacggattcatctccatcgagcgctttcaaagcctggccgatcctgcgcgcctgctgtcgctctccttctggcgcgacgaggcggcggtgcagcagtggcgcaatctcgagcagcaccgggcggcgcaggcgcgcggccgtggcgaggtgttggcgcactatcggctgcgggtggcggaggtggtgcgggactacgggctggagagtcgcgaccaggcgccgcaggatagccgttgctatcaccgcacctga

SEQ ID NO: 422257 - DNA, 732 bp, Serratia marcescens
atgaaaaagaccctgttcgccctgatgctcggcctgagcgccgccgccgcccccgtcgccgcgctggcgcaatcccccgccgccgacagcagccaggcgggttatgtgcaaccgctgaccgccgagaacagcctgttgctgttggtcgatctgcaggacatgttcggcatgaccatttcctctatcgatcaaaccaacctggtcaataacgccgccggcatcgccaaggccgccaaggtgttcaacgtgccgaccattctggcctcggccaacgccaaaagcttcgccgggccggtattccagcaggtgacgcaggcacgcccggacctgcaggtgtacgatcgcaccgccatcaacgtctggcaggatcggcgcgtggtggatctgatcaaacaatccggccgcaagaaaatcatcatcggcgggctgtggaccgccagctgcgtgatgctgccggcgctgtccgccctgggcgagggttatgaggtttatatcctgtcggacgtcaccggcgacattacgccagacagccaaaacaacgccatgcagcgtctggtacaggcgggcgccacgcccatcaactgggtggcgttgatgctggaatggcagcaggactggagccgcaaagccacggcgggaggcgtattgcagatcgcccgcgaccacggcgccgcctgggggatgggcgccagctacgccggggcaatgaaggtgggcagcgaagcgaaataa

SEQ ID NO: 422258 - DNA, 897 bp, Serratia marcescens
atggacgtgctactgacgatgcgcgcctttcgtcgcgtggttgagcgcaacagtttttataaggcggcggaggatctggcgatcacgccggcggcattgagcaagcagattaagcagttggaaaaccggttggggacgctgttgctggtgcgcactacccgcagcatgagcctgaccgaagccgggcagctctattaccaggaagcctgtcggttgctcggcgagttcgacgcgctggagcagacggttgccgccagcgcgcagcaggtctccggcacgctgcgggtcaatgcgccgctttcgttcggcctgacggtgttgtcgccactgctgccgccgtttatgcaacgttacccgcagctgcagatggagctgacgttggacgacagagtattggacgtggtggcggccggtttcgatatttccttgcgcattcgccgacggctgccggattcttccctcagcgcccgggcgctgggtgaagtgcaccagcgaatttgcgccgcgcccggctatttggcgcagcacggcgtgccgcaaacgccgaatgaattgcagcgacacagctgtctggcctattccctggcggaaaggccggggcagtggcagttcaccgccggtgaggagagcctgagcgtgacgttcactcccaggttgatcgccaacaacagcctgatgctgcgggatatgctggtggcgggactgggtatcggttcgctgccgtcgttcgtggcggaccccgagatcgccgccggcaggctggtgcggctgttccctgaacagattgccgacgtgcatcaggttttcgcggtttacccgacgcgccggcatgtgcagcagaaagtgagtttattcaccgaatttgtgcgagaacagggattgatgacggcgaattga

SEQ ID NO: 422259 - DNA, 498 bp, Serratia marcescens
atgaaaacctaccctgcagttttacacctgatgtgtggcaaggccggcgcaggcaaatcgacgctggcgcagcgtttggcgcagcaaccgcaaacgctgttgctggtcgaagatgcgtggctggcgacgctgtatgagcaggagatgaccagcctgcaagactatgcgcgctgttccgaccggttgcggcgggcgctgggcggacacctcgttcaactgctgcgcggcggctggtccgtagcgctcgatttcccgatgaatacgccagacaggcggcgctgggccaaagcgttggcggaggaggccggcgttgcgcactgtctgcattttctcgacgtcagccatgcgcaatgcctgagccggataacgctgagaaacgcgcgcggcgagcacccgtttacactgagcgaagcggagtttgagcgcctggcgcagtactttgttcccccggcggaagaggaagggatgacagtcttgcgttatggcgaacaggactga

SEQ ID NO: 422260 - DNA, 471 bp, Serratia marcescens
atgacacactctctgcacaacgccgccccgcgcgcagcgctcaccgacaccatcatggccgccaagatccgccataacctgactttcgacgcgctggctgagggcaccggactcagcctggcgttcgtcaccgccgcgctgctggggcagcatgcgctgccggaacaagcggcacgcaccgtggcagccaagctcgggctggacgaagaggcggtacagctgctgcaaaccatcccgttgcgcggcagcattcccggtggcgtgccgaccgatccgaccatttatcgcttctatgaaatgctgcaggtttacggctccacgctgaaagcgctggtacacgagcagttcggcgacggcatcatcagcgccatcaacttcaagctggatatcaagaaggtggccgatccggaaggcggcgaacgcgcggtgatcaccctggacggcaaatacctgccgaccaagcctttctaa

SEQ ID NO: 422261 - DNA, 654 bp, Serratia marcescens
atgaaagaggtgattgaaggcttcctgaagttccagcgcgaagcctttgttgaacgcacggcgctgtttcagcagttggcgacccgccaaaacccgcgcaccctgtttatctcatgttccgacagccggctggtgccggagctggtcacccagcgcgagccgggcgatctgttcgtgatccgcaatgccggcaacatcgtgccttctttcggccccgaacccggcgggattaccgcctcggtcgagtacgccgtcgccgcgctgggcgtggaagatatcgtgatctgcggccattccgactgcggcgcaatgaccgccatcgccacctgccagtgtctggatcacctgcccacggtcgccggctggctgcgttacgccgattccgcgaaggcagtcaatcaggcttatccgcacgcttccaacgaggcgcgggtcgcatcgatggtgcgcgaaaacgtcatcgcccagctcaacaacatcaaaacgcacccttccgtcgccctggcgctggatcagggacgcctgacgctgcacggttgggtctatgacatcgccagcggcgctatcgacgcgctggacggcgaaacccgccgcttcgtgccgctcgccacccatcccgaggtgaccgccaccccggcgatcgcccgtttttaa

SEQ ID NO: 422262 - DNA, 900 bp, Serratia marcescens
atgctgctgcgacacatccgttattttctggccgttgccgaacagggcaacttcacccgcgccgccgaatcgctgcacgtctcgcaaccgacgctgtcgcaacagatcaagcagctggaagacacattgggagcgccgctgttcgatcgcagcggcagagccgtgcgcctgaccgacgccggtgaggcgtggatgcgctatgcgcgcttggcgctgcaggatctggatgccggcgcgcgggcgatccatgacgtggcgacgctggcacgcggccatttgcggctggcgatgacccccacgttcaccgcctatctggtggggccggcggtcgatgccttctaccgccgctatccggggattacgctgagcattgaagagatggcgcaagagcgaatggaggcgctgctggcgcaggataggctggatctgggcattgccttcgagatggcgcagtcggcggaggtggaagcggcgccgttgttcaatgagtcgctggagctgatggtcggcaccgatcatcccttggcatctcatcgccggccgctgacgctggcggagtggcaacatctgccgctggccttgctgagcggcgactttgccacgcgccagtttatcgatcgctactgcacgcagctgggtttccggccgcaggtggcggtggaggccaatgcgctaggcgccatcgtcgagatcgtgcggcgcgggcagctcgccacgctgctgccggccgccattgcgcgcgagaaccggcagttgaaaaaagtggctttggccaacgccatgccggtgcggcaggcggtatggctgcagcgcaaaggcgcttaccgcagcgccgccgcgcaggcgtttattgccctcttgcaggaacagggcattacgccggcgccgggcagccgatag

SEQ ID NO: 422263 - DNA, 1305 bp, Serratia marcescens
atgaacactgctgaaaacgcattgcccaaaagccaaacggcggggaagggcgcggtaaattacaaagtcattgtcggcgccagcctgggcaacggcctggagattttcgacttcaccgtctacagcttctttgccgccattatcggcaaactctattttcccagcgacagcgcctacggctccttgttgatgtcggtggcggtgttcggcgtcggctttatcatgcgcccgctgggcagcatggtgctgggtgcctatgccgatcgggtcggccgcaaggccgccatgctgatgaccatcgtgctgatgggcgtcggcaccgcgctgatcgccttcgcgcccacccatgcgcaaatcggcgttctggcgccggtgctgatcgtggttggccgcctgattcaggggtttgccgccggcggtgaagtgggctcggccaccacgctgctgctggagtcggcaggggccaaccaacgcggcttcttcgtcagctggcaggcgataagccagggcatcagcgccctgcttggcgcctctttaggcctggcgctcacctattttctgccggagcaggcactgtatgcctggggctggcgcgtgccgttcatcatcggtttgttgatcattcccgtcggcatctatattcgcaaacatctggaagagacctacactggagaggcgccggctcacgcgcggccgccgctgaatccggtatgggatctggtgagcaatcatgccaaagatctgttgctgggcgtattgatcatcatgtccggcaccgtgatggtctacgtggtgctgctgtatatgccgacctacatgatgcagacctatcacatcgccggcccgaccgcctacctgttcagctgtattgcctctgtggtacagatcatcgccgtctattgcgcaggccgttacgtcgatcgggtgcagaactacaaaaggccgctgctgttctcaatctttgcagcactgatcctgatttacccgaccttctggttcctcagcgccacgcaaaccctgtggctggcgatcgttttccgcatcctgctgatcggcgcgctgggcatcaacatgctggccagcactatgctgatcgtctcggcgctgccgcgccacgtgcgcgccaccggcacctcgatgatctacgcctttggcgtgacgctgttcggcggatcggcgcagttggtcgtcacctggctgctggacgtcagcggcaatccgatggcgccggcgtggtacgtcaccggcatgttgaccgtcagcctgatcgccactctgctgttccgggagcgtcataaagaatag

SEQ ID NO: 422264 - DNA, 1593 bp, Serratia marcescens
gtgttaagcaccaacaacatcaccatgcagttcggcagcaagccgttgtttgaaaacatctctgttaaattcggcggcggcaaccgttatggcctgatcggcgccaacggctgcggcaagtccacctttatgaaaatcctcggcggcgatttggcgccgaccggcggcaacgtgttcctcgatccgaacgagcgcctgggtaaactgcgtcaggatcagttcgccttcgaacagtacagcgtgctggacaccgtgatcatgggccacaccgagctgtgggcggtgaaggaagagcgcgaccgcatctacgccatggcggagatgagcgaagaagacggctataaagtggccgacctggaagtcgcctacggcgagatggacggttacaccgccgaagcgcgcgccggcgaactgctgcttggcgtcggcattccggtggaacagcactatggcccgatgagcgaaatcgcgccgggctggaagctgcgcgtgttgctggcgcaggcgctgttctccgatccggaaatcctgctgctcgacgaaccgaccaacaacctggacatcgataccattcgctggctggagcaggtgctgaacgaacgcaacagcaccatgatcatcatctcgcacgaccgtcacttcctgaacatggtctgcacccacatggcggatctggattacggcgaactgcgcgtttatccgggcaactacgacgaatacatgaccgccgccacccaggcgcgtgaacgtctgctggccgacaacgccaagaagaaggcgcagatcaacgagctgcaatcgttcgtcagccgtttcagcgccaacgcctccaaatccaagcaggccacctcgcgcgcccgccagatcgacaagatccagctggaagaagtgaaggcctccagccgccagaacccgttcatccgtttcgatcaggacaagaagctgttccgtaacgcgctggaagtggaagcgctcaccaagggcttcgacaacggcccgctgttcagcaagctgaacctgatggtggaagtgggtgagaaggttgcggtgctgggcgccaacggcatcggtaaaaccaccctgctgaaaacgctggtgggcgacgcgcagccggacagcggcagcgtgaagtggtcggaaaacgcccgtatcggttactacgcgcaggatcacgaatacgagtttgacgataccctgaccgtgttcgactggatgagccagtggaagcaggaaaaagacgatgagcaggcggtgcgcagcgtgttgggccgtttactgttcagccaggacgacatcaagaagaaagtgaaggtgctgtccggcggtgagaagggccgcatgttgttcggcaagctgatgatgcagcgcccgaatattctggtgatggacgaaccgaccaaccacctggatatggaatccattgaatcgctgaacatggcgctggagatgtacgaaggcacgctgatcttcgtctcccacgaccgtgagttcgtcagttcgctggcgacgcgcattctggaaatcaccccgaacaaggtgatcgactttaccggcaactacgaagactatctgcgcagccagggcatcgtgtaa

SEQ ID NO: 422265 - DNA, 756 bp, Serratia marcescens
atgctgccggaattgaccgacgccgaagcgctgcgctacaaccgccagatcgtgctgcgcggctttgacttcgacggccaggagaagctgaaggccgcccgcgtgctgatcgccgggctgggcgggctgggctgcgccgccgcgccatatctggcagcggccggcgtcggccatctggtgctggtggatttcgacaccgtctcgctctccaacctgcagcgccagatcctgcaccgcgacgatcgcatcggccagagcaaggtcgcttcagccaagcgggaactgagcgccatcaacccgcatatccgcatcgacgcgatcgacggccgtttggaagatgacgcggtcgcggcagagatcgccgcctgcgatctggtgctggactgcaccgacaacgtggcggcgcgcgatgccctgaaccgcctgtgccacgcgcagcagaggccgctggtttccggcgcggcgatccgcatggaaggccagctcagcgtgttcacctatcagccgggcgagccctgctaccgctgcctgagccggctgttcggcgacagcgccctcacctgcgtcgaagcgggcgtgatggcgccgctggtcggcactatcggcaccctgcaggcgatggaggccatcaagctgctggccgactatggtcagccgctgcgcggcaagctgttgatgttcgatgcgatgagcatgcagttccgcgagatgaaactgccgaaggatccgcactgcgaggtgtgcggcggggaatga

SEQ ID NO: 422266 - DNA, 1239 bp, Serratia marcescens
atggatcattgccatacttccgatctcatttccctggagcaagcgctggaaaaaatgctcgggcagatcgccccgctgcagcagaccgaatccatcgccctgaccgccgccaccggccgcatcaccgccgcgccggtggtctcaccgctcgacgtgccgccgttcgccaactcggcgatggacggctatgctgtgcgcctcgccgatctggcggccaatgcgccgctgccggtcgccggtaaggccttcgccggcgcgccgttcgacggccaatggccggccaacagctgcgtgcgcatcatgaccggcgcgccgatcccggccggggcggacgcgatagtgatgcaggagcaggccgaggtgagcgaccagggcgtgcgttttaccgcgccggttgaagccggacagaatatccgtctggcgggtgaagacattcgccgcggcgcgagcgtgttgccggcgggcgtgaagctgggcgccgcgcagctgccgctgctggcttcgcttggcgtcgccgaggtgcaggtgatgcgtaagctgaaggtggcggtgttctccaccggcgacgaactgcagccggtcggccaggcgctgcaggcgggccaaatctacgacactaaccgtttcgcggtgcgcctgatgctggaacagctgggctgcgaggtgctcgatctcggcattatccgcgacgatcgcgatgcactgcgcgccgctttcgaacgggcggacagccaggccgacgtggtcatcagcagcggcggcgtctcggtcggtgaggccgactacaccaaacagatgctcgacgagctgggccaggtcagcttctggaagctggcgatcaaacccggcaaacccttcgccttcggcaagctgggccacgcctggttctgcggcctgccgggcaacccggtttccgccgccctgaccttctaccagctggtgcagccgctgctggcgaagctggccggccacagcgactggcgcctgccgccgcgcctgcgggcgcgcgcattgacgccgctgaagaaatcgccgggccgcctcgatttccagcgcggcgtgttcagcagcaacgccgcaggcgaactggaggtcagcaccaccggccaccagggctcgcacgtcttcagctcctacagccagggcaactgtttcatcgtgctggagcgcgaacgcggttcggtggcggtaggcgaaacggtggagatcgagccattcaatgccctgctgaggagctga

SEQ ID NO: 422267 - DNA, 537 bp, Serratia marcescens
atgcataaacaggttatcgacttctggttcgacgagatcgaaccgatcatgtggttcaaaaaggacgacgatttcgatcgtctgctgcacagtcgtttcggcgaaatctggcgcgcggcggcggcgggggaattggcgcactggcgcgacaccatcgaggggcgcctggcggaggtgatcgtgctcgatcagttcagccgcaacctgttccgcggcacgccgcagtcgttcgcctgcgacggcatggcgctgatcctggcgcaggaggcgatccgcagcggcgagtgcgaacggctgagccgcgagcagcgcggtttcctttatctgccgttcatgcattcggaatcgccgctaatccaccagcaggcgctggtgctgtacaccgagctcaataacggcgaccagctggagttcgagcttcggcacaaggcgatcatcgatcgtttcggccgctacccgcatcgcaatgcgatattggggcgcaccagcacgccggaagaagaggcttttttacagcagcccggatcgggtttttaa

SEQ ID NO: 422268 - DNA, 957 bp, Serratia marcescens
atgagcaaaccagtgattgccattcatggcggcgcgggcgcaattacccgggcggcgctgagtgcggaaaaagaacggcagtatatccaggcgctgtccgagatcgtgaccgccgggcaggcgatactggcccagggcggcagcgcgctggacgcggtgaccgaagcggtgcggctgctcgaagagtgcccgctgttcaacgccggcaaaggctcggtgtttacccatcagggcacccacgagcttgatgcctgcgtgatggacggccgcacctgcgatgccggcgccgtcgccggcgtcagccgcatccgcaacccggtgctggcggcgcgcgcggtgctggaaaatagcgaacacgtgctgtttgccgccgaaggcgccgagaagtttgccgccgcccacggcctggaaatggtcgctcccgatttcttctttacccaggaacgtttcgatcagctgcaccgcgcccaggcggagcagggccgggtattgctcgatcacgacggcgcggcgcaggccggcgatccgctcgatcccgatcgcaaattcggcaccgtcggcgcggtggcgctggatgcgctgggcaacctcgccgccgccacttcgaccggcggcatgaccaacaagcaggccgggcgggtaggcgacacgccgattatcggcgccggctgctatgccaacaacgccaccgtggcggtttccagcaccggcaccggcgaaatcttcatgcgcggcgtggcggcctatgacgtctccgccctgatcgaatacggcgatctgagcctgcaggcggccagcgatcgggtggtgatggagaagctgcctgcactgggcggcagcggcggcatgatcgccgtcgatcgccacggcaatatcgcgctgccgttcaactgcgaggggatgtatcgcggttttggctatgtcggcgatgcgccgtccgtcgggatttaccgctaa

SEQ ID NO: 422269 - DNA, 1878 bp, Serratia marcescens
atgaccgacgttttacttcgacccgccgccagcggcgggccgtcattgccgccgcagcgggtgctgacggtgcgcgatctgagcatcagctttcctcaaccggacggcgccgtggcagcggtgcgcaacctgtcgttcgatctcgatcgcggcgagacgctggcgatcgtcggtgagtccggctccggcaaatcggtcacttcgctggggctgatgcggctggtggagcagggcggcgggcgcatcgtcggcggcgtcatgacgctgcgtcggcgcgacggcgcgctgctcgatctggcgcaggcctcgcagagcacgctgcgcacggtgcgcggcgccgacatggcgatgatcttccaggagccgatgacctcgctcaacccggtatttccggtcggcgagcagatcgccgaatcgctgcgcctgcatcagggcatggatcgccgcagcgcgcgccaggaggcgctgcgcatgctcgatctggtgcgtattccggaggccaaagaggtgctggggcgttacccgcaccagctttccggcggcatgcgccagcgggtgatgatcgccatggcgctctcctgcaagccggcgctgctgatcgccgatgaacccaccaccgccctcgacgtcaccattcaggcgcagatcctgcagctgatccgcgtgctgcaacgggagatgcagatgggggtgatcttcattactcacgacatgggcgtggtggcagagatcgccgatcgggtgctggtgatgcgccgcggcgagcaggtggaacagaatcgggtgcgcgagctgtttgccgcgccgcagcaggcctatacccgggcgctgttggcggcggtgccgaagctgggggcgatggccgatcggccgctgccggcgaagtttccgttgccgggcggcgagggggatacggcgccgcaggataccgtgccgcccggcgccgcgccgatcctgcaggtggagcatctggttacgcgctttgatctgcgcggcgggttgttcaatcgggttactcgccgggtgcacgcggtggaaaacgtcagtttcgatctttaccccggcgagacactggggctggtgggcgagtccggctgcggcaagtccaccaccgggcgctctttgctgaagctggtggacagccagagcggcaccatcaccttcgccgggcggcggatagatcagttgaaggggccggccctgcagcacctgcggcgcgatattcagttcatttttcaggatccatacgcttcgcttgatccgcgtctgacggtcggtttttccatcatggagccgctgctggtgcacaacgtgatgcgcggccgcgaggcggagcaacgggtggcctggctgctggagcgcgtcggcctgctgccggagcatgcgcgccgctacccgcacgaattttccggcggccagcgccagcgcatctgcatcgcgcgcgcgctggcgctgaacccgaaagtggtgatcgccgacgaggcggtgtcggcgctggacgtgtcgattcaggcgcagatcgtcaatctgctgctcgacctgcagcgcgagttcggcgtcgcttttctgtttatttcacacgacatggcggtggtggagcgcatcagccaccgggtggcggtgatgtacctcgggcagatcgtcgagatcggcccacggcaggcggtgttcgacaacccgcagcacccttacacccgcaaactgatggcggcggtgccggtggccgatcccgcccacgcccacaaacggcagccgctgccggccgatgagatcccgagcccggtgcgcgcgctgggcgatgaacccgttaccgcaccgctggtgcaggttggcgccgggcactttgtcgcccgccacccgatcgccggtgctttttaa

SEQ ID NO: 422270 - DNA, 1536 bp, Serratia marcescens
atgaagcacacattcaaacgcaatgcgctgttggccgccgtactgctggcggcgggaaccggcccggtctgggcggcgaaggacgcggtgatcgccgtggcctccaacttcaccaccctcgatccttacgacgccaacgatacgctgtcgcaggcggtggccaagtctttctatcaggggctgttcggcttcgacaaggacatgaagctggtgaacgtgctggcggacagctatgaggtcagcaaagacggcctgacctacaccgtcaaactgcaccaggggattaaattccacgacggtaccgcgttcaacgccgaggcggtgaaggtaaacctcgatcgcgccagcaacccggacagccacctcaagcgctacaacctgttcaagatgatcgacaaaaccgaagcggtggacgccaatacggtgaagatcgtgctgaaagcgccgttctcggcgttcgtcaacaacctggcgcacccggcggcggcgatcatctcgccggcggcgctgaagcaatacggcaaggagatcggtttccacccggtcggcaccgggccgtatcagttcatcacctggaaccagaccgatttcgtcaaggtgaagaagttcgacggctactggcagccggggctgccgaagctcgacagcatcacctggcgcccggtggtggataacaacacccgcgcggcgatgctgcaaaccggcgaggcgaccttcgccttcccgatcccttacgagcaggccaaggtgctggagggcaatgccaagctggacgtggtggccgcgccgtcgatcctgcagcgttacatcagcatgaacgtcactcagaagccgttcgacaacccgaaggtacgccaggcgctgaactatgccatcaacaaggacgcgctgatcaaagtggcgttcgccgggtacgcggtgccggcggaagggccggtgccgccggccattgacttcgctgcccgctataagccgtggccgtacgatccggccaaggcgcgcgagctgctgaaagaggccggctacccgaacggcttcaccaccacgctgtggtcttcccacaaccacagcaccgcgcagaaggtgctgcagttcacccagcagcagctggcgcaggtgggggtaaaagtgacggtgacggcgatggatgccgggcagcgtgcggcgcaggtggagagcgtcggggggaaggacaccggcgtgcgtctgttctacaccggctggtcggcctcgaccggggaagcggactgggcgctgtcgccgctgttctccacccaggcggcgccgccgaagcagttcaacaccgcgttctacagcaacccgcaggtggataaggatctgaccgacgcgctggcgaccaccgatcgcgccgagaagcagaagctgtatcaggacgcgcaggatcgcatttgggccgatgcgccctggatcttcctggcgaccgaacgtctgttgtcggccaacagcaaacagctgagcggtttctacgtgatgccggatacctcgttcaactttgataacgccgatctgaaataa

SEQ ID NO: 422271 - DNA, 921 bp, Serratia marcescens
atgctcaattattttctgaaacgactgctgggcctgatcccgacgctgctgatcgtggcggtgctggtgttcctgttcgtccacctgctgccgggcgatccggcgcggctggcggcggggccggaggccgacgaggcggtggtgcagctggtgcgcaaggatttggggctggatcagccgctgccgcagcagttcgcacacttcttcgtcaacgcgctgcggggcgacttcggcatctcgatggtgtccaagcgcccggtgagcgaagagatcgcctcgcgctttatgccgaccttttggctgaccgtcaccagcatgctgtgggcggtggcgttcggcctggcgatcggcgtggtgtcggcggtgtggcgcaaccgctggccggatcgcctcggcatgacgctggcggtgtcggggatctcgttcccggcctttgcgctcggtatgctgctgatgcaggtgttctcggtcgaactggggtggctgccgacggtgggcgccgacagctggcgacactacattctgccttcggtcaccctgggggcggcggtggcggcggtgatggcgcgtttcacccgcgcttcgttcgtcgaggtgctgcaggaagactacatgcgcaccgcgcgcgccaagggcgtgcgggaaagcgtggtggtgatgaaacacggcctgcgcaacgcgatgatcccggtggtgaccatgatggggctgcagttcggcttcctgctcggcggttcgatcgtggtggagaaggtgttcaactggccggggttggggcggttgctggtggactcggtggagatgcgcgattacccggtgatccaggccgaggtgctgctgttctcgctggaattcatcctgatcaacctgctggtggatatgctgtacgcggcgatcaacccggcgattcgttatcaatga

SEQ ID NO: 422272 - DNA, 909 bp, Serratia marcescens
atgattaagcattggcggcgcaacgccgcactgaaggcgatgccgcttatcgatcccaatgcggtacgcacgccgtggagcgagttttggcggcgttttcgccgccagcgggcggcgctggtcgccggtctgttggtgctgctgctgattgcggcggcgctgctggcgccttatctggcaccgttcgatgcggaaaactatttcgattacgatcggctgaacgaggggccttcgctgatgcactggctgggcgtggattctctcgggcgcgatatcttcagccgcatcctgatgggcacgcgcatttcgctggcggccggggtgttctcggtgctggcgggcggggcgatcggcaccctgctggggctgctggccggctactatgagggctggtgggatcgcctcaccatgcgcgtctgcgatgtgctgttcgcgtttcccggtattctgctggcgatcggcgtggtggcgatcatgggcagcggcatggccaacgtgatcgtcgcggtggcgatcttcagcattccggccttcgcccgcctggtgcgcggcaatacgctggtgctgaagcacctgacctatatcgaatcggcgcgcagcatcggcgcctcggactggaccatcatcctgcggcacattctgccgggcactctgtcttcgatcgtggtctattttaccctgcgcatcggcacctcgatcatcaccgccgccagcctgtcgtttctgggcctgggcgcccagccgccgacgccggagtggggggcgatgctcaacgaggcgcgcgccgatatggtgatcgcgccgcacgtggcgatcttccccagtctggcgatattcatcaccgtgctggcgttcaacctgttgggcgacggactgcgcgacgcgctcgatcctaagctgaagggatga

SEQ ID NO: 422273 - DNA, 315 bp, Serratia marcescens
atgcaatttacggtgtatgcgaatagggggaacagcgcggtttatcccctgctgcttgatgtgacgagcgatatcattgggcaattaaatcgtcgagttgtgatccctttgttgcccgttgaaaaatacccggggagtacgcgaccggaacgcttgatcccgttgatcagattgattgatgacaacgagtacgccgtgatgacatatgaaatggccagcatcccggttcgggctttgggggccgagttttgtgatgtttcccagtatcggaccaggataaaagccgccatcgactttcttcttgacggtatttga

SEQ ID NO: 422274 - DNA, 843 bp, Serratia marcescens
atgacgttgtcattggaacttctcgaagagcaccgcatgttcggcggctggcagcagcgctatcgccacgcggcgcagagcctgaattgcaacatgacattcagcatctacctgccgccgccgcgcgatgacaacccgccgccggtgctgtactggctgtcggggctgacctgcaacgacgagaacttcacgttgaaagccggcgcgcagcgcatcgccgccgagctgggcctggtgctggtaatgccggacaccagcccgcgcggcgacgaagtgccgaacgacgaaggctacgatctgggccagggcgccgggttctacctgaacgccacccaggcaccgtgggatcgccatttccgcatgtacgactacatcagcgccgaactgccggcgctgatcgaacagcacttcagcgtcagcgatcgtcagtcgatcttcggccactcgatgggcggccacggcgcgctgatgatggcgtttcgcaatccgcagcgcttccgctcggtatcggcgttcgcgccgatcgttaacccgtgccaggtgccgtggggccgcaaggcgttcaccgcctatctgggcagcgacgaaagccagtggctgcagtacgacagttgccatctgctggccagcggcgcggagaaaatgccggtccttatcgatcagggcgacgacgaccagttcctggccgaccagctgcagccggcgcggttagcggagctggcgcgccagcgcgactggccgctgacgctgcgcattcagccggggtacgatcacagctacttcaccatcgccaccttcgtggaagatcacctgcgcttccacgccgagcacctgttccgctga

SEQ ID NO: 422275 - DNA, 1125 bp, Serratia marcescens
atggagatgatcaaaacccgcgccgccgttgcctggggcccgaaccagccgctgaagatcgaagaagtcgagctgatgccaccgcaaaaaggcgaagtgctggtgcggatcgtcgccaccggcgtttgtcacaccgacgcctacaccctgtccggcaaagatccggaaggcgtgttcccggcgatcctcggccacgagggcggcggcgtggtggaagcggtcggtgaaggcgtcaccagcgtggcagtcggcgatcacgtgatcccgctctacaccccggagtgcggcgagtgcaaattctgtaaatccggcaagaccaacctgtgccaggcgatccgcgccacccagggcaaagggctgatgccggacggcaccacccgcttcttcaaggatggcaagccgatcttccactacatgggcacctccaccttctccgagtacaccgtggtgccggaaatctcactggcgaaaatcaacaaggaagcgccgctggaagaagtgtgcctgctgggctgcggcgtgaccaccggcatgggcgcggtgatgaacaccgccaaagtgcaaccgggcgacaccgtggcgatcttcggcctgggcggcatcggcctgtcggcgatcatcggcgcgcagatggccggcgcgggccgcatcatcggcatcgacatcaacaccagcaagttcgatctggcacgcaagctgggcgctaccgatctgatcaacccgaaagactatgacaagccgattcaggacgtgatcgtcgagctgaccgacggcggcgtcgatttctccttcgagtgcatcggcaacgtcaacgtgatgcgttccgcgctggagtgctgccacaagggctggggtgaatcggtgatcatcggcgtcgcaggcgcgggcgaagagatctcgacccgtccgttccaactggtcaccggccgcgtctggcgcggttcggcgttcggcggcgtcaagggccgttcgcagctgccgggcatcgtcgaacgctatctggacggtgaattcgcgctgaacgactttatcacccataccatggggctggagcagatcaacgaagcgttcgatttgatgcacgaaggcaaatcgatccgttccgtcatccacttcgaccaataa

SEQ ID NO: 422276 - DNA, 921 bp, Serratia marcescens
atggatctgacccagcttcgcatgttctgctgcgtagcggaaaccggctcggtcgcccgcgccgccgagcagttgcaccgcgtgccgtcgaatctgaccacccgactgcgccagctcgaacaggagctgggcgccgatctgtttatccgcgaaaaacagcgcctgcgcctgtcgccgatgggccataactttctgtgctacgccaaccgcatcctggcgctgagcgacgaggcgatgagcatcacccacgccggcgaaccggcgggcaacttcgccctcggctcgatggagagcaccgccgctacccgcctgccctcgctgctggcggcttaccaccagcgcttctcgcaggtttcgctgtcgctgaccaccggcacctccggcgaaatcgccgatcgggtgcgcgccggcacgctggccgcggcgctggtcgacggcccggtaccctatgacgagctgaacggctgcatcgcctatcctgaacatatggtggtgatctcctgtctcgatcacgcgccgatccacagcgccaaagacgccaatggcgagacgctgttcgcctttcgcgccagctgctcctaccgcctgcggctggaggcctggttcaagcgcgaaggcgcacggccggggcaaattatggagatccagtcctatcacgccatgctggcctgcgtcgccagcggcgccgggctggcgatgatcccgcattcggtgctgagcctgctgccgggtcatgagcgggtccgggttcaccccctgccgccggacgtggccgacaccgccacctggctgctgtggcgccgcgacgcgttcggcccgaacgtgcgcgcgctgaaagagttgattattgaacagacggaaaccgccgctgttgatgaaagcacccccaacgatttatcagacgttgtcgatatcgcctga

SEQ ID NO: 422277 - DNA, 1158 bp, Serratia marcescens
atggctttacgtattgccttgagcggttttgccgcgctgatcgttgcgatgggcattggccgcttcgctttcaccccccaggtgccgctgatgatcgcggaacaccagttcacactgaccggcgccgggctggtggcggcgatcaactatttgggctacctgtgcggcgcctacgacgcgatgcgcgccacgcgccacgtcgagcggcgcctgtggcttggcgtgtggggcgcggtggcgctgacgctgctgtcggcgctggcgcaggatgaatggacgcacggcgcgctgcgcttcgtcatcggctgggccagcggctgggcgatggtgctggtggcggcctggaccaatgagcggttggcgcactacggccggccggcgctgagcgcggcggtgttcgccgggccgggcgccggtatcttcctcagcggcatgctggcggtgggcatcaacacgctggggctgacggcggcgcaggcctggctggtgtatggcgtgccggcgctggcgttggtgggggcgattagcgcctttctgccgcgcagcggcgagctgcatcgcccggacgtggccccggaaccgctgctgctgacgccggcgctcaaacgcctggtgtggagctacagcctggccgggttcggctacatcctgccggcgacgttcttgtcgcagatggcggcggcgcgttttcccggcagcctgttcgcgcagttcgtctggccggtgttcggcggcgcggcggtgctggggatcgttatcggcattttgacccgccatcggctgactacccagacccggttggcgatcacgctgtggatacaggcgctgggcgtgctgagcgccgaagtggtgccgggcgtggccggcctggcgctcggggcgttgctgaccggcggcggcttcctctgcgtggtgcagctcgcccttcagcacggccgtgaactggcgccgcgccatgcgcgttacatggccgggttgctgaccaccggttatgcgatcggccaactggtcgggccgatgctgtcggcgctgtcgaccgccttgacccatcgactggagccggcgctgtacgtagcggtggcggcgctgttggtggccggtgcgctggtggtgaataccccggcgcggcggttggcgcaaaaaacggcgatgcggtga

SEQ ID NO: 422278 - DNA, 666 bp, Serratia marcescens
atgacatcattaagtaaagaagccgcgctggtgcatgcggcgctggaagagcgtggtctggagacgccgctgcgcggggaagtgctggatcgcgaaacgcgcaagcgccgcatcaaagagcacatgaccgaaatcatgcagctgctgaacctcgatctgtccgatgacagcctggcggagacgccgcatcgcatcgccaaaatgtatgtcgacgagatcttctccgggctggactacgccaacttcccgaaaatcaccgttatcgagaacaagatgaaggtggatgagatggtgacggtgcgcgatatcacgctgaccagcacctgcgaacaccacttcgtgaccatcgacggcaaggccaccgtggcctatatcccgaaagactcggtgatcggcctgtcgaagatcaaccgcatcgtgcagttcttctcccagcgtccgcaggtgcaagagcgcctgacccagcagatcctggtggcgctgcagaccctgctcggcaccaataacgtggcggtatcgatcgatgcggtccattattgtgtcaaggcgcgcggcatccgcgacgcgaccagcgccaccaccaccacttcgttgggggggctgttcaagtccagccagaatacccgccaggagttcctgcgcgcggtgcgtcatcaccaggggtga

SEQ ID NO: 422279 - DNA, 1173 bp, Serratia marcescens
atgaacagtcaccctctgccgcgcatcgccacgctggactgcgtgcgcggcatcgccatcctcggcattttattgctgaacatcagcgccttcggcttgccgaaggccgcctacctcaacccggcctatttgggcatgccgtcatcgcgcgacgcctggacctgggcgctgctcgatctgttcgcccaggccaagttcctggcgatgttcgcgctgctgttcggcgccgggctgcaaatgctgctgcggcgcggcaaaagctggatccgcgcgcggctgtcgtggctgctgttgttcggtcttgcgcatgccatcttcctgtgggacggcgacattctgctggcctacgggctgattggcctggtgtgctggcgcatgatccgcgaggccagggaaaccttccagctgctgaaaaccggcgtggtgctgtatttgatcggcgtggcggtgctgctgttgctcggttttatctcgcacggtgagccgggcagcttctggcagccgggcgcggcggagctgcagtacgagaagttctggaagctgcagggcggtttcgaagcctggcgcagccgcgccgatctgctctcgtccagcctgctggccatcggcgcgcagtatggctgggagctggcggggctgatgctgttcggcgccgggttgatgcgcagcggctggctgcgcggcagttattcctccggttattatttgcggcaggcggcgtggctgctgccgctttcggtgctgatccagctgccggcggtggcgctgcaatggcaggtgcattgggactatcgctggagcggtttcctgctgcaggtgccgcgcgagctgggcgccccgctgcaggcgatgggctatctggcgctgtgttacggtttctggcccgcgctgtcgcgcatgcgcatcgcccactggctgaccctggtggggcgcatggcgttgagcaactacctgctgcaaacgctgatctgcaccacgctgttttatcgctttggcctctatgagcagttcgaccggctgcagctgttggcgttcgtgccgctggtctggctggccaacctggcgttttccgcactgtggctgcgttacttcgaacaggggccgatggagtggctgtggcgcaagctgacgcagctggccgccggcgaagcggaacccaaaacgctgaagtga

SEQ ID NO: 422280 - DNA, 1038 bp, Serratia marcescens
atgcctccagttcatccgatcaccatccgcgacgtggcgaaacgtgccggggtctccgtggcgaccgtctcccgcgtgctgaaccacagcgcgctgaccagcaaggagacgcgcgagcaggtgctgcaggcggtggcggagctgggctatcgccccaacgccaacgcgcaggcgctggcgacccaaagcagcgataccctgggcgtggtggtgatggacgtctccgatccgttcttcggcgcgctggtgaaagcggtagacacggtggcgcagaaacaccacaaatacctgctgatcggcaacagctatcatcaggcggacaaagagcgccacgcgatcgaagtgctgattcgccagcgctgtaacgccctgattgttcacgccaaagccctgagcgacgccgagctgatcggctttctggagcaggtgccgggcatggtgctgatcaaccggattattcccggctatgagccgcgctgcgtcgggctggataacgtctgcggcgcggaaatggcgatgcgtcttttgctgtcgcagggccatcggcgcatcggctatctgggctccaatcacccgatcgaagacgggccgctgcgccagcagggctatgcgcaggcgatggccgccgccgggctggccacgcccgacaactggcgcgcctacggttcgccggatctgcagggcggcgaggcggcgatggtggagctgctggggcgtaacttacagctgagcgcggtgttcgcctacaacgacgccatggccgccggcgccatggcggtgctgaaagaaaacggtatcacggtgccgcagcatttctcgctgatcggcttcgacgacatccccatcgcacgttacaccagccccaagcttaccacggtgcgctacccgatcgtctcgatggccacgctggccaccgagctggcgttgcagggcgcggcaggcctgacggagccgcaggccgctcatctgttcatgccgacgctggtgcggcgccattctgtcgccccctggcaaagtgaggcgacggtcactctctga

SEQ ID NO: 422281 - DNA, 993 bp, Serratia marcescens
atgaataagaaggttttcaccctggccgccatggccgcagccatgatgtttggcgccgcagcccatgctgacacccgtattggcgtcacgatttacaagtacgacgacaacttcatgtcggtggtgcgcaaggcgatagagaaggacgccaaggcttcaccggacgtcaccctgctgatgaatgactcgcagaacgaccagtccaagcagaacgatcagatcgacgtgctgctggccaagggcgtgaaagcgctggcgatcaacctggtcgacccggccgcggcgccggtggttatcgataaggcgcgcgcaaacgatatcccggtggtgttctacaacaaagagccttcccgcaaggcgttggacagctatgagaaggcgtattacgtcggcaccgactccaaagaatccggcgtgatccagggcgagctgatcgccaaacactggcaagccaacccggcctgggatctgaacaaagacggccagatccagttcgtgctgctgaaaggcgagccgggccacccggatgccgaagcgcgcaccacctacgtggtgaaaacgctgaacgagaaaggcatcaagacccagcagctacagatggataccgcgatgtgggataccgcgcaggcgaaagacaagatggacgcctggctctccggcccgaacgccaacaagattgaagtggtgatcgccaacaacgacgccatggcgatgggcgcggtggaagcgctgaaggcgcataacaagaccactatcccggtatttggcgtcgatgcgttgcctgaggcgctggcgctggtgaaatccggcgcgatggcgggcacggtgctgaacgacgccgacaaccaggcgaaagccaccttcgagctggcgaagaacctggcggcgggcaaaccggccaccgaaggcacccaatataaaatcgaaaataaagtcgtgcgtattccttacgtcggcgtagataaagacaacctgtctcagtttgttaaataa

SEQ ID NO: 422282 - DNA, 1509 bp, Serratia marcescens
atggccgatagctcacgcgaatttttgctggaaatgacggatatctgtaagtcatttcccggcgtcaaagccttggacaatgtcaatttacgcgtccgcccgcattcgattcacgccctgatgggggagaacggcgcgggtaaatcgacgttgctgaaatgcctgttcggcatttacaaaaaagacagcggcagcattgtgtttcagggccgggagatcgatttcaagagttcgaaagaagcgctggagcacggcgtttccatggtgcaccaggagctgaacctggtgctgcagcgcaccgtgatggacaacatgtggctggggcgctatccgaccaaaggcctgttcgtcgatcaggaaaaaatgctcaaagacacccaggcgatcttcgacgagctggatatcgacatcaacccgcgcgaaaaggtgggcaacctgtcggtgtcgcagatgcagatgatcgagatcgccaaggcattttcctacgacgccaaaatcgtcatcatggatgagccgacctcctcgctgacggagaaagaggtcaatcacctgttcaccattatccgcaagctgaaagagcgcggctgcggcatcgtttatatctcgcacaagatggaagagatcttccagctgtgcgacgagataacggtgctgcgcgacggccagtggatagccacccaaccgctggaagggctggatatggacaagatcatcgccatgatggtcggccgttcgctcagccagcgcttccccgacaggcagaacacgccgggtgaggtgatcctcgaggtgaaaaacctgacgtcgctgcgccagccctcgatccgtgatgtgtccttcgatctgcaccaaggcgagatcctcggcatcgccgggctggtgggcgccaagcgcaccgatatcgtcgagacgctgttcggcattcgcgaaaaggtggcgggcaccatcaagctgcacggcaaagcgatcgataaccacagcgccaacgaagcgatcaaccacggttttgcgctggtgaccgaagagcgccgatccaccgggatttacgcttacctcgacgtgggcttcaactcgctgatctccaatatccgcaattataaaaacaagctcggcctgctggataacgcgcggatgaagagcgacacccagtgggtgatcgacgccatgcgggtgaaaacgccggggcatcacacccatatcggctcgctgtccggcggcaatcagcagaaggtgatcatcggccgctggctgctgacgcagccggagatcctgatgctggatgaaccgacgcgcggcatcgacgtgggcgccaagttcgagatttatcagctgatgaccgaactggcgaagaagggcaaggggatcattatcgtctcgtccgaaatgccggagcttttggggatcaccgaccgtattttggtgatgagcaatggtcaggttgcgggcatcgttaacaccaaacagacctcgcaaaatgaaatcttacgtctcgcctccctgcacctttaa

SEQ ID NO: 422283 - DNA, 1011 bp, Serratia marcescens
atgaacgcgctaaataaaaaaaccttatttacctatttcaaggaaggcggcatttacgtggtgttgctggtgctgttggccatcatcatcattcaggatcctaccttcctcagcctgatgaacctgagcaacatcctgacgcagtcttcggtgcgcatcatcatcgcgctgggcgtggcggggctgatcgtgacccagggcaccgacctgtccgccgggcggcaggtggggctggcggcggtggtggcggccacgctgctgcagtcgatggataacgtcaacaaggtgttcccgcacatggaaacctggtcgattcccctggttatcctgctggtgtgtgcggtcggcgcggtgatcggcctggttaacggcctgattatcgcctatctcaacgtgacgccgttcatcaccaccctgggcaccatgatcatcgtctacggcatcaactcgctgtattacgactcggtcggcgcttcgccggtggcgggcttcgatccgaagttctccacctttgcccagggcttcttgcgcttcggcgactttaagctgtcgtacattaccttctatgcgctgatcgccatcatattcgtctggatcctgtggaccaagacccgcttcggcaagaacattttcgccatcggcggcaacccggaagcggccaaggtgtccggggtcaacgtgccgctgaacctgatcatgatctatgcgctgtccggcgtgttctacgccttcggcggcctgctggaagcggggcgcatcggcagcgccaccaataacctcggctttatgtatgagctggacgccatcgccgcctgcgtggtggggggcgtctccttcgccggcggggtgggtacggtgtggggcgtggtgaccggggtgatcatctttaccgtcatcaactacggcctgacctatatcggcatcaacccgtactggcagtacatcatcaagggcagcatcatcatcttcgccgtggcgctggactcgttgaaatacgccaagaagaagtag

SEQ ID NO: 422284 - DNA, 744 bp, Serratia marcescens
atgtggaaacgcctgatcatcagcctgttcatcttcattgcggtgttgatgggttcggctattgcgctcgatcgctggatcagctggaaaaccgcgccttacgtctacgacgaactgcaggcattgccgcaccgccaggtcggcgtggtgctcggcaccgccaagtattaccgcaccggggtgatcaaccagtactaccgttaccgcattcagggggcgatcaacgcctataacagcggcaaggtgaaatacctgctgctgagcggcgacaacgcccagcaaagctataatgagccgatgaccatgcgccgcgatctgatcgccgccggcgtggcgccgagcgatatcgtgctggactacgccggcttccgcaccctggattccatcgtgcgcacccgcaaggtgttcgacaccaacgatttcatcatcatcacccagcgcttccactgcgagcgcgcgctgttcatcgccctgcacatgggcattcaggcgcagtgctacgcggtgccgtcgccgaaagacatgatgacggtgcgcgcccgcgagatcttcgcccgcctgggcgcactgaccgatctctatatcctcaagcgcgaaccgcgcttcctcggcccgctgatcccgatttccgccatgcacaccgtaccggaagacgcccagggctatcccgccgtttcgccggaacagctggtcgagctggagcacaagctgaaagaagagaagcagaaagccaaacagccctga

SEQ ID NO: 422285 - DNA, 1698 bp, Serratia marcescens
atggaactagaatacgaaagcaaacgcccgctctacatcccttacgccggcccgattctgctggaatttccgctgctgaacaaaggcagcgctttcaccgaggaagaacgtagccacttcaacctgcacggcctgctgccggaagcggtggaaaccatcgaagaacaggtggaacgcgcctaccgtcagtatcaggatttcaagaacgataacgacaagcacatctacctgcgcaacatccaggacaccaacgaaaccctgttctaccgcctgctggactcgcacctgagcgagatgatgccgatcatctacaccccgaccgtcggcgaggcctgcgagcacttctccgatatctatcgccgcgcgcgcgggctgttcatctcctacccgaaccgcgatcgcatcgatgacatgctgcaaaacgccaccaagcagaacgtcaaggtgatcgtggtcaccgacggcgaacgcattctcggcctgggcgaccagggcatcggcggcatgggcattccaatcggcaagctgtcgctgtataccgcctgcggcggcatcagcccggcctataccctgccggtggtgctggacgtcggcaccaacaacccgcagcgcctcaacgatccgctgtacatgggctggcgccatccgcgcatctccggcgaggagtaccacgccttcgtcgaagagtttattcaggcggtcaaacgccgctggccgaacgtgctgctgcagttcgaagacttcgcgcagaacaacgccaccccgctgctgaaccgctatcgcgacgagatctgctgcttcaacgatgacatccagggcaccgccgcggtcaccctcggcagcctgatcgccgccagccgcgccgccggcagccagttgcgcgatcagaccgtcaccttcctcggcgccggttccgccggctgcggcatcgccgagcagatcatcgcgcagatgaaatccgaagggttgagcgaagacgaagcgcgcgcccgcgtgttcatggtcgaccgcttcggcctgctgaccgacaaactgccgaacctgctcgacttccagagcaagctggtgcagaagagcgacaacctggccggctgggaaaccgccagcgacgccatctcgctgctggacgtggtgcgcaacgccaagccgaccattctgatcggcgtgtccggccagccggggctgtttaccgaagagctgatccgcgagatgcacaagcactgtgaacgccctatcgtgatgccgctgtccaacccgacctcgcgcgtggaagcccgtccggaagacatcatcaactggaccgacggcgccgccctggtggcgaccggcagcccgttcgcgccggtgagctataaagatcagctgtacccgatcgcccagtgcaacaactcctatatcttccccgggatcggcctcggcgtgctggcctccggcgccacccgcgtcaccgacgccatgctgatggccgccagccgcgcgctggcggactgctcgccgctggccaccgacggccacggcgcgctgctgccaaatatcgacgatattcagggcgtgtcgaagtgcatcgccatggaagtgggtaaagccgcgcagctgcagggcgtggcgatcgtcacctccgaagacgcgctgtcgaaagccatcgaacacaacttctggcggccgcagtaccgcagctacaagcgcacctcgttctga

SEQ ID NO: 422286 - DNA, 885 bp, Serratia marcescens
atgcatccgcgttttcacaccgcgttcagcgcactgcccgcgacactgcaatccgccctgcagccctatctggacgcgcctgactttccggcgatgttcacggccgagcaagcggaggcgatccgcacaggctgcgggctggacgatgatgcgctggcattcgcgctgctgccgctggcggcggcctgctcgttaaccccgatatcgcacttccacgtcggcgccatcgcgcgcgggcaaagcggcaacctctatttcggcgccaatatggaattcagcggcgcgccgctgcagcaatccgtgcatgcggaacagagtgcggtaacgcacgcctggctgcgcggcgaaaaagcgctagcctcggtcaccgtcaactacacgccgtgcggccattgccgccagtttatgaatgaactgaacagcggcggcgagctgcagatccgtctgccgggccgcgcgccggccacgctggcggactatctgccggacgccttcggcccgaaagatctggatgtcgcctcgctgctgatggacgaggtcgatcatggccatcagctggcgctgaacgatgcgctggcacaagcggcgctggcggcggccaaccgaagccacgcgccgtacagcaacgcccacagcggcgtggcgctggaaacggcggacggcatcatctacgccggccgctatgcggaaaacgccgccttcaacccgagcctgccgccgctgcaggccgcgctgatcctgctgaacctctccggcggtgactgcctgaacatccgccgcgccgtgctggccgaaccgcaggaggcgatcatcagtcagtgggacgccacccgcgtcaccctggcggcgctgggctgccagaacgtcagccgcgccgcgttctaa

SEQ ID NO: 422287 - DNA, 696 bp, Serratia marcescens
atgatccatgaaatctggtggtcgctgccgctgacgctggcggtctatttcgccgcgcgctggctggcgcgcaagctgaatatgccgctgctcaacccgctgctggtttccatggcggtgatcatcccgctgctgctgctcaccggcatcccctatgagcgttacttcctgggcagcaaaatcctcaacgatctgctgcagccggcggtcgtcgcgctggccttcccgctgtatgagcagttgcaccagatccgcgcgcgctggaaatcgattatcgcggtgtgcttcatcggcagcctgaccgccatgatcagcggcggcgccatcgccctgtggctgggtgccacgccggaaatcgccgcctctatcctgccgaaatcggtcactacgccgatcgccatggccgtcgcggactcgctcggcggcattccggcgatcagcgcggtctgcgtcattttcgtcggtatcctcggcgccgtgttcggccatacgctgttcaacctgttgaaaatcaccacccactcggcgcgcggcctggcgatgggcaccgcgtcccacgcgctgggcaccgcacgctgcgcggagatggactaccaggaaggcgctttcggctcgctggcgctggtgatctgcggcatcatcacctcgctgctggcaccgttcctgttcccggtgctgctgcacctgttcagttga

SEQ ID NO: 422288 - DNA, 408 bp, Serratia marcescens
atggccaacgtgctcacactatgctggaaatacctgagggctctgctcctcatctacctttgtctgttcgtcggcaacgcgctggcggcgctgctgccgttcgccattcccggcagcattctcggcatgctgctgctgttcgccctgctctctacccagattatgccggccaaatgggttaaacccggctgccatctgctgatccgctacatggtgctgctgttcgtgccgatcggcgtcggggtgatgaaatactacgaccagatcgtcgcgcatctgggcccgctggttatctcttgcctgatcagtacgctgatggtgctggtggtggtcggctatacctcacattattttcatcgcgagcgccgcatcgccggcaaacccgacgacacggagggtaactcatga

SEQ ID NO: 422289 - DNA, 1215 bp, Serratia marcescens
atgaagggattcccctcgctgatcaacgtactgctggccagttcactggtgttgaccatcggccgcggcgtgacgctgccgttcatcaccatctacctcaccgagcatttccatctgctgccgaagagcgtgggcgtgatcctgggcgtcagcctgaccctcggcatccttgccagcctgtacggcggctatctggtggacaaattcagcaaaaaccgcctgatcctgctgtcgattgtcttgtttgcgctgagcttcttcgccattccctggatcccgcgccccggcggcgtcatcgtggtgctggcgatcctgcatacctgctattcggtgctgagcatcaccatcaaggcctgcttcgccgactggctgccggtcgagcagcgcatcaaggctttctctatcaactatacgttggtcaacgtcggctgggcgatcggctctgcgctcggcgtgctggtggccgggcttagcccgctgctgccgttttatctgtcgggcgggttggcgctggcgacggtggcggcgctgagcctgcgcttgcgcggccgggaacagcgcccggcgccaaccgccgccgcaccggcggcgctccccaacttccgccagacggtaactatcctgcgcagcgatcggcggcttatctacttcactctcggcagcaccctgggcgccgtggtgttcggtcagttcaccggctatctgtcgcagtacctgatcaccgtctccagcgccgagttcgcctacaagatcatcgggctggtgatgatcgtcaacgccggcatcgttatcgccctgcaatacttgctcagccgcggcatgcgccaggaaaacatgctgcgctggctggtgctgggcacgctgtttttcatcgtcgggctgctcggtttcatgatggccggccaggcggtctggctgtggatggtggcgatggcggtgtttaccctcggcgaaatcatcgtcattccggtggaatacatgttcatcgactttatcgcgccgccgcatctgaaaggcagctactatggcgtgcaaaacctcagcgcgctgggcggcgccatcaatccggttctgagcggtatgctgctcagctatgccgcgccgccgttgatgttcgtgatgttgatcgtttgcgcgctgcttagcctgctgtttttcttccttggccatcggctggcagaacaggctgcggcaaccgccgaagacgcgcgctga

SEQ ID NO: 422290 - DNA, 1068 bp, Serratia marcescens
atgaaaaacctcaagacttcgctgctcgccctcagcctgctggccgccctgccgctgcaggcggcggaaaccgccgccgtgccggccgccatcgctcagcatcaggggccggtgcgcatcgcggtgatccgcaatctcggctccgacgacaacaccacgcaattcttggcgggcgccattcaggaagggcgcaagcttggcttcaaggtggacaccttcctcagcaacggcgacgacgcgcgcttccaggacttcgtcaaccaggctatcagccagaaatatgacggcatcattctctcgcaggggcgggccccctattccaccgagctggtcaaacgcatcgcggcggccggcatcgccgtcgcggctttcgataccgacgtcagcggcagcgttcccggcgtcaccgtctcacagcaggacgacgcttcactggccaacgcctccttcggccagttggtgaaggatttcaacggccaggccaacatcatcaaactctgggtggccggcttcccgccgatggaacgccgccaggccgcctatcagcagctgctgaaacagcatccgggcattcacgagctggaatcgatcggcgcggtctcctccgacgtgcagggcgataccgccaacaaggtgggcgcggtgctggcgaaatacccgaaaggcaagattgacgccatctggggcacctgggatgcctttacccagggcgcttacaaggcgctgaaagagaacggccgcaccgaaatcaagctgtacagcatcgatatctccaaccaggacttgcagctgatgcgcgaagccggcagcccgtggcaggtcagcgtggcggtggatccgaaacttatcggcgcgatcaacctgcgcctggtggccaacaagatcgccggggaaagcacgccggacagctatcagttcaaagcgacggtcattccgcaagcgctgctgctggcgcagccggggccggtcaacgtcgccgggctggcgaagatcatccccggctggggcagcagcagcgatttcgtccagccgtggttcgccacgctgcaggccgaacacggtaaatag

SEQ ID NO: 422291 - DNA, 2028 bp, Serratia marcescens
atggctcaagtcgcgaaaaaattattggtgacgtgcgcgctaccgtacgcaaatggttccatccatctcggccacatgctcgagcacatccaggcggatatctgggtgcgttaccaacgaatgcgcggccacgaagtgcatttcatctgcgcggacgacgcgcacggcacgcctatcatgctgaaagcgcagcaactgggcgtgaaaccggaagaaatgatcgcggagatgagccaggagcaccaacaggatttcgccggctttggcatcagctatgacaactaccattcgacccatagcgatgaaaaccgcgagctgtccaccctgatttacagccgcctgaaagaaaacggttttatcaagaaccgcaccatttctcagctgtacgatccggagaaaggcatgttcctgccggaccgtttcgtgaaaggcacctgcccgaaatgcaaatcgccggatcagtacggcgacaactgtgaagtgtgcggcgccacctacagcccgacggagctgatcgatccgaagtccgtggtttccggcgcgacgccggtgatgcgcgactccgagcacttcttcttcgacctgccggccttcagcgaaatgctgcaggcgtggacgcgctccggcgcgttgcaagagcaggtggcgaacaaaatgcaggagtggttcgaatccggcctgcagcagtgggacatctcccgcgatgcgccttacttcggcttcgagatcccggatgcgccgggcaaatacttctacgtctggctggacgcgccgatcggctacatgggctccttcaagaacctgtgcgacaagcgcggcgatctggacttcgacgaattctggcgcaaagactccaccaccgagctgtatcactttatcggcaaggacatcgtctacttccacagcctgttctggccggcaatgctggaaggcagcaacttccgcaaaccgaccaacctgttcgtgcacggctacgtgacggtgaacggcgccaaaatgtccaaatcgcgcggcaccttcatcaaggccggcacctacctgcagcatctggacgccgactgcctgcgctattactacgccgccaagctctcttcacgcattgatgatatcgatctcaatctggaagacttcgtgcagcgcgtaaacgccgacatcgtcaacaaggtggtgaacctggcgtcgcgcaacgccggctttatcaacaagcgcttcggcggcaagctggccgacagcctggccgatccggcgctgtatcagaccttcgtcgacgcggcgcagagcattgccgaagcttacgccggccgcgagttcagccgcgcgatccgcgaaatcatggcgctggccgatctggccaaccgctacgtggatgagcaggcaccttgggtggtggcgaaggaagaaggccgcgacgccgatctgcaggccatctgctcgatgggcatcaacctgttccgcgtgctgatgacttacctgaagccggtgctgccttcgctgaccgaacgcgccgaagcgttcctcaacgccgagctgagctgggacgcaatcccgcagccgctgctgggtcatcaggtgaacgcattcaaagcgctgttcaaccgcatcgatctggacaaggtcagcgaaatggtcaacgcctcgaaggaagacatggccgccgccaaaccggtgaccggtccattggccgatgatcctattcaggaaaccatcaccttcgacgacttcgccaaggtggacatgcgcatcgccctgatcaagagcgccgactttgtcgaaggctctgacaaactgctgaaactgcagctggatctgggcggcgaatcgcgccagatcttctccggcattcgctccgcttacccggatccgaaagcgctggaaggccgcctgaccatcatggtcgccaacctggcgccgcgcaaaatgcgtttcggcgtttcggaaggcatggtgatggcggcgggccccggcgggaaagagatcttcctgctgagcccggacagcggcgcgcagcccggcatgcaggtcaagtaa

SEQ ID NO: 422292 - DNA, 1113 bp, Serratia marcescens
atgaacgcaaaatcccctgagcagaccaaccccgaagttctgcgcgccctggtgaccggtgtactggccgcctttgaacacccgacgttgaaaaacaacctgaccgcattgaaggccattcatcactgcgcgttgctggacgatgtgctgcatatcgaactgacgatgccgtttgcctggcagagcggttttgaggcgctgcaggcgagcgtcggccccgaattgctgcgcgtgaccggcgcttccgccatcgactggaagctgaaacatgacatcacgacgctgaaacgcgccaacggccaggccggcatcaaaggcgtgcgcaacattgtcgccgtcagctccggcaaaggcggggtgggcaaatccagcaccgccgtcaacctggcgctggcgctggccgccgagggtgccaaggtcggcattctggacgccgacatttacggcccgtcgatccccaacatgctgggcaccgaacatgagcggccgacttcgccggacggtcagcacatggcgccaatcatggcgcacggcctggcgaccaactccatcggctatctggtgaccgacgacaacgccatggtgtggcgcggcccgatggccagcaaggcgctgatgcagctgctgcaggatacgctgtggccggatctggattatctggtgctggacatgccgccgggcaccggcgacatccagctgacgctgtcgcagaacattccggtaaccggcgcgctggtggtcaccacgccgcaggatatcgccttgctggatgccgccaagggcatcgtgatgttcgagaaagtgcatgtgccggtgctgggcatcgtggagaacatgagcgtacatatctgcagcaactgcggccaccatgagccgatcttcggcaccggcggcgccgagaagctggtgcagaaataccacagccgcctgctggggcagatgccgctccatatctcgctgcgcgaagacctggatcgcggtacgccgacggtgatcagccgcccggacagcgaattcgccgaaatgtatcgtcaactggccggtcgcgtggctgcgcagatgtattggcagggcgaggcaatcccgacagagattgcgttccgcgcgctgtaa

SEQ ID NO: 422293 - DNA, 630 bp, Serratia marcescens
gtgctggattggtattttctgacttttttcggcgacagcatgttgttgctgccctgcgcgctgattctgtttttattgctgctcatgtctcccgccacccgcgcggcgggttggcagtgggcgctgatcttcggattcaccggcggggtggtctgcctgtccaaactggcctttatgggctggggcatcggcagcgagcgctttgatttcaccggattcagcggccattcagctctcgcggccagcatctggccgccactgctctggacgttgaccggccgattttcccacccgatacgcagcatcgctttgctgaccggatggatattgcctttcgccatcggcgtgtcgcggctggaaattcgcgtgcattcggtatcagaggtgatcagcgggctgattttaggctacctggccagcgcactgttcctgcggttgcagcggaacaaagcgcgcccgcatctctcctggccgcacttcgccatcgcgctggccttgcccttggcgctaatggggcagcggcagccggcccccacccagggattgctggagcatatcgccaaaacgctggcgcagatcgaacgcccttatacccgggcagatttgcacaaccccacccgcatcccataa

SEQ ID NO: 422294 - DNA, 642 bp, Serratia marcescens
atgactgacaatccgcatcagtgcgtcattattggtatagctggcgcatctgcctccggaaaaagccttattgccagcacgttgtaccgcgaactccgcgagcaggtcggcgatgagcacatcggcgttattccagaagacagttactataaagaccagactcacctgaccatggaagaacgggtcaaaaccaactatgaccacccgagcgccatggatcacaacctgctgttccagcatctgcaaatgctgaaggccggcaaggcgatcgaactgccgctgtacagctacaccgaacacacgcgcaagaaagaaaccgtccatctcgaacctaaaaaagtgattattctggaagggatcttgctgctgacggatatccgcctgcgccaggagatgaacttctcgatctttgtcgacacgccgctcgatatctgcctgatgcgtcgcatgaagcgcgacgtcaatgagcgcggccgctcgatggattcggtgatggcgcaataccagaaaaccgtgcgcccgatgttcctgcagtttatcgaaccttccaaacaatacgccgatatcatcgtcccgcgcggcggcaaaaaccgcatcgcgatcgatattctgaaagccaaaatcagccaattctttgaataa

SEQ ID NO: 422295 - DNA, 582 bp, Serratia marcescens
atgagactgtgcgaccgcgatatagaagcctggctggatagcgagaaactggtgatttccccgcgcccgccgctcgaacgcatcaacggggccacagtagatgtccgtttgggcaatcagttccgcgtgttccgcggccataccgcgccttttatcgatcttagcgggccgaaagacgaagtcagcgccgcgctggatcgcgtgatgagcgacgagattgtcctgccggaaggcgaggcgttcttccttcatcccggtgaactggccctggcggtgaccttcgaatccgtgacgctgccgaacgatctcgtgggctggctcgacggccgctcttctctggcgcgtctggggctgatggtgcacgtgaccgcgcaccgtatcgatccgggctggcacgggcgcatcgtgctggagttttacaactccggcaagctgccgctggcgctgcggccggggatgctgattggtgccttgagctttgagccgttgtccggccccgcggcccggccatacaacagccggcaggacgcaaaatatcgcgatcagcagggcgcagtagccagtcgaatcgacaaggactaa

SEQ ID NO: 422296 - DNA, 1833 bp, Serratia marcescens
atgagaagattactgacgacattggcgattttactggtggtcgtggtggcggggatgtccgcgctggtactgctggtcaatccgaatgattttcgcggttacatggtcaaaaaggtcgagcagaagagcggctaccagctgacgctcgaaggcgatctgcgttggcatatctggccgcagctcagcattttggccgggcgcatgacgctgaccgcgccgggcgccaaggcgccggtggtgagcgcggaaaacatgcgtcttgacgtcaaactgttgccgctgctgtcgcatcagctgtttgtgaaacaggtgatgttgaaaaacgccgtcattcgcctcacgcccgacagtgaagagctctcgcaagtggacgccccgattgcgccggccggcagcggcgctgatgcggcagacgcggcctggaaattcgatatcgataacctgcgcgtcgtggacagcctgttgatttggcagcgcgccgacaacgagcaaatcaatgtccgggacatcaatcttaccctgcagcaaacggagaaacggcaggcgcggctggacatctccagtcgggtcaaccgcgatcagcgcgacctggccttcagcatggcggccgatatcgatcttcagcagttcccgcaccagatcggtgccaaggtgacccagttcaattaccaattgtcgggggcggatattccgaacggcggtattcaaggcgagggcaatgctcaggtggtctatcagcagacgccggcgcaaattgccgtcagccagctgaacgtcagtgccaataacagtcagttgaccggcgatatcagcgccagcctgggggcggtgcccggctatgtggtgaacctgaattcggctaatctcgatctcgacgcgctttccggttggcaatccagcaccaataccgccgagcagcctgccgtgaccgccgcgccggtgatcgccagccaggttgacgatcggcagcagaacctggaagcgctgcgcgatttcaatgcacagctgaatctgcaggcggcgcagttgacctaccgcggtatgaacgttacccagttagccgtcgcggcggataatcaacgcggcctgctgacgctgcataaacttgccgggcgattggccggcggcgatttctccttgccgggatcgctcgatgctcgcggcaataaaccggtgataaacgtgcagccgaccctgaaccaggttgagctcggcacggtgctcaaagccttcgacatgccgcagatgctgaccggcaaattcagcatgaaaggagatttgaccggcgatcgcctttcttcacagtcatttgagcaccgttggcgcggtacggcgcagttggcaatgcaggatgcgcagttgcacggcctgaacattcagcaattgatccaacaggcggtggcgcgcaacgataacagcgtgcgcgggcaagacagctatcagcgctataccgaagtcaaaagcgtctcggcgcgggccagcctgagccagggcactgtcaagctcagcagcctgacggcggattcgcctttgctggcgctgaccggcgccggcagtatcgatatgccgggaaaacagtgcgatatggcgcttaacgtgcgcgtcacaggcggctggcaagggcgcggcgaactgatcgagcaactgcaaaaaacgccgatcccgctgcgggtttacgggccgtggcaacggctgaattaccaactgcaggtcgatcaggtgctgcgcaaaacgctgcaggatcgggctaaagatgcgctgaacaaatgggctgaaaagaacaaggattcgcgcgaaggccaggatctgaaaaagctgctcgacaaactgtaa

SEQ ID NO: 422297 - DNA, 1353 bp, Serratia marcescens
atgatagagcttcttattggcgcggcggtggcggcgggcgtgggccgttacatcatcaaaggatattccgccaccggtgtcttgatggtgggcgggttactgctgcttggcatcagcgccctgatggggaaaacgctgttgccgtccggcgccgcgtctaccggctggcgcgcgaccgatattatcgaatacgtcaagatcttgctgatgagccgcggcggcgatctgggcatgatgatcatgatgctgtgcggtttcgccgcctacatgacgcatatcggcgccaacgacgtggtcgtcaagctggcctcgcgcccgttgcagatgatcaactcgccttatctgctgatggtggcggcctattttgtcgcttgcctgatgtcattggcggtctcttccgccactggtctcggcgtattgctgatggcgacgctgttcccattgatggtgaacgttggcatcagccgcggggcggcggcggccatttgcgcttcgccggcggcgattatcctggcgccgacctccggcgacgtggtgctggcggccaaggcggcggagatgccgctggtggacttcgcgttcaaaaccacgctgcctatctcgattgccgccatcgtctgcatggccgtggcgcactttttctggcagcgttatctcgacaggaagagtgatgaacagcatcacatcgtggacgtcagcgaaatcaaaacgcatgcaccggggttctacgcgatactgccgtttacgccgatcctcggcgtgctgatcttcgacggcaaatgggggccggagctgcacatcattaccgtgctggtagggtgcatactgttggcggccgcgatcgagttcgtgcgcagcttcagcgccaaacaggtattcagcggcctggaagtggcgtatcgcggcatggcggacgcattcgccagcgtagtgatgctgttggtggccgcgggcgtcttcgcgcaggggttgagcaccgtcggctttatcagcggattgatcgggttggcgcagtcgttcggcaccggcggtttgatcatgatgctggtgttggtggtgattaccatgctggcggccatgaccaccggctccggcaatgcgccgttctatgcgtttgtcgaactgatcccgaaactggcggcgcagatgggcgtgaatccggcctacctggtgatcccgatgctgcaggcgtctaatctcggccgtacgctgtcgccggtctccggtgtggtggtggcggtctccgggatggcgaaaatctcgccgttcgacgtggtgaagcgcacttcggtgccggtgattgtcgggctggtggtggtgatcgtggcgacggagctgctggttccccagtaa

SEQ ID NO: 422298 - DNA, 1584 bp, Serratia marcescens
atggaatggatcgctgatccaacaatttgggccggcctggccacgttggtcgtgctggaaatcgtgctgggtatagacaaccttgtcttcatcgccattctggcggacaaactaccaaaacaacaaagagataaggcccgtgtcgtcggtctgttgctggcgctggtcatgcgtctggcgctgctcgcctccatctcgtggctggcgacgctgaccaaaccgatgttcatcgtcgcggagcaccccttcagcggtcgcgatctgatcatgctggtcggcgggatattcctgctgttcaaagccaccatggagcttaatgagcggctggaaggcaaggatgaagagcagcacggcgcgcgcaaaggcgcacgtttctggctggtggtggcgcagatcgtggtgctggacgccgttttctcgctcgactcggtgatcaccgccgttgggatggtcgatcacctggcggtgatgatgatcgcggtctgtatcgccatcggcctgatgctgctggccagcaaaccgctgacgcgtttcgtcaacgctcacccgactatcgttattctatgcctgagcttcctgctgatgatcggtttcagcctggtggcggagggcttcggctaccacattccgaaaggctatctctacgcggcgatcggcttctcggtaatgatcgaggcattgaaccagctggcgcagttcaaccgccgtcgtttcctgtcaaaggtgcggccactgcgcgaacgtaccgccgaggctgtgctgcgcatgctgagcggcaaacatgaagaagcggaggtcgacagccattccgccaacctgctggcggacagcgacagcgaaaacggcgagatcttcaaccagcaagagcggcgcatgatcgaacgcgtgctgggcatggcgcagcgcaccgtcagcagcatcatgacctcgcgtcacgacgtcgaataccttgagctgaacgatccgcaggaaaagctgacgcagttgctggagcgtaatcagcacacgcgcatcgtggtggtggaaagcagcgccagcgatgagccgctgggcgtgatccacaccatcgacgtcctcaaacagcagctggcgcaggcgccgctggatctgcgtgcgctgatacgccaaccgttgatcttcccggaacagctcacgctgttaagcgccctggaacaattccgccaggcgcagacgcactttgcctttgtggtcgatgagttcggctccgtcgaaggcgtcgtcaccctgacggacgtgatggaaaccatcgccggcaacctgccggaggccggcgaagaggtggacgcacgccacgacattcagcaaaacgaggacggcagctggatcgccaacggctatatgccgctggaagatctggtgttgtacttgccgatgccgctggaagaaaagcgcgaataccacacgctggcggggctattgatggaacacagccagcgcgtgccgcaagaaggcgaacaaatcaggatcggtgactacctgttcgagccgttggaggtcaacagccaccgcatccttaaagtgaagatcaccccgcctctcccagcggaggactacgaggtttaa

SEQ ID NO: 422299 - DNA, 897 bp, Serratia marcescens
atgcaaacaagactcaaggcagtgatccccgttgcggggttgggaacccgtatgttgccggcgaccaaggcgattcctaaagaaatgttgcccgtggtcgataagcccttaatccagtacattgttgctgaatgcgtggcggcggggattaaagatatcgtattggttacgcactcatcgaaaaacgcgattgaaaaccattttgacacttcttttgagctggaggccatgctcgaagcgcgtgtgaaacgccagctcctgagcgaagtgcaaagtatttgcccgccggacgttaccgtgatgcaggtgcgtcagggacaggcgaaagggttggggcatgcggtgctgtgcgccaagccaatggtgggtgattctccttttgttgtgctgttgcccgatgttttattggatgattctacggcggatttgcgtaaggaaaatctggctaaaatgatccagcgttttggtgatacgggttacagccaaatcatggttgaaccggtgccggaacaagatgtgtccaaatacggtgtggtagattgcgctggcgcgacgatcgcggcaggagaaagcgcgccgatgactgcggtggttgagaagccggcccgcgaggatgcgccttccaatctggccgtcgtcggccgatatgtgcttgccgccgatatttggccgttacttgagaaaacccctcccggcgcgggcgatgagattcaactgaccgatgcgattgcgatgttgatggatgagcaaacggtggaagcattccatatgagcggcaagtcccacgattgcggcgacaagtttggctatatgaaggcgtttgtgcagtatggtctgcgtcacggtacggaaggtgagaatttcagccgctggttgaagcagacgttaggaaagtaa

SEQ ID NO: 422300 - DNA, 894 bp, Serratia marcescens
atgacgaagttgaaagcggttattcccgttgccggattgggcatgcgtatgctgccggcgaccaaagcgattccgaaagagatgttgccaatcgttgataagccgttgattcaatacattgtcaacgaatgcgtcgcggcggggattaaagagatcatcctggtgacgcattcttccaagaacgccattgaaaaccatttcgatacctcattcgagctggaggcgatgttggaggcgcgcgtgaaacggcaattgctggatgaggtgcagtcgataacgccaaaaggcgtgacgctgatgcacattcgccaagggcagcctaaaggactggggcatgccgttctctgcgctaagccgttggtcggtgattctccttttgtcgtgctgttgccggacatcttgctggatgacgcgaaagccgatttgaagaaagacaacctgccacacatgattgcgcgctttgagcagaccggtctgagccaggttttggtgcaaaaggcagacgaacacgtactgcacgattattccgtggtggagtgtgaggccagcagcctggctcctggcgaaagtgctcgtatcacatcaattatcgaaaaaccggcgccggaaaccaagttggaatccaactactcggcggtggggcgctatgtcttgtctgcagatatttggccgctgctggagaccacggaaccgggagcctgggggcgcattcaactgaccgatgcgatagcagaattgttgaaacgcaaaccggtagaggcgacagagctggtgggggaatcgttcaactgcggcgaaaaactgggttacctgcgcgcttttgtcacttatggcttgcgtcacccgacccaaggcaaagcgttccgcgagtgggctgaacggctgtcgctttga

SEQ ID NO: 422301 - DNA, 1071 bp, Serratia marcescens
gtgtttcctggaacccatttatcgaccagcggaaaagaagtcgtaaaacaagaagatgctgacttcgatatcgataagatggttaacatttacccgatgacaccgaagttgttggactcgatgcgtccgacaaaggtggttgctcagccgaatgcgcagttggacgcatcgctgcgcacgtatgaataccggatcggggtaggtgacgtccttaatgtcaccgtttgggaccatccagaattgaccacgcctgcgggccaataccgcagcgccagcgacacaggcaactgggtacactccgacggcacaattttctatccttatatcggtaaggttaacgtggtgggtaaaaccgttacccaaattcgcgatcagatcgcctcccgtttggctcagtacatcgaaagcccgcaggttgacgttaatatcgccgctttccgctcgcaaaaagcttacgtgacgggcgaagttaccaaatccgggcagcagcctatcaccaacgtacctttgacggtgatggatgcgatcaacgccgccggcgggctgacggagaatgccgactggcgcaacatcatcctgacccacaacggcaaagaacagcgtctttcattgcagcaattgatgcagaatggggatttgactcagaaccatctgctctatcctggggatattctgtatattccgcgcaacgacgatcttaaagtgttcgtcatgggtgaagttaaaaccccatcgacgctaaaaatggatcgcagcggcatgacgctgacggaagcgctgggcaattctcaggggataagccaagctgcggcagatgcgaccggtgtcttcgttatccgcccactgcacggaacacagggcgacaaactggctaatatttatcagctcaacatgtccgatgcgacagcattggtgatgggggctgaattccatctgcaaccgtatgacattgtttacgtgacggcagcgcctatcgcgcgttggaaccgcctgatcgttcagctggcaccaaccatcgatagcttcaacaatctcacggaaggctcactgcgtatccgtaattggccgtag

SEQ ID NO: 422302 - DNA, 435 bp, Serratia marcescens
atgtttgattctatcttggttgtctgcgtaggtaatatttgccgctcccctacgggggagcgtctcttgaagcagcatctgccggacaaagagatcgcttccgcaggcatcggtgccttggttggcaaaaccgcggataagagcgctatttccattgcggaaaaacatcagctgtcgttagaagggcatgaagccaggcagttgacgaaagaaatgtgccgggaatattcattaattctggttatggagaaagggcatattgatgctgtttgccgcttggcgccggaggtcagaggcaaaaccatgcttttcgcccattggttggggcagaaagaaattcccgatccttacagaaagagcgccgaagcgtttgagtttgtttaccgccttcttgatgatgcagcccaaaaatgggcccaggcattaaatcgttaa

SEQ ID NO: 422303 - DNA, 2148 bp, Serratia marcescens
atgactgataatacgaaaccaggcttatcaacagccaataatcatgatgagattgatctaagtcgcttgctgggaactttaattgatcaccgctggctcatcatcgggattacagcgttattctctgttgccggtatcatttattccctgttcgccacgcctatatatcaagctgacgccatggttcaggttgagcaaaacgtcgggaactcgttggtcaacgacctatctcaaatgctgcctaacagtcagccgggttcttccacggagattgaactgatcaagtcacgcatggtgacgggtaagactgtcgatgatctgaatcttgaaacggtggtgcagcagaagtacttcccgatttttggccgcggctgggctcgtttgacgggtaccgaacctgccaaaattgcgctgtcccgtctcaatgtgcctgccaactctgacgatgttgagctggaattgaccgtgattgatgcccagcaatatgtgctgagcaacaacggcactgagattatcaaggggaaagttggcgcgctggagagtggccatgggatttctttgctggttagcgaaatttcggcggagccaggcactgtctttgaaatcgccaagttgccgcgtttggtggcgaccaacaatctgctggatgctttgacggttgaagacaaaggtaaagacaccggcgtgctggcgttgagtctggtcggggatgatcctgtcttggtgcgaaacattcttgacagcatcagcaaaaattacctgttgcagaacgtcgaacgtaaatcggaagaggcggctaaaagtctggacttcctgaaagatcagttgcctgaagttcgtagttctttggatagtgccgaagataaactcaaccgtttccgtcaggcgaatgattctgtcgatttgtcccttgaagcgaagtctgttttggacacgattgtgggggttgaggctcaactgaacgagctgacgttcaaagaggcggaaatttccaagctttataccaaagagcacccggcttatcgtgcattgatggaaaaacgcgccacgttgcaacaagaaaaagataagctgaacaagcgcgttagcgttatgccgaagacccagcaggaaatcttgcgtttgacccgtgatgtacaggcagggcaagagatctacatgcagttgctgaataaacagcaagaactgggcatcaccaaggcaagcacagttggtaacgtacgtatcgtggatcctgccgttacgcagcctcgtccggttaaaccgcaaaaaaccattatcgttctgatagtcacgttgctaggcggtctattctccaccggtttcgttttgcttaaaaccatgctgcatcgtggcatcgaaagtccggaacagttggaacagcaggggatcaacgtttacgcgagtattccgctgtccgaatggcagcaaaagagcgaccgcgagaccatgctgtccggcaagcgcagcagtaacaggagttacaccctacttgccgtgggcaacccggcggacttggcgattgaagccgtcagaagcttgcgtaccagtctgcattttgcctcgctggaagccaaaaataacgttctgatgatttccggtgccagcccaagcatcggtaaaacgtttgtcagcattaacctggcggcggtgatcgcccaggcgggtcagcgcattttggttgttgacgccgatatgcgcaaaggttatgcccactcgttgttgaactgtgaattgggattggggttgtctgacgtgttgtccggccaggcgtcggcgcagcaagcgatcaagcaaacatcgatcgagaatctcagctttatctcgcgcggcaagattcctccgaacccatcggagttgttgatgcacaaccgcctgacagagttcctggaatgggcgggcaaagagtatgacatcgtgttggtcgataccccaccgatcctggcggtaacggatgccgctattgtggcgcgcaatgtcggcacgacgctgttggttgcacgttacggcgtgaactcgctgaaagagattgaggtgagtattcgtcgcttcgaacaaaatggcatggaaattaaaggtattatccttaacgccgttgaaaataaatcgggtagcgcctacggctactacgcttacgaatataaataa

SEQ ID NO: 422304 - DNA, 690 bp, Serratia marcescens
atgagtaatcttgcaattattccggcaaggggtgggtcgaaaggtattcccaaaaaaaatattaaagaaattgcaggtaaaccattaatcgcttggagcatagagcaggcattaaattcttcgagtattgatcgtgttattgtttctacagattgtgaagatatcgctgccgtagccagagaatatggcgcggaagtcccgttcatgcgtccggcccatctggcgaacgataccgctgcgactgagcccgcgcttttgcatacgctggagtggttggctgaacatgagagttaccaccctgagtataccgtcctgttgcaggctacttctcctgttcgcaaagatgatgcgattgattctgcaatcagaaagattcttgaaaagaaagccgattcactgctgagcgtatgtgagttttggcatttcttgtgggaaaatgaagataatccgaaagcctattacgactacttaaaccgtccgcgtcggcaagatattaagcctgaaaatatcaaacttaaagaaaatggttcaatttacgttacgaaaagcgaaattctcctcagtaccggtaatcgtcttggtggcaaagttgtagcgcataagatgtcggaagaggaaagctttgaaattgacaccatgctggactgggcggttgttgaagtaattttgaaaaattggagtgggagataa

SEQ ID NO: 422305 - DNA, 2241 bp, Serratia marcescens
atgttaattcagaaaaaaatatctgactttttagtgtttgaaaccgaatcaatcattaaagccttagaaaaaatcaactcgaataaaaaacgcattatttttgttgtcaccgaagacggcaagctgtgcggctctttctcagacggtgatttccgtcgttggatcactaacggtgacttcgatctgagccgcgaaatgtcggaagtgatgaatcagaacgtccgctataaaaaagtggatgcgccacgcaatgagattgaatcgctgttttcgaatggcgttgacgttctgccgctggttgatgattatcgtcgtttggtcgccgttgcgctgcaaagcgaaaaaggcctgacgattggcaaacacactatcacggaaacctcgccgacttacattattgctgaaattggcaacaaccataatggcgatattaagctggctaagcatctggttgacctggcggttgacgcgggcgccgattgcgtcaagttccaaatgcgcgatctgagctctttgtataagggcggcaacgataaagacaaatccgccgatcttggcgcacagtacacgctggatctgctgagaaaattccagctcagcaatgaagaactgattgaagtgttcgattattgcaaggagaaggggctgaccccgctgtgtactccttgggatctgaagagcctggaagtgttggaaaactacggcatggaaggttataaggtcgcttccgctgacttcactaaccacgaaatgttggccgcgttggccgctacgggcaaaccgctgatttgttctaccggtatgtgcagcgaagcagaaatcaaaagctcggtagacttcttgaaatcgaaaggtgccgagtttgtgatcctgcattgcaactctacgtatccgacgccgttcaaagacgtcaacctggcctatatcaaacgtctgcagcaggtgacgggctgcttggtcggctattctggccatgagcgtggcatttcagtgccgatcgccgtgaccgcgctgggcgcaagagtgatcgaaaaacacttcaccatcgacaaatccatggaaggcaacgaccacaaggtgtcgttgttaccccctgagttcaaagagatggtcgtacgtatccgcgaagttgaagagtccatgggcaacgccggcgaacgtactatcacccaaggggaaatgatcaaccgcgaaactctggcaaaaagtttgattatcaatcgcgatctgaaaaaaggtgaaatcatcactcgcgagatggttgaagtgaagagtccggggcagggtctgcagcctctttatctggagcaattggtcggtaagaaagccaatcgtgaccacgaaaaaggcggatatttctatgagtcggatctaaatgatgtggcgatagaagccaaggactatgatttcaatcgtccgttcggcattccagtgcgctaccacgattacggcaagttgaagaataaatccaatctggacttcgtcgagttccatctgagctatcaggatatggaactcgatttgacagaattcttctccggcgctgaaaatatcggttttgcggtacatagccccgagctgttcgccaacgatcatattttggatctggcgacggatgatcccgtttatcttgctcattcgatcaaacagctgcagcgtgtctgcgatgtgactcgcgcgttgaagcaatatttcccgaaaactgagcgtccggtcatcgtggtgaatgcaggcggtttcaataccaccggtttcttgccaaaagaatcacgccaggcgatgtacgaacgcattggcgccgctctgggtgaaatcaatcaagaaggcgttgaaatcatcatccagacgatgcctccgttcccatggcactttggtggtcaaagctaccataacctgtttgtcgatccggacgagattaaagcgttctgtgagaaatacggctaccgcatctgctatgacacgtcgcattccatgatggcttgtaattactaccaatgggatcttcatgagtttacccaaaaggtcggcccttacaccgcacatatgcatattgttgatgctttgggagtggatggtgaaggggtacagatcggtaaaggcgatgtgaactttgacgagctggctgatgatctgcggcgtcatgcgccgggagcgcagtttattcctgaagtgtggcagggacacaaaaaccaaggggaagggttctggcatgcgcttaacttcctggaaaagtatctgtaa

SEQ ID NO: 422306 - DNA, 1224 bp, Serratia marcescens
atgggggctgcggccttgtcggtaggggatattctcggcaaggtcatcggcttcatcatattgccttatttgacagcacacctaggcgcgtcggggtacggcgcgctgactctttatttgtccgttattcagatcttgatcattttcatttcgttcagtggtcaaggtctgttgccggtcaaatacatgcaggagggggaagggagctccctggtgttccgcagagataacatcgccttggctttcgcgtcgagcgcgctactggtggctatattctacattgtcacactggtcgccaagatctctgtttctttcagcgacggttttctggttgttttggcatctctggcgcaggcgctgaactttatcaatttatcgcatttgcgcattagtcagacctataaagttgccgctatcggccaatttttgctttccgcattcaacgttttattcactatcgctctttttgaaatgatagcgtcgacgccaggacaacgtttgatagcgatcgcggcatcatttttcagcattcagctggcctacgagttctttgtttacagaaaaatagcggttgaacgcagcgtgctccaaccgttgcgtaagcgttataaggaaatcattagctacggggtatccctattgccacatcatggcagttattggattaaatcctcggtggatagattcttcatagcgcattacatgagtacggcggtagtcggggtttatggcttggcgtttcagctaacctctatcgttatgctctttttcggcgtaatcaaccaggcgttccaacctttcatttatcgcaagcttaaagcgaacgattttagaggagtcgagctcattcaatatggttacacagctctggttatcgtttcgtgcattatttacttctttattttgccatttgctttcccgtatctgtttaatgctgagttcaatcgcgccatttattacttcaacattcttttgcctggaactgcatttttatcgatttattatatttttacgcactcactgttttactatcgtaaaaataaattaatctcaattattaccatgggttcgatgataacgcatttgattggtatatttgtcatcaccatgacagaaatcaaagttgagtatttctgcctggtttatgcaatttccagtttttatgcatgtgcagtgactttttattgtggcaagcgacagatcagtattgagaggaaaagatga

SEQ ID NO: 422307 - DNA, 414 bp, Serratia marcescens
atgtataactgccgttcaatgaaatttgccttcagccttaagctgcagatagtgagcaacatcgcgttgcgaaaagggtttcgctggatggccgccggctatagcgtagggctctatatctttaaccaccacgctgccggcttggataatggccccttccccgatggaaaccccgggcagaacaatcacattgatcccaagccaaacattatccccgatatgcgtgtccttaatcacataagtgttatcgtagggaatcgcattcccatgatgattgtgattttcggtgatcaatacacaaccaaaaccacagtggaaattatcaccgatagtaacaccgccctttccaaccaccgtcaaaccattggagttaaagttatcaccaagtcgggttttattattaacgatagttaa

SEQ ID NO: 422308 - DNA, 1017 bp, Serratia marcescens
atgagtaaatacattgcgtatattgagtcaccgcttcaggcttttaatctcattgagtatcttgatgcaaagaacattgtgctcgatctgttgattgtcaataagcgttcggccaattctgcgctgaatcacgggcagattgtttatctgttgaacatgattaagcatcgctccctggaaaccattgatgtcgaagggaaactgggtaatgcttttgatattaaacggcaattgaagagtgtaacttccgtggtgagtgcgaaggaaactgtcactttgattgccggtgagtatcgcgcgagggttttttggattttagcgcataaatattcgagaagaaatgtggtcctgctggatgatggtacggcaacgctcagaattaaacgctacaataatctcactgctcggggcgtcgtgaagtcggttttcctcaagtcacttggtatgaccaataatgagagagaaaaaataacctttttctctgtttatgacatcgaaggtaatgtttcaaaaagagatgtggtcgttaagcacagttaccaaaattttaaggctaaactggccagtcttcctgatggaaagaacagagtcttcattataggtacgccgctttatgaggcaggggtaacgtctgttgatgatattgacttgacgctaagaatgataaatgacttaaagtcaaatcagatgggtgccgagcttgtttatattcctcaccgccgcgagcgtgaagagaaaatagatgaaatcagaaagtctgtagaggtccgtcggttggattttccctttgaggtttatcccattgtggctggtgagaacgtcagttgtatagccggattttattcatcattgtatgacaatctcgtaaaaatatatgatgaaaaaattaaaataatcgcttacgttcttgatgagaaagttttatcgccagagtggagtggatttgttaacgcgatttataaaaactatgagagttatgaaagcgcggatattacgctgattaaaaacaaattttaa

SEQ ID NO: 422309 - DNA, 855 bp, Serratia marcescens
atgcgtaaggagctgcgcaaattttctccggatgtggtgcataccaacaacctcagcggtttttccgtcgcagcgtggcgagtggccaagaagctgggggcgcgcgtggtacacacgactcgcgattattatctattccatccgaacggcacgttgtttaaacatggccaaaatatggacgtacagtcgtctgcagtgcgcatcgcatcttttctaaagaaaaaagccagtcagcgcgtagacgtttttgttggcataagtaaatatatttccgccttgcatcgggaaaatggatttgcgcgcaacgcggtacatacgcatatctacaaccctgtcgccgcgatagagtatgtaccgaccgtcaacgaaaaggtcaggatcggttttgtcggtcgcctcaccgaagacaaaggttttgatgagttttgtgctctggcaaaacaggccagcggcgatccgcaggttgcattctacgccgccggcagattcaatggtgacgccgctggcgagaggttgaaggtgttagcgttggaggcaggtattcatttgcttggctttatcaagattgaagagtttatgacgcagattgacgccgttgttctaccaacgcgatggaatgagccctttgggcgaaccgttgcggaatcggccatctctggtaaggttgtgtatacgcctttcaatggcggagtggcagaaatcgcagctttttatgataatattttcgagctaaaagatttttctgtcgccagtgtggttagcgtcgtgagagaaaataacaacaaaccgcgtcgttcgttttttgaactagaaaaaataaccgatgcttatgagagcgtgtatagagggtcataa

SEQ ID NO: 422310 - DNA, 1335 bp, Serratia marcescens
atgagggtatcgacaaagtcgttggttgtttttcttttgctgatgtacatgacattgctctcattgaatggcgttgtgaccgtcgctgcgtatatgtcgaccagggcacttttattatataaagacttttttgccatggcagtgccggttttcgtcctaatcttgctttttgcgcgtaaccctaacgtgtcaaaacagtgtagaagcgtaatgatctttttcctgtcgatggtgatcttctcgttagtttatgtacttttaagtatgatcaccggcaggtttgatttcttccgctctatcgttcagtttcgcttagagttactgacattcggttcttttttctttgccgccgttttacttctttttgaatataatgagcgtgtcgagattgttaataaaatcattaagtactatattttctttgccgtattgaatgcgctctttgcggtcgccgaatccagtttggcaggcctgctttatgcactaatcggttttgaccctggcccacagttgacacagtttggtaaagaatatggtcttctgttacgcaccattcaggggcaattacgtgcttttggtctgctcaccgggccattcagcctcagtgaatatctgttttttgcactggtattatcgccttatgtaagcgaaaaaaatcgcaagaaatatattcttctcattatggttgggatcgcattttcaacatcgaaaacggcgattatcatggcactgctttatatcatgttcctgatgctgagacgctttttctctcaacgttttagcctgaattcagtcactatggtaacgatggtcttgtcactgttcttttatattacgacgaccaattacagtatttatgagatgatattcccgaaggagaatgcttacgcggagaacagcattttacttcgtacggtcaatatagaagccgtgcgagctgacagtgagtattcgccatttatcggtgctgggtacgctgtgaatggcaacgcggtggttggtgatgacaatacgaactcaatcccgcttgatagtatgtatatctacatgttgtcgaattacggtaatgtcggcattatccttctggttattgtcgctacgttaattcttggcattctttatcagcgtactcgtcttggccttaaccccagtgtttacctatactggatgatctcgctttcgatgaatttcgtttataataacccgttgacaaattatccaggctatatattcgcaatcataatatcgattttgttattatcgattagaacgccggagacgggttccgtgagtcgctcaagaaaaaatgtaggttatgtgcaatcgctacattga

SEQ ID NO: 422311 - DNA, 1062 bp, Serratia marcescens
atgatttatgtcaatgcgcgattcttaacgcaggatttgacaggggttcagcggttcgctcaggaaatatgccttgcgctgagtaagattaggcatgatatcgtttttgtctcgccaccaaacattattcaccacgatatcgcgtcgcaattgaatgttcaggtggtgggtaagaaaagcggtcacttttgggagcaggtagagcttcctgcttttttaaagaaaaataaaagcccgcttctaataaatctttgcaatacggcgccgatcttttatcgtaataaaattgttactcatcacgatgttatatataaacgctatccgcaaagttactctgcaaagtttcgtttcgtttataataactttgttcccctgatgttgcgtcacagtaaggcgttgattacagttagcgaattttctaaaaaagaaattagccaggcgtttgactacccattaaataatatttacgtaatctataatgcggtgtccgagcagtttaaacccatagcgtcggcatccaatacagagcgcccttatttattggccgtttcgtctccaaattatcataagaactttcatggtctgattgccgctttctctcaaatggcaaacggccaggaagtgacactgaaaatcattggggccgccaacaagaacttcgcggatgttgggttttcgacggaaggaactgcaacgaacgataacatacagtttttggggcgtgtgagcgatcaacagcttgtagaactctattctcatgctcgcgcctttgtgttcccctctttatatgaagggttcggcattcctccgttagaagcgcaggcttgtggttgtgcggtagtagcgtccaatcgggcttctttgcccgaggtattgtcgaagagtgcattgtactttgatccggaaaacatcctggaaatgaaacaggcactggagcggattatgcaggatgaagcgttgcgccaaattttaatcgctgagggatttacgaatgtcaaacgtttcgattggatgcgttcggcagcagcgttgagcgagataatgacgagatctatgcaatga

SEQ ID NO: 422312 - DNA, 1065 bp, Serratia marcescens
atgaaaaaaaaagtgctgcatgtcgccgagacagtgaagggtggcgtcgctacggtaattagacaacttgtacagcaaaatgatgaatttgatttttactgtgtgttgcccgatagtcaatatcgtgagattggcgctttccccgcagaaaaaatgaaggtatttacgcggacagggagaaatatttcttcgtttatctctttggctattaactatatccagatggtacgtaaagaaaaaccggatgtcattcacgtccacagtacttttgcgggggttgtttgccggctgttaacgccattggtaagaatgacatgcaggcctaaaattatttattgtccgcatgctttttctttcctgatggacacatcagaaaagaaaaagaaggtttatgccaagatagagaaaattctgcaaaagaataccgatgttatcatctgtaccagcgaatatgagaaacgaacggcactgatggccgggttgagtcctgataatttgactgtggtatataatggcgttgaaccccctgtaacgctgtcggatgataccaatccttatcgccaagataaaataaatatattgtttgtcggccgttttgattatcaaaaaggatttgatttggttcagcggattgccgacgaattggatgacagatttttaatcacgatcgtcggcggcaatgtacacgcaaaagagcaaccggcatcacatgcccggatggattttaaaggttggttgacttcggcagaaatggcgccttatttcacctacgccgacgtgttgttgatgccaagccgatgggagtcgttcggtctggtcgccgttgaagctgaaagctatgggttgcccgttgtcgccagccgctgcagttcattgccggaggtggtgagcgaaggcgttacggggtatctgtttacgaccaatcaggccgatgaggccgttgagatattgaatgctcgcgaccaacgcgattggagtgcaatgaaagttgactgtgtcgatttctacaatgctaattttacttcagaaaaaatgatatccaatacttatcgtcattacagataa

SEQ ID NO: 422313 - DNA, 1416 bp, Serratia marcescens
atgagtaacctttatcctgttattatggctgggggaacagggagtcgcctgtggccgctttctcgtgaattattccccaaacagttcttagcgctgtgcaatgaattttccatgttgcaaacgacagtcatgcggcttaaagggttagagattattaatcctcttgttatatgtaacgaagagcatcgttttatcgtggccgaacaactgcgccaaatcacgcgtttatcgcataatattattctggagccggtagggcgtaatacggcgccggcgattgcgcttgccgctttgcaggcggtttccagcggtgacgatccgctcatgttggtattggccgcggatcacgtcattcaggacgaagcgattttccgcgatgcggtcaatcaggcgattccctatgctgaagcgggaaaactggctactttcggcatcgtgccgacgggcccggaaacgggctatgggtacattcaaaaaggtaccagcgtcgacggttccagtatctgcggcgtttcgcgctttgtcgaaaagcctaatcttgaaacggcgcagcagtatctggccagcggcgactatctctggaatagcggtatgtttttgttcaaagccagccgttacctggaagaattaggccgtttccgcccagatattctggacgcgtgcaagcagtcgcttgcgcatttgacccccgatatggactttatccgcgttgaccgagatgcgttcattgcctgcccggatgagtctgtcgattatgccgtgatggaacagactgccgatgctgtcgtcgtacccctggacgcgggatggaatgacgtgggatcatggtctgcgttgtgggaaatcagcgaaaaagacacaaaagggaactctactttcggtgatgttcttgagcataactgttcaaataactatattcgcgcggagcataaattggtggccgctgtcggggtgaccaatttggttgtagttgaaaccaaagatgccgtgttgattgccgataaagataacgtccaagacgtaaaagaaatcgtcaaccaactgaagcgacaaaagcgttccgaaagcaaacagcaccgtgaagtttatcgtccgtggggcaaacatgatgcgattgctcagggcgatcgcttccaggtgcgccgcattactgtaaagccaggcgagaaattgtccttgcagatgcaccatcatcgttcggaacactgggtagtggtgtcaggcactgccaaagtgcataccaatggtaaaatgcaactgatcagtgaaaacgaatccgtttatatccctcttggggtcgaacattctctcgaaaacccgggaaaaatcccgctggatttgattgagattcagtcgggtgcctatttgggagaagacgatatcgtgcgaatcggcgactccgctcagcataattaa

SEQ ID NO: 422314 - DNA, 1374 bp, Serratia marcescens
atgtctcaatcattgacttgtttcaaagcatacgacattcgcgggcagctgggtgaagagctgaacaacgatattgcctatcgtgtcggccgtgcatatggggagtttttgcaacctaaaagcgttgtcgtcgggggagacatccgtttgaccagcgaggaactgaaactcgcgttggcggaagggctgcgcgatgccggggttaatgttctggatattggcgtcagtgggacggaagaaatttattttgccactttccacttaggtctcgatggcggcatagaagtgacggccagtcataatcctatggattacaacggaatgaagctggtgcggagccaggctaaaccgatcagcggcgataccggtttgcgcgatattcagcgtttggcagaagataataacttcgctgcggtggatccgacccgacgcggcagctacgaaacaatatcgattgaaaaagaatatgtggatcatctgctgagctatgtgaatagggctaacttcaaaccgttgaagctggtcgtcaactccggcaacggcgctgcaggtcacgttatcgatgctgtcgaatcgcgtttcaagcagcttcaggtgccggttgaatttatcaaggttcaccaccagcctgacggcaatttccccaacggtatccctaacccgctgctgccggagtgtcgggaagatacggcgcaagcagtgcgtgcgcacaaggcggatatgggaatcgcgtttgacggtgatttcgatcgctgcttcttgttcgatgaacacggcggattcattgaaggttactatatcgttggcttgttggcggaggcgttcctggagaaagacgctggggcgaagatcattcatgacccgcgcttgagctggaacaccatcgacgtggtcaagcaggcaggcggggtgccggtgatgtcgaaaacgggccatgcattcattaaagagcgtatgcgcctggaagatgccgtttacggtggtgagatgagcgcccaccattacttccgcgacttttcatattgcgacagcggcatgatcccatggttgttggttgctgagttgctgtgcattaaaaacaagacgctcggggagttggtcggggatcggatgatcgcttatccagcatcgggtgaaattaacagcaaactgcaagatccaaaagctgcaattgaaagagtactcaatcgctatcagccttcggcactggaatttgatacgaccgatggcattagtctggaatttgcagactggcgatttaatttacgtagctcaaatactgagccggtggtgcgtttgaatgtcgaatcacgagccaatcctgcactgatgcagcaaaaaacagaggaaatactggccttgcttcgacgctga

SEQ ID NO: 422315 - DNA, 1395 bp, Serratia marcescens
atgaacggtttccgtcggggcgtgttgcatactaatgcgtctcttacttcaatgcttcagcgcttctctgatattttcgttatctttagcgggctgtacttgtcttgcctaatctccggtgccgcatttagcgtgcagcactggattatggtattaatatcgatcgttatcttccaaatgattggtgggattactgacttttatcgttcgtggcgtggtgtgcgtgcggggctggagatccagctcattttgcaaaactggtcgctgagcctgctgttgacctcaggaacggtggcgttgataaatgtcttcaataacgagtattccgtctatatccaatggtatctgctggtctgctgcggtttggtcattacgcgcagcgtgatccggctgctcttgggatacatgcgcaatattggtttcaatacccgtaatgtggccatcatgggcgcgatgcccgtcggtattcgtctggcagaatctttacgtgacgcgcactggatgggatttaaagtgttgggcatttacgacaacgataattctccgttgaacagcaaaatcgaacgctgcggcgacttgtctcagctcgtgagcgacgcgaaaagtggccgtatcgatagggtctatatcgcaatgtcgatggagcaggaaaaattgatcaaagatacgatcgcggatctttctgatacgacctgctcagtgatgctgatcccggatatctttacgttcaacatattacagtcacgatcggaagagattaatggcgttcccgtcgtttcgttattcgatacgccaatgagcggggttaatcaggtaattaagcgtattgaagacatcattctgtcaatatttattttgctgttcatttctccggttctgttgctgatcgcctgcatggtcaaatttacctcttccgggcccatcattttcaaacaaaggcgttatggcatggatggcaaggccatcgaggtatggaaattccgctcgatgaccgtgatggaagatggcgataaagtcgttcaagcgaaaaaaggggacgcgcgcctgacgccggtcggctccttcttgcgtcgtacctctctggatgaattgccgcaatttgtcaatgtactgaaaggcgacatgtcgattgtaggcccaaggccgcatgccgtggcacataatgaacagtatagaaagttgatcaacggctatatgctgcgccataaaatgaagccgggtatcacggggtgggcgcagatcaacggttggcgtggcgagacggatacgttggaaaaaatgcaaaagcgcgttgagttcgatctcgactacatccgtaactggagcgtttggttggacattaaaatcgtcttcctgaccattttcaagggattcattaataaagcggcgtattag

SEQ ID NO: 422316 - DNA, 1326 bp, Serratia marcescens
atgttgactaaaacaaaccgtaaactgaggtgctggaagggggcggcttcatcgctggccttcgcattgccgctgatgtttatcagtgcgaacgccttggctttcgaagtcggggttcatgcgcattttcgctggtatcccaacgatccggataaatatttggatctgattaagcgttacggtttcacgtcgtatcgagcggattttccctggagcggattggaacagcaaaaagggcagtatgtcataaccggcaatatgcaaaaggccgaccaagcgtttaacgatgcccaggcaaaatttggtctgaatgggttattagtattggcgtacggtaacaaactctacgatccatcgggttatccaacgacgcctgaagccattcaggcttttgccaactacgcgtattggacggcctccaaatataaaggcaagatcaagtattacgagatctggaacgaatggacgaatgccactgcgattaagccgaagccgcgcacgccaccgccgccggagatttttgtcgcgttggtgaaagctacggctgctgcggttcgaaaggccgatcccaacgcaattgtcattacgggaacggccaacccaacaggaactcgcgatccttcctgggttgataacatcgttaaactcggcgtgttgaattacgttgatggtttctccatccacccttactcctatggcaacgataattacgctatacgggcccctgaggggaacctcggcgtcgtggataaattcgaggctcggcttgcaaaggcagcaggtaagacggtgccgatttatatcactgaaatcggcgtgccaacctatgacggtaaaggcgggttatcaaaagatgtggctgcgcaatatgtggtgaaatatactttcctggccaaatcgcggccctttatcaaagggatatggtggtacgatttgctcgatgatggagacaacccgaaaatcaatgaacatcgatttgggctgctgacgagaaacggtcaaccgaagccgtcgatgctggctttaagtaaggtcgcagatgttgcgcgatcgtattccgttgagaaataccaagtgctgccgggcggtaaaatttccatcgcattgaaagggaataatcaacatgcgatgctattctggcaggaaaaaccggtggctaagcctgccagcggtatttcttcaggcttgcgtagttttatggcgagtgaggcgccgcaaaaccaaagtgctacgccgctcaaagaggttcaggggaatacggctgcacccgatggcgatgtaccggtaatgatgcgctccagtgctccgattgcctcgccctggtag

SEQ ID NO: 422317 - DNA, 2991 bp, Serratia marcescens
atggccacattagtagcacagcaaaaagcggctgcttttttccttgcaatctctggaaagaatattgataccgcggcgttagattactactcgcagaaaattgaaacttctgcactttctctggagcaagttgcgcaaaaattcattaccggcacctcaagcctgaacggtctgacggcttctcaaatcgtaaccaaggtctacaccgcagtgaacggtagtgcccccagcagcagcgtgcttgccgatcttttagcgggcaaccccaccacggcatccgttgttgccaaggtgattaacgacgtacttagctacagcggttttgattcaacgctgctgacagcacagagcaatttcgaagctcaagtcgaaaaaaccctgttccctgtcgcgacagccgcatcgtcggccggcgcagctgacgtacagggtgttttccatgtcgtgggcttaacgcaaactcaggacggcattacctactggggaaccgtattggcgcagggcagcaaaacgctggcggcggtcgcacaaaccttcgtgaacaacagcccgctgaaaacgttaagcgatagcgatttcatcaacgccatcttccaaaacagctatgaacgcgcaccaacttcggccgaaagcagcagctatctcgccttgctgagtggcggctcgactcgtggcgacgtcgtagctcaagtgatcgcagcactgaagggcaccgttgccgccggcgataccacggcccaacagcacttccaggcggcgacgcacgtgtggcaaccgggtgaactgccggctctgaactatcaggaacaagtcgcagcagccttcctggcaattcctggccgtggcgtcgatgcccgcgggctggacacctggagcaaagaactgtttgccggtaaaacttatgcacaggtcatcactaccctgatcaattcagcagagtcgcaaaagaaaggcgctcaattgactggcgatgattttgttcagcatatctttaccctggtgcatggcactgccgccaccgctgcgcaattagccagctatggtgcgctggggagcaaaacggccatcacgcaggccattatcaacgacctgcgcagctccgtcgccactgacagtgccaccgtcactcagcagcatggcttcgaatacgatatcggtaccagcctgctgtacaaaaccgcggcgtctctgacggcaacggccgccggcggcaacgcgacgggcaccgtcaacaccggcgcatctcaccaaattagcaatgccgaaacggcagtgttgacggatgtgcaactgaacgccaatgccgccagcatcgtgaacctgaagttcgccgaccacctggcgaatctgaccatcaacggcaccagtgcagcaacggtcaacctgtctgacaacggggttaaccctggtgtcgatattaccgttaacaatggcaacgtgattctgaacgccagttccggaaatgatgatgtcatcgtgacgtcgacggccaacatcgccacaggcaccggcgactttaaccttggcaacggcaacgactcgctgaaatgggcggggaatgcggcaaccggcgcagccaacaccgtcggcgccggcatctccgctaatggcggcgcgggtacggactccatctccgccaacttcatcaccaaaaccgtggtgaccaaccaaaacgccctgggcgttcgtaccagcaccgtgaccagcaacgccaacaacttctcgaacttcgagcagatcgacctgaccggctatatcggcaagtccgtcggtacgctgattacgacgccgctgatcggttcaccgactaccaccagcgtgacaacgccaaacaacacctttgactttggcctgaccaacggcacgtccacggtcgaaggcactacgggcggcacggttacgcagaacgcggcggccaccaatctgggcactcaggggtttgtggtctccggtctggctaacgtcaacgtcatcaacgccgccggcggcaacgccgcacagttggcagtgaaaggggacgcgaccgctgccagcacgctgaactttaccttcgtccagaatgccaccaatcacttcgacatcaacttcgatgcggtgagttccgccaatgtgaacgccggtgccatcaccctcaacagcagcagcagcctgattggcggtactgcattgagtacagttaacgtagcctcgggcggtaccggcagctttgacaatattctgtcattggccggcaccaatgcgcaggttcagaccatcaacgtgaccggtgatcacgcgctagatctgacggtgggcagcggtttcagcaacgtgcgtgatatcaatgcgtccaccaataccgcggggctgaatctcgactccagccatggcggtaccggtgacggtatcatcattcagttgctgaacattctgccgctgagcgttgtcaccaccaacctgttggcaccggtgttgacggcgttgggcctgaacggttaccaaatgaccgtagaaggttccagtgcggccgatactctgggcgtgattggcaacaccacgctgaccggcggcgcaggtgccaacacctacgacatcaaggccagtaacacgcaggcgggtgtgaccatcaaggactttaatagcctcaaggactcgattgtcgacgtaaaccatggcggcctgactatctccgatgacgccagcggcaccgcggtagcgaactacggtacgcgttctgccgacacgttggatgcattgttggggacactggtgggcggtttgaccaatggcgttatcggcctgctgggcggtattcttggcctggatagcagcaactcgctgacgtcgaaagtgggtgtggcatccgttgtattcagcggtggcggtaacactgccagctcttacgtgattatcgacaacaacgataaccactcgctggacctcaacgataccgtggtatacctgactgggcaaaaccaccagcaattggtggatacgttgcactacgcgtaa

SEQ ID NO: 422318 - DNA, 1650 bp, Serratia marcescens
atgctccaggtttatgaccgggtgcttccttctcgcaatgaaatcacgctgttgatgctgacgctgatcatgctgggcatgttcgggatgatgtcgctgttggaatacgtgcgcagcatggtggtgatccgtatcggcagccagctggatatgcggctcaacacgcgagtctataccgcggcctacgaggcgaatctgaaaaacggctcgtctgatgccggccagatgctgagcgatttgaccaatctgcgccaattcctcaccggcagcgcgctgttcgccttctttgatgcgccgtggtttccaatctatctgttggtgatattcctctttaacccttggttggggcttttcgctctggtcggtgcgctgttgctgatcgcattggcggtgatcaacgaaatggtgtcgaaaaagccgctggcggaagccagcaagctgtcgattatgtccgggacgctggccagcaccaatctgcgcaatgccgaagtgatcgaagctttggggatgttgcctaacctgaaacgccggtggttcggtctgcaccagcggttcttgaacagtcagcgcatcgccagcgaacgcgcatcgcgggtcacgtcgatcaccaagtttgtgcgcatgtcgctgcaatcattggtgctggggctggggggctggctggcgatcgatgggcacatcacgcccggtatgatgatcgccggttccattctgatggggcgaaccctggcgccgattgagcaggttattaacgtctggaagagctacagcgcggcgaagctttcttatggccggttggtcaagctgctggaaacgcatccgcaacggggtaccggcatgtccttgccgcgcccggaaggggtgctggccgtagaaggcgtcaccgccacgccgccgggatcccaaggcgatgcggtattgcataacgtgagttttgccatccagcccggtgacgtgctggggatcattggcccgagcgcgtcggggaaatcgacgctggcgcgtttgctggtcggcatttggccggtcagcgaagggattgttcggttggataatgccgacatctatcagtggaacaaggatgagttggggccgtatatcggctatctgccacaggacattgagctgtttgccgggactatcgccgagaatatcgcccgctttaacgatattgactcagagaaagtcattgaagccgccaagctggccggcgtgcacgaactgatcctgcgtttccctaacggctacgattcggtgctcggcaacggtggcgctgggctttccggtggacagaaacagcgtatcggcctggcgcgcgcattgtatggcgacccttcgctggtggtattggatgagcctaactccaacctggatgatgcgggcgagaaagcgttgaaccaggccattatgttcctcaagcaacgtaataaaacggtggttctgattacccatcgcaccaatttgctgtcgatgaccagcaagctgttgctcctggtaaatggcaacgtcaacgcattcggcccgactcaacaagtgcttcaggcgttagccaatgcgcaaaaagcgcaggcgcaaccgcctcagcaagcggtgagggcggtaaattccgagccggatgaaggcaatatcccgaaaacgcaaattaattaa

SEQ ID NO: 422319 - DNA, 1332 bp, Serratia marcescens
atgtcgacgcacattggcgagccgcaagactcgtatattgaagagatcccgcaggatgaacggcggtttacccggatgggctggctggtcgtgggaattggtctgttcggatttttggcctgggcagcgttcgcgcctctggataaaggggtggcatcgccgggatcggtaaccgtttccggcaaccgcaaaacggtgcaggccccggccagcggcatcatcaagaatatcgcggtgaaagacggcgacaaggtgaaagccggagaagtcctggtgcagttgagccaggtgcaggcacaggcgcaggtcgattccctgcgcgaccagtactacaccacgctggccaccgaagggcgtttactcgccgagcgcgacggtctgagcaacgtcactttttcccctatttttgcccagatcaaaactcagccgcgcgtggctgaaatcatcgcgttgcaaacgcagctgttcgcctcccgccgccaggggctgcaaagtgaaattgacggttataagcagtcgatggacgggattcgtttccaattgaaaggcctgcaggattcgcgcgccaacaagcagattcaactttccagcctgcgtgagcagatgaacagcatgaagcaactggcggcggacggctacctgccgcgcaaccgctacctggaagtgcagcgtcagtttgccgaggtgaacagcagcatcgatgaaaccgtcgggcggattggccagctgcaaaagcagctgcaggaatctcagcagcgtatcgaccagcgtttcgccgactatcagcgcgaggtcagaacgcaactggcgcaaacccaaatggacgccagcgagtttcgcaataagctgcaaatggccgatttcgatctgggcaacactgccatcacctcaccggtggacggcaccgtggtcggattgaatatcttcactcaggggggcgtcgtgggagcgggtgaccacctgatggacgttgtacccagccaggcgacattggtggtggattctcgcctcaaagtcgacctgatcgataaggtgtacaacgggttgccggtggatctgatgtttaccgccttcaaccaaaacaaaaccccgaaaattcctggaacggtcacgttggtttccgccgatcgcctggtcgacaaagccaacggcgagccttactaccagatgcaggtcacggtctcgccggagggcatgaagatgctcagtggcgaggacatcaagccggggatgccggtggaggtgttcgtgaaaacggggtcgcgctcgctgctgagctatctgtttaaacctattttggatcgcgctcatacttcattaaccgaggaataa

SEQ ID NO: 422320 - DNA, 1377 bp, Serratia marcescens
ttgattcaatcaaaacgacaggctgccggtctggttatcggcacccttttgtttgcgatatctgcgccggtttattcgatagggattttagacgcatattcgctggcattagaaaaggacccgactttccgggcggctataaaagagaaagaagcgggagatgagaacgaaaacatcggcagggcggggctgctgccgaaagtgtcgctgaactatcagaattcgccgcgcaactggcagacgcaaaaatatccgcagagcgactttttcggcaatgtttcggaggtcacccggcggcagcaatatcgcagttattccagttcgatcacgctgacgcagccgctgttcgattatgaagcgtacgcgcgctacaaagccggcgtcgcgcagacgatgatgtcggacgaacgctatcgcggtaagttgctggatcttgcggttagggtgattaacgcctatgtcgaagtggcctattccaaggatcaaatcgcgttggccgaagcgcaaaaggcggcttacaaggaacagctgaccttgaacgatcgcctgatgagcgccggtgaaggcaccattaccgacgtatcggaaacccaggcacgctacagcctggccgaagcgcaggtcatcgaagcgcacgatgcgctggatgccgcgcagcgcgaattggaagtgattatcggcatgccgctgaaccagctggatgagttgcaggtgttgcggccgggcaagttcaaggtggcgccgctgatcccgtccaagtttgaagagtggcaaaagatcgcgctggagaataacccggtgctggccgcctcgcgtcatggcgtggatgccgccaagtatgacgttgaaaggaatcgggcgggctttatgccgcaggttcagctgtatgcttcgcattcggaaaacgactccagcagcgataacacggttaaccagaaataccgcaccgacagcatcggcgtgcaggtcagcatgcctatttattccggcggcggcgtttcggcgtcgacccggcaggcggcggcgcgctatggccaggcgatgtatgagatggatgcgcagacgggcaccacgctcaacgatctgcgcaagcagtacaatctgtgcatcagcagccgcgccaaggtggcggcctatgagttggcggtacaatcggccaccacacaggtgacggcgacccggcaaagcgtgctggccgggcaacgtgtcaacgttgacgtgctcaacgccgaacagcagctctatagcgcccagcgcgatctggcctccgccaagtacgcctacatcaagtcgtggattaccttgctgagcgactccggtacgttggatgaaaaagatgttatgcgggtagcgcagtattttgcccgcagtcgctag

SEQ ID NO: 422321 - DNA, 1014 bp, Serratia marcescens
atggcggttttaatcaccggaggagccggttatatcggttctcacactgttctggctttgttagaacatggcgaagatgttgtagtattagataatttatcaaactcttccgatgagtctctgcgtcgcgttgagaaactcgcgggtagaagtgctcagttctaccaaggcgatatcttggatgctgagtgtctgcatcgcattttcgaggctcacgacatctcggctgtgatccattttgctgggctaaaggctgtcggagagtcgacgcgtaagccgctcgagtactatcagaacaatgtcaccggcacgttggttttgttggaggaaatgcgtcgtgcgggtgtgcataagtttatctttagttcttctgccacggtgtacggcaccccagagcaagttcctttgaccgagacgtctcgcgttggcggtacgacaaatccttacggcacgtcgaagctgatggtagaacaaattttgcaagatttcgctaaagcagaaccgcaattctccattaccgccttacgttacttcaacccggttggtgcgcacgaatccggcatgattggtgaagatccaaatggtattcccaacaatctgatgccttatattgctcaggtggcaatcggaaaactggagaaactgtctattttcggtgacgactatccgactaaggatggtacgggggtcagagattatattcatgtcatggatttggctgaagggcacctcaaggcgattgaacacatcgatgagcacagaggctttacagtctataatctggggacaggggtaggatattcggtgttggagatgctccatgcttttgaaaaggcttcaggtcgcaacgtagcttaccaaattgtaccacgccgagacggtgacattgccgaatgctggtccgctccagggttggcgttcaaagaattgggatggaaggctacccgtgatttggatgccatgatgcgtgatgcgtggaattggcagaagaacaaccctctgggttatcgctaa

SEQ ID NO: 422322 - DNA, 534 bp, Serratia marcescens
atgaaagtaattgatacaaagattgccggcgtcaaagtgattgaacctaagattttcggtgatcagcgtggcttctttttcgaaacgttccaaaagcaacgttaccaagaactacttgatattgaacatgattttgttcaagacaactattctcgttcgacacgtggcgtgctgcgaggtttgcactttcagacctctcgtccccaggggaagctggtctataccctaagaggggaggtctatgatgttgtggtggacatccgtccaaattcaccttctttcaaacaatggttagggatcaatctatctgagggtaacaagaagcaactgtggatcccacctggccttgcacatggtttcttggtgttgagtgatgaagtcgactttgcttataaatgcaccgattactatgatccgaagaacgagcactgcttgagttggaacgatcctgaactggcgattgaatggcctatagagcatccccagctttctgagaaggatcttaaaggcaaattattcagcgagcttttttaa

SEQ ID NO: 422323 - DNA, 882 bp, Serratia marcescens
atgcgtatactggtaactggcggcaatggtcaactaggccattgcttggcggatacattgcctggcaattggcagatcgttagcctggaccgcagacaacttgacattgctgattggcctgcagtgcagcaaactgttgcggagttgaatgtagatttcattgtaaatgcagcagcttatacgctagtggataaagctgaagaagaaatcatcgttgcggaggctgcaaatgttatcggtccagctaatctggctatgattgcagagagcctaagcattccactgattcatatttcgacagactatgtttttagcggtgcagaagagggcgtttctttgtgtgaagattcaccaacggggccgctaaatgtctatggtcaaaccaaactgcttggcgaaaaagccgtactaaccacgtgctcacgcgccgtggtgatccgcacatcctggttattcagtgagcatggcacctcttttgtgcataccatgcttaaattaggaaagacacgtaaatcgcttgctattattaacgatcagtttggtcgacctacctatgctggtgatttagctaaatgtattctcactattattagccaaggggttaatgaacccatgctatatcatttctgcggggacaagattgtctcgtggtttgagtttgctgcggagattttttctttagctaaggtatttgacgatagttatagatttatggctttgtcttctattaacagtgaacaatataaatgcgcagccaaaagacctaagcatgcgatacttaactgcgaaaaaatatatcgtgaacgcgggatctgcaatagcaactggcgagtgagcctggaaaaagtagttccaaaaattattgatcagatgaataattaa

SEQ ID NO: 422324 - DNA, 780 bp, Serratia marcescens
atgaagacattgttgaaaaatacaggtttgatttttaatcttaccaagcgggatgttgaaagtcgctatcgtgggactagtcttggtatcgtatggtcactgctaaaccctgtgattatgctttctatctatagctttatttttggctttgtttttaaagccaagtgggggctgacaacgacagaaaattacactttgattatgtttgccggtctgctgacacatggttttattgccgaatgccttggcaaggcgacaacaatatatgtatataatgtcagctatgttaaaaaagttttatttcctcttgaatccttgtgctgggtgtctgtttttggcgcattattccaattctttatgggatgcattgtttttgccattttttgtattttactaaagcaacctgttagtctaatggcattattagttcctattgttattcttccattgattttattatcatatagcatttcattatttttgtcatcgctaggtgtttatattcgtgatatggggcaggttgtttcagttatcattgccttaatgttatttatgtcgcctatattttatcctattactgctgttccagaacaatatcgtatgctgatttatattaatccgttaacgtttattgtcgaagctttacgtgatgtcgtcctgtacggaaaattattcagtcttgaaggctatgcactctattggggtatcagtattgtgctgtacgtattagctataacttggttcaaaaaggtaaagagaggctttgctgatgtcctctaa

SEQ ID NO: 422325 - DNA, 1218 bp, Serratia marcescens
atgtcctctaatattgttatctctgcgcaaaatctgcgtaaagtttatcagatttattccagcccgatgcagcgcctgggagccttactggggtatcggggggctaagggtagggagtttgtcgctctggattccgttaatttcgagattagaaaaggtgaaacagtcggtattattggtgtcaatggttccggtaaatcaactctgttgcaaatgatctgtggaactttggcgcctacaagcggcagcgtatttactaaagggcgtattgcaccgttgttagagcttggcgctgggtttaatccagagttcacagggcgtgaaaacgtttacctgaatgcatctcttctgggcttaacgcgtaaagaaattacggagcgtttcgataaaatagctagctttgccgatatcggtgaatttctcgagcggccggttaagactttttcgagtggtatgtttgcacgtttagcctttgccactgccattcatgtcgatcctgaaatattaatcgtagatgaaattcttgctgttggagattcacgctttcagcgaaaatgtgtaaagaagtttaatgaaatcagaaatgatggatgtacaatcctgttcgtttcgcacgatgattatcaggttcgaaatatctgtaatagtgcactataccttgaaaaaggtgtacagcgttattttggaaatgcagatgttgctgttcagcattacctttctgatatgcagaagagtgtgatggagactcaagatgccgaaaataaagctattgaaaatgaaataagtagcagattgataaaaatagctaatgtatctcttctcgatcggactgggaattcagtaaccgagctggctagcggtgacaatgttaaactgtctttcgattacaaatatgaaggaagtgacggggaattcgatgggctgacctttgtctttaatctttaccgtaaagatggggtatatatctgtgggacgactacagcaatgcgtggcttagaaccattttccctaagtcgggaaggacgagtgactattgattttcccgcattgaagttgttgtcaggtatttataactggcgagtcgctgtcaatgatcaagatggtatacagataattaacgaagctgtaccggtctgtgagttttctgtagccgataacttcagtgccgttggaatttatgatattgaacatagctggtctgtggtggccaaggggtaa

SEQ ID NO: 422326 - DNA, 975 bp, Serratia marcescens
atggaacggattgagaacgatcttcttaagttgcagtttttaagagaagaacatcaccagcgttatcagtacgttgccagttttgccaagggagttgtggttgactgtgcatgcggtatcggatattcggcacctatcatcttgtctaaccctgctgtagtcagttacacagggttggatgttgatcgagaggcaatcgcctatgcacaagagcacaatacgacggattctcgttttgagtatggttcgattttagccttgccgttcgatgattgtagcgtcgatacatttatttccttagaaacgttggagcatcttgagcaacctgaattagcgattgcagaagtcaaacgcgtgctgaaaccaaatgggatatttatttgctctgtgccaactaaagattacgagaatttttgtgtcagtttgtatgggcctaacccttaccatattcaagccttctctttagaagctttgaaaacattgttgcaagcccaattttcgcatgttgatattgctgttatcgctcaagaactcgtctctatagtgcatacatttcaagatcaaaagatgccgcctgcggtatttaatgcaaaaaacaagaacgtaatgaacggttctttcattgcgatttcatctaatgttgacgctatttataataagaatacgctatttacaggtatgagtcgcatagaatatgaccaagaattggtctctccattgcgtcaaagtttggagtttgcagaacgcttggctgaacaacgttggcagttgttgcttgaggctgaaaaaagaatcaatgaagtaacatattataaagaacaggcagagcgcatctctgaagaaagaatgcaagcattcagggacacggaagagatggtccgttcccgagatcaagctttgtctgaggcagagcggattattcagatgcttaaggaacagctggaaagcgtttcaaagcaaaattcgaaccaataa

SEQ ID NO: 422327 - DNA, 1965 bp, Serratia marcescens
atgattgtcacgattgccgataatatcgaaaccattctggtcgatttttttgatactgtagtcgagcgtagttgccaccctgaagtcgtgaaacgtaaatgggctgccgctctcgtggattcatatcgtatttgtctatccgtagaggatctatatgctctacgtttaagaatcgaagcgggattgtgcgccagtagtcaaatgcaaggcgatgacgctgaattccgttatgatgatatgtcgcttgccttgtattatgaacttcaacgtgcgcagattgcggctcgattgccagaaagtgacaccttccttgctttttgccgcgatctagagttggctattgagctatctgtgcaaaaaccaatagtagcaacgttggacatgctgagagctgaaaaagcgaaaggtagacgtatttatttggtttctgatttttatttagatcaacaatcaattgtttattttgccaaatgtcatgggtttgatgatatttttgatggattcttcgtttccagcgaaaataagcgaacgaagaaagaagggcgagcttatgatgtggttattgcaagattaggtttgaatgttaaaaagacgattatgttgggcgacaatgcacacagtgatgttgctatgtcgacagccagggggctgtttgcgcatcatttgcctgtggatcaacaccgatatgatgagagcctactggcggatcgtgagcgccttgcggtggagaacaaagttaatcgggtgatcgctgaagataatttcagctttaactgggtaagtagtgcaatttatttattcacgcgtcggctctattggtctttggtgataaaccaagctaaaaacgtttatttttttgcaagggaaggcgagtttcttcaaaaggcgtttgacaaatttcaagctagtttgccgaaaaatttttcgcgtattactagtcattatatgtatgtgtcgcgtcgagcaacctacttgccttcattggggcctctgagtggcagcacattcaacaagttattatatcagtatggttcatgtagcctgactgcctttttgaaaagcattaatctcgatgattatgtatctgagcttaaagtgcgttttcctcaggtggattttgaagagcagcatttgaatattgctggattgccggcgttttctgcgttaatagatgatgaattctttaaggctatctatgaacgcgagcgcaaagaacagaatatctatctcaatgactactgtgactcgttgatggcagaaaaacatgatgaatgggttcatgttgttgatgtcggctggaagggtagtattcaagataatttggtaaaagcgacccagcgcaatatgtctggttactatttcggtatattggatggggctgaaacccataagaacaatattaaagaggggctgctgtttgatcatcagtgggggcagcgccttggtgatgatatgtttaacgagttccgtgccggttttgaagtttttatgggggcctcgcatggcagcctaaagagatatggtgttgacatcgataattttgttttcgaccataacgactcagagctcgctttcttctatgagcaaatagcgccattccaagagcgtgcattgcatcaattcaatggtttttcaaaaatagagcgtgtttattcgctatctgatcatgagatcagcaaagcggttaaaaagttttactttcgtggcgtgatgttgccgagtcgggttgaacgtgaaaaattttcgttgatcaaacactatgagaattttggcgtattcaactttagctcctttgggcagagtaaacgttcccccctgtcttattttaagcgcttggtgagaaatcctcgacacaccattggttctgcttggtggaaacctctggatttccatgcaaatggcgtatggtatttgaaatatccttattttttggtgaaaaaaataaagtttaaaggggctaaataa

SEQ ID NO: 422328 - DNA, 1245 bp, Serratia marcescens
atgagtaaaattgcttttttactatggagtccggatatcagtggcggcactaatgtcatttttgaacatgctacgcgtatgcgaaagaatggtgacgatatcacgattatcactgaggataaaccaaacaataagcggttagagtggtttccaggtgcagaaaaactgacttggatggattatgctgaagctgctgaaaaaaagtttgatctggttattgcgacttggtggcgtactgtattttatctcaacaaaatcaatgccaagaaatatgcattttttgttcaatccatcgagtcgcgtttctatccggaagatgaagtgactttacgcacgcttgtcgatctgacttatagcttgcatgttaattttatcactgaagcgacatggattaaagaataccttaaagaacattttgaccaagatgcgttattggtcagaaatggaattagcaaggcttattttaatgatgagattaaaccaaaggtgcctcgagcgtctgaaaagctacgtgtattagtggaaggtccgttaaacgtcagctttaaaaatacggaacttgcagttgagttgtgccggcagtctcgtgctgatgaagtctggtttgtcacatcgactgaaattggtgcttacccgaacgttgatcgtctgtttagccgtgtgccaatttctgagatcggtagtatttacgcctcttgcgatgttttggttaaactttccaccgttgaaggaatgtttggccccccgttggagatttatcatactggtggcacctccatcagttatgatgtgactggttacgacgaatatattgagcataatgtcaatggactggtgtctttcagccgccaaaaccaggaaatcatcgagtttataaaccgccttaaggataaccctgatgagctggctcaattgaaagcaaatgctttggctaccgctgaaaagtggccggattgggaaagcagttccaaagagttttcagcagcgtgcgagcagcttattgcatcgggagttattacctcggttaccttacttaaggcgcagacagagcgcttttggctcttctatgaggagtcattgcgccaggcgcagcaggggggacaggcgggcattccctctctaaatcggtatgcacattttcgtcagcgtgttatcaataaattgcatcgcgactaccctacgattttttccttgcttcggaaactcaaatggacggtaaaatcttatctgccgggagctcgatga

SEQ ID NO: 422329 - DNA, 915 bp, Serratia marcescens
gtgtttgattacgaagttgtggtgtgtacttacaacggtgaacgctacattgtcgagcagcttgcctcaattgtcggccagacaatctctccgcggaggatcattgtcagtgacgatggttctacggataatacgctgaaattgattgctaatttcgctgcaacgacgtcagttccgttcgatgtgcagcagcgtgttgcgggcccaaaagggcccgcgcataatttcctgcatgcgctttctttgacgacggcaacgaacgtctttttgagcgatcaggatgacgtttgggtaactgataaaattgaatattatcagcgagcggtcagccaaatcggcgatgagtccgtgccgttattaatcttttcagatgctgaattagttgacagcgaacttcgcttcttgagcgcttcttttttacagaatgagcgacttaatcctgatcaccagttggtgtttcctcgcttgcttttccaaaactgtatccagggtgcaactgtgatggtgaatcgatcactgcttaagcatcttcgccctagccagcatatgttgatgcatgattggtggctgggtttgctggctaccacttttggaaggttggtgttccttcctgaacgattgataaagtatcggcaacatgcgaataacgtggttggcagcagtggctatggattgaaacgtattctggcaaaatttatgcggctgccctcagttgcacatcagaatcggttagtgattgagcaggcgataagtttctatgagatatacggtggggaactcaaaaaagaggataagaaatttttggagaggatgttaagatcccgacgttttgtgctttggcagcttttcttgctaaaatgtggggttgcaagaacaaccattacgagaactatttccttgtatttcttatattag

SEQ ID NO: 422330 - DNA, 783 bp, Serratia marcescens
atgcctgaatctttagttgagccatgtcggtgcttcatttcagttatatctcacggtcatggcaacatgatcattgatgagggatgtctaaaactgctggcctcaaacaactacattgtcgttttgaaagataacaagccacagcgtgaacttcaggaatattgtcaggagtctggcattcattatcttgttgatcagcctatggggtttggcgcaaacaataactatattttcacttggtgccagcaagagttaggaatgcgtgatggggatcgctttttggtgcttaaccctgatgtttttatcgaaccatctgtgctggcagcactgctgttgcacgcggaacaaaacacatactcgctagttgcgatcaatctcttcaacgataaaaattttactatttatgacaaagggataaggcatttcccaaccattagcagctttgcggtttcattcttgctgcagaaaaataagtctatctacgataaagacaaaattactcaggatacggaagttgaatgggcagcaggctcgtttttactgtttactgccaaatgctatcgagagctgggcggatttgatacgcgctactacatgtactgtgaagatcttgacatttgctggcgagcgaggcgggagttagggataaacgttgtttatttgcctcaatttaaagcattgcatcttgctcaaatgcgtagtcgctcacttttttctaaacattttatctggcacgttaccagcgctttgcgtttttgcttgaaacaagcgttgaatagataa

SEQ ID NO: 422331 - DNA, 1407 bp, Serratia marcescens
atgtccaagcaacaaatcggcgttgtcggcatggcggtaatgggccgcaacctcgcgctgaacatcgagagccgtggttacaccgtttccattttcaaccgttctggcgacaaaactgacgaagtgatcgctgagaacccgggcaagaatctggcgccgtattataccgttgaagagtttgtcgaatcgctggaaaaaccgcgccgcatcctgctgatggtgaaagcgggcgaagcaacggataaaaccattgcctcgctgactccgcacctggacaagggcgatatcctgatcgacggcggcaacacctactatcaggacaccatccgtcgtaaccgcgaactgtccgaccagggcttcaacttcatcggtaccggcgtttccggcggtgaagagggcgcgctgaaagggccttccatcatgcctggcggccagaaagaagcttacgagctggtggcgccgatcctggagaaaatcgctgcggttgcggaaggcgagccttgcgtgacctacatcggcgcagacggtgccggccactatgtgaagatggtgcacaacggcatcgaatacggcgacatgcagctgattgccgaagcctattccctgctgaagcaggcgctgaacctgagcaacgagcagctggccgaaaccttcgccgagtggaacaagggcgaactgaacagctacctgatcgacatcaccaaagacatcttcaccaagaaagacgaagacggcaaatacctggtcgatgtgatcctggacgaagccgccaacaaaggcaccggcaagtggaccagccagagctcgctggatctgggcgaaccgctgtcgctgatcaccgagtcggtgtttgcgcgctacctgtcctcgctgaaagaccagcgcgttgccgcgtctaaagtgctgaccggcccgaaagtggcaccgttcaccggcgacaaagccgaattcatcgagaaagtgcgtcgcgcgctgtatctgggcaagatcgtatcctacgcgcagggcttctctcagctgaaagccgcgtctaaagaaaacaactgggatctgcactacggcgaaatcgccaagatcttccgcgccggctgcatcatccgcgcccagttcctgcagaagatcaccgacgcttacgcggcggatgccgatatcgccaacctgctgctggcgccatacttcaagcaaatcgccgacgagtaccagcaggcgctgcgtgacgtggtggcctatgccgtgcagaacggtattcctacgccgaccttctccgctgcgatcgcctactacgacagctaccgctccgcggtgctgccggcgaacctgatccaggctcagcgcgactacttcggtgcgcacacctataaacgcatcgacaaagaaggcgtgttccataccgaatggatggaataa

SEQ ID NO: 422332 - DNA, 621 bp, Serratia marcescens
gtgctgacagaacaacagaacaaccagctggactgggaaaaaaccgacggcctgatgccggccatcgtgcagcacgccgtttccggcgaagtgctgatgctgggttacatgacgccggaagcgctggcggccaccgagcagagcggcaacgtcaccttcttctcgcgcaccaagcagcgcctgtggactaagggtgaaagctccggccacttcctcaaggtggtcagcatcacgccggactgcgataacgacacgctgctggtattggccaacccgatcggcccgacctgccacctcggcaacagcagctgcttccacccggccgccagcgactggacgttcctctatcagctggagcagctgttggcggagcgcaagcacgccagcccgaacagctcgtacaccgccagcctgtatgccagcggcaccaagcgcattgcgcagaaggtcggggaggaaggcgtggaaaccgcgctggccgccacggtcaacgatcgcgaagagctgaccaacgaggcctcggatctgatctatcacctgctggtgctgctgcaggaccaggatctggacctgagcgcggtgatcggccggctgcgcgagcggcatcagaaaaaagcgtga

SEQ ID NO: 422333 - DNA, 777 bp, Serratia marcescens
atgctggcaaaacggataatcccgtgcctggatgttaaagacgggcaagtggtgaaaggcgtgcagttccgcaaccacgaaatcatcggcgacatcgtgccgctggcgcagcgctatgcgcaagaaggtgcggacgagctggtgttttacgatatcaccgcctcaagcgacggccgggtggtggacaaaagctgggtatcgcgcgtggcggaggtgattgatattccgttctgtgtcgccggcggcattaaaagcgccgaggacgccagccaaatcctgtctttcggcgccgacaagatttcgatcaactcgccggcgctggccgatcccgagctgattagccgcctggcggaacgcttcggcgtgcagtgcatcgtcgtaggcatcgacacctggttcgacagtgaaaccggcaagtatcacgtcaaccaatataccggcgacgagagccgcacccgcatcacccagtgggaaaccctcgactgggtacaggaagtgcagcgccgcggcgccggtgagatcgtgctgaacatgatgaaccaggacggcgtgcgcaacggttacgatctgcagcagctgcgccgggtgcgcgaggcctgcaaggtgccgctgatcgcctcgggcggcgcgggcaccatggagcacttcctggaagcgttccgcgatgcggacgtcgacggcgcgctggcggcgtcggtgttccacaaacaaatcatcaatatcggcgagctgaaaaggttcctggttgaacaaggcgtggagattcgcgtgtgctga

SEQ ID NO: 422334 - DNA, 738 bp, Serratia marcescens
atgattattccggctttggatttgatcgacggcaaggtggtgcgtttgcatcagggcgattacggccaacagcgcgactacggcaacgatccgctgttacgcctgcaggactatcaacaacagggcgcgcaggtgctgcacctggtcgatctgaccggcgccaaggatccggcggcgcgccagatcccgctgctgcgcaaactgctggcgggggttaacgtgccggtgcaggtcggcggcggcatccgcaacgagcaagacgtcagcgccctgctggaggccggcgccacgcgcgtggtgatcggctccaccgcggtgaaacagccgcaactggtgcagagctggttcgagcgctacggcgccgacgcgctggtgctggcgctggacgtgcgcatcgacgcgcagggcgtgaaacgcgtggccatcagcggctggcaggaggattccgacgccacgctggaacaggtggtggagcagttcctgccctacgggctgaagcacgtgctgtgcaccgacatttcgcgcgacggcacgctggccggttccaacgtggcgctgtatcaggcgatcagccgccgctatccgcaggtggccttccaggcctcgggcggcatcggcaatctggacgacatcgcccagctgcgcggcagcggcgttgccggcgtgatcgtggggcgcgccctgctggaaggtaaatttagcgttgaggaggcgatcgcatgctggcaaaacggataa

SEQ ID NO: 422335 - DNA, 591 bp, Serratia marcescens
atgaacgtggtgattttggataccggctgcgccaacctggcctccgtcacctacgcggtgcggcgcctgggttaccagccggaggtgagccgcgatccggagatcgtgctgcgcgccgacaagctgttcctgccgggcgtcggcaccgcgcaggcggcgatggatcaactgcgcgaacgggatctggtcgagctgatcaaggcctgcacgcagccggtgctgggcatctgcctcggcatgcagctgcttgcggccagcagcgaagagaacggcggcgtgacgacactcggccttatcgatacgccggtgaagcagatgaccgactttggcctgccgctgccgcacatgggctggaatcaggtgtccgcgcaggcgggccaccatctgttccgcggcatcgatgacggcgcctacttctatttcgttcacagctatgcgatgccgatatgccccagcaccatcgcccaggcgaactacggcgagcccttcaccgccgccgtgcaaaaagacaacttcttcggcgtgcagtttcatccagaacgttctggagcggccggcgcacaactgttgaaaaactttctggagatgtag

SEQ ID NO: 422336 - DNA, 1068 bp, Serratia marcescens
gtgagccaaaaaatcctctttatcgatcgtgacggcacgctgatcgccgagccaccggaagatttccaggttgaccgcctggacaagctggcgctcgagccggacgtgatcccttccctgctggcgctgcaacaggcggggtatcagctggtgatgatcaccaatcaggatgggctcggcaccgccagtttcccgcaggaaaccttcgatccgccgcacaacctgatgatgcagatcctcagctcgcagggcattcagttcgccgatgtgctgatctgcccgcacctgccggcggacaactgcgactgccgcaaaccgaaaaccgcgctggtgaagggctacctcgaacccggcgtgctgaatgccgcccacagctacgtgatcggcgatcggccgaccgacgtgcagctggcggaaaacatgggcatccaggggctgcgctaccagcgcggcgtgctgggctggaaagagatcgtgcgccagctgaccctgcgcgaccgccacgcgcgggttaaccgcgtgaccaaagagacgcagatcgacgtcaacgtctggctggatcgcgaaggcggcagcaagatcaaaaccggcgtcggcttcttcgatcacatgctggatcagatcgccacccacggcggcttccgcatggagatcgacgtcaaaggcgatctgtatatcgacgatcaccacacggtggaagacaccggtctggcgctgggtgaagcgctgaacaaggcgcttggcgacaagcgcggcatcgctcgcttcggcttcgtgctgccgatggacgagtgcctggcgcgctgcgcgctggatatttccggccgcccgcacctggagtacaaggccgagttcaactatcagcgcgtcggcgatctcagcaccgaaatggtcgagcacttcttccgttcgctctcttacaccatgggctgcacgctgcacctgaagaccaagggcaaaaacgaccaccaccgggtcgagagcctgttcaaagtgtttggccgcacgctgcgccaggcgatccgcgtcgagggcaataccctgccgagttcgaaaggagtgctgtga

SEQ ID NO: 422337 - DNA, 1089 bp, Serratia marcescens
atgagcatcgaaaaactggcgcgcgccaacgttcgcgagctgaccccttatcaatcggcgcgccgcctcggcggtaagggcgacgtgtggctgaacgccaacgaatacccgatcgcgcccgagttccagctgaccgcgcaaaccttcaaccgctatccggagtgccagccggcgttggtgatcgaacgctacgccgcctacgccggggtgaagaaagagcaggtgctggtcagccgcggcgccgatgaaggcatcgaactgctgatccgcgccttctgcgagccgggcaaagacgccattctgttctgcccgccgacctacggcatgtacgccgtcagcgccgaaactttcggcgtggagcgccgcaccgtggccgccaaagaggactggcagttggatctgccggccatcgcagacagcatggacaacgtgaagctgatctacgtctgcagcccgaacaacccgaccggcaacctgatcgacccggactcgctgcgcaacctgctggagctggccaaaggcaaggcgatcgtcgcggtggacgaagcctatatcgagttttgcccgcaggcctcggtggccgggtggctgagcgactatccgcatctggctatcctgcgcacgctgtcgaaggcctttgcgctggccggcctgcgctgcggctttacgctcgccaacgaagatctgatcgccctgctactgaaggtgatcgcgccttacccgctttcgacgccggtggcggatatcgccgcgcaggcgctgagcgaagaaggtatccgcaccatgcgtcagcgcgtcaccgacatcgccgccacccgcagctggctgcagcaacagctggaaaaatgcgcctgcgtcgagcaggttttcgccagcgacagcaattacctgctggcccgcttcaccgcctcaagtaatgtgtttaaaagcttgtgggatcagggcattatcttacgagaccaaaacaaacagcccgggctgtccggctgcctgcgcatcaccataggcacccgcgacgaatgtcaacgcgtggtggacgccttgtccgccctgcccggcgccaaccagactcgccaggagccaatgtga

SEQ ID NO: 422338 - DNA, 1308 bp, Serratia marcescens
atgtcgaccttcaacacgccgatcgactgggcaacgtgcagcgccgaacgccaggccgagctgctgatgcgcccggcaatcgccgcttccgacagcatcacccgcacggtgagcgagatcctcgacaacgtgaaggccaacggcgatcgggcgctgcgcgactatagcgcccgcttcgacaaggcggaagtcgccgcgctgcgcgtcagcgccgagcagatcgccgccgcctgcgcgcgactgggcgatgacatcaaacaggcgatggcggtggccgtcgccaacgtggacaccttccacaacgcgcagcgactgccgccggtggacgtcgaaacgcagccgggcgtgcgctgccagcaggtgacccgcccaatcgactcggtgggcctgtatattcccggcgggtcggcgccgctgttctccaccgtgctgatgctggcgacgccggcgcgcatcgccggttgccgccgggtggtgctgtgctcaccgccgccgatcgccgatgagatcctgtatgcggcacagctgtgcggcgtgcaggaagtgtttcaggtcgggggcgcgcaggcgatcgccgccctggcgttcggcaccgaaagcgtgccgcgcgtggcgaagatcttcgggccgggcaacgccttcgtgaccgaagccaagcggcaggtcagccagcgtctcgacggagcggctatcgacatgccggccggcccttcggaggtgctggtgatcgccgatgccggcgccaccccggcattcgtcgcttccgatctgctgtcgcaggccgaacacggcccggattcgcaggtgatcctgctgacgccggacgcggcgatggcgcaggcggtggccgaagcggtggaaagccagctggccgagctgccgcgcgccgagaccgcccgccaggcgctggcgagcagccgcctgatcgtggcgcgcgatctgcctgagtgcgtggccatcagcaaccgctacggcccggagcacctgatcattcagacccgcaatgcgcgcgagctggtggacggcatcaccagcgccggctcagtgttcctcggcgactggtcgccggagtccgccggcgattacgcctccggcaccaaccacgtgctgccgacctacggttacaccgccacctgctccagcctggggctggccgattttcaaaaacgcatgacggtgcaggagctgacgccgcagggcttcagcaacctggccgccaccatcgagacgctggccgccgccgagcagctgatcgcccacaagaacgccgtgaccctgcgcgtcgccgccctgaaggagcaagcatga

SEQ ID NO: 422339 - DNA, 900 bp, Serratia marcescens
atgctggacaagacacgtttacggatcgcaatgcagaagtcgggccgcctgagcgaggaatcccaggaactgctggcgcgctgcggcatcaagatcaacctgcagcagcagcgtctgatcgccttcgcggaaaacatgccgatcgatatcctgcgcgtgcgcgatgacgacattccgggcctggtgatggacggcgtggtcgatctgggcatcatcggcgaaaacgtgctggaagaagagctgctcagccgccgcgctcagggcgaagacccgcgttacttcaccctgcgccgcctcgatttcggcggctgccgcctgtcgctggccaccccgctcgacgccgaatacaccggcccgcaaagcctgcaggacgcccgcatcgccacgtcttacccgcacctgctgaagcaatacctcgacaagcagggcgtgcgctttaaatcttgcctgctgaacggttcggtggaagtggcgccgcgcgccggcctggccgacgccatctgcgatctggtctctaccggcgccacgctggaggccaacggcctgcgcgaggtggaggtgatctaccgctccaaagcctgcctgatccagcgcgacggcgaaatgccggaagccaaacaacagctgatcgaccgcctgatgacccgcattcagggcgtgatccaggcgcgtgaatccaaatacatcatgctgcacgcgccgagcgagaagctggacgagatcgtcgcgctgctgccgggcgccgaacgcccgaccattctgccgctggccggcgcgcagaaccgcgtggcgatgcacatggtcagcagcgaaaccctgttctgggaaaccatggaaaaactgaaagcgctcggcgccagctcgattctggtgctgccgattgaaaagatgatggagtaa

SEQ ID NO: 422340 - DNA, 825 bp, Serratia marcescens
atgaaaaaggtagccattattggtttgggttggctgggcatgccgttggcgctgtcgctgatgggccgcgggtatgacgtggtcggcagcaaaaccacgccggacggcgtcgaggccgcgcggatgagcggcatcgaatgctatcaactggagctgacgccggagctggagtgcgatccggacgatctggaatcgctgctgcgcgtggatgcgctggtggtgacgctgcccgcgcgccgcaccgtcgaaggcagcgagaactatttcaatgcggtgcgcatgctggtggacagcgcgatggccttcggcgtgccgcgcgtgatcttcaccagttccacctcggtgtacggcgaaaccgccggcacgctgcgcgaagagtcgccgctgcggccggtctcgccgtcgggccgggtgctggccgagctggagcgctggctgcatgaattgccgaatacctcggtggacattctgcggctggcgggactggtgggcgccgatcgccaccccggccgcttcctggcgggcaaactcgacgtgaagggcggttcgcagggggtgaatctggtgcaccaggacgacgtcatcgccgccatccaactgctgctgaagctgccgaagggcggccacgtgtacaacctgtgcgcgccgcgtcatccggccaaacgcgaattttatccggcgctggccgagcagctgcacctggagccgccgcagttcgccgacgaagcggagcaggatgagcggctggtggacggcaaccgcatctgcaatgagctgggttttgagtatcagtatcccgatccggcgcgcatgccggtcagctaa

SEQ ID NO: 422341 - DNA, 930 bp, Serratia marcescens
atgctcaccaacctaagcgatatcgatctgaaactgctgcgggtattcgtcgcggtggcggaagctcagggcgtcagcgccgcgcaggaagcgctgctgatgaaccagtccaccatcagcactcacctggcctcgctggaaacccggctgggttttcgcctgtgccagcgcggacgctccggcttccggctgacgcccaagggcgaacgcatgctgatcgcctgccgctcgctgttcaacgccgcccgcgacttcacccgagtcagccagtcgctgaacggcctgctgaccggcgatctgcagatcggtctggtggataatctggtttcgctgccgggcaatccgttcagccaggccatcaaacacttccagcgccgccaccaggacgtgcaattgcagtgccgcatctgttcgccgaacgagattgagcaagggctgctgcaccggcagctcgatctgggcatcggctactttggccagcagttggaggcgttgcgttatcagccgtggctggaggagacgcaggcgatctactgcagcgcggatcacccgctgttcgcggtggaagaaccggagcgcgagcagattgaaaacgcgcgctgggtcaagcgcggctacctgctggcgcagcagctgtgcccgatcgcgccgcctcacctggcggcggtggcccaccatatggaaagcgtcgcccatctggtgctgagcggcacctgtctcggctatctgcccacccactacgcggcgcgctgggtggaacaggggctgctgcggcagctgggcggcgcggcgctctcataccgcgccacgctcagcctggtcagccgccccgtccagcccgacgaggcgttgaacgcgctgctggaggatttggcgcgcgccggcgaaaaaaaagccccgcatgcgcggggcctgacggacgttagctga

SEQ ID NO: 422342 - DNA, 933 bp, Serratia marcescens
atgctgaaccaaccccaaagcggtaacgatatgccgcgctttgccggtatccccaccatgatgcgcctgcccgccgccgaacaggcgcgcggtctggacgccgcctttgtcggcattccgctggatatcggcacctccaaccgcagcggcacccgctatggcccgcgccagatccgccaggaatcggtgatgatccgcccctacaacatgggcaccggctccgccccgttcgaacggctgcaggtggccgatctgggggatgtcgccatcaacccttacagcctggcggatagcgtgcagcgcatcgaggcggcttaccacgagatcctggcgcacggctgcatgccgttgacgctcggcggcgaccacacgctgacgctgccggtgctgcgcgccgtcgcccgtcggcatggcccggtcgggctgatccacgtcgatgcgcattccgacaccaacgaagagatgttcggtgaacagctggcgcacggcaccaccttccgccgcgcgttcgaggaagggttgctggcgccggaaaaggtggtgcagatcggcctgcgcggcagcggctatgcggcggacgacttcgactggtcgcgccgtcagggctttcgcgtggtgccggccgaggcctgctggcaccgatcgctgacgccgctgatggcggagatccgcgaacagatgggcgatgcgccggtttacctcagcttcgatatcgacgggctggatccggccttcgcgccgggtaccggcacgccggaggtcggcgggctgtcggtttggcaggggctggagatcgtgcgcggctgccgcgggctgaacctggtgggcggcgatgtagtggaagtgtcgccgccttacgatcgctccggcaacacggcgctgctggcggccaacctgctgtttgaaatgttgtgcgtgctgccggcccgctga

SEQ ID NO: 422343 - DNA, 1386 bp, Serratia marcescens
atgaatctcgatctgctggtcgtggtgttttactttctggtgataggcgcggtggggtggatgggcattcgccgcgccaattccaaagaggcgtatctggtcgccgggcgcaacctggggccggggctgtatctgggcacgctgtcggcggtggtgctcggcggcgcgtcgaccatcggcagcgtcaagctcggctacacctacggcatctccggcgtctggctgtgcggcgcgctggggctgggcatcgtggtgttgagcctggtgctggccaagccgctgctcaagctgaagctgtataccgtcagccaggtgttgtcgcggcgctatcatccggcggcgcgggttaccagcggcgcgatcatgctggcgtatgatctgatggtggcggtgacttcgatcatcgccatcggcagcgtgatgcaggtgatgttcggcctgtcgttcagcgcgtctatcctgctcggcggcgggctggtggtgctgtattcgacgctggggggcatgtggtcgctgacgctgaccgacatcattcagttcatcatcatgaccgtcggcatgatgctggtgctgatgccgatgagcatcgtcaaggccggcggctgggaggcgttcaccagcctgctgcccgccggttactaccagctgtcgtcgatcgggctggacaccattctggtatttttcctgatctatttcttcggcattctgatcggccaggacatctggcagcgggtatttaccgcccgcagcgccaacgtggcgcgcttcgccgggctgggggcgggcgtctactgcgtgctgtacggcgtgaccggcgcgctgatcggcatggccggcaagatcgtgctgccgtcgctcagcaacaccgacggcgccttcgccgctatcgcgcaggcggtgttgccggtcggcgtcagcgggctggtggccgccgcggcgttggcggcgctgatgtccaccgccagcgcctgcctgctggcctcttccaccatcgcgctggaggacgtattgccggccatccggcgcaaaccttccggcgggttggccgccgggcgcttcaccacgctcctcatgggcgcggtcatgctggggctggcattcgtggtgcgcgacgtgctggcggcgctgaccctggcttacaacctgctggtgggcggcatgctgatcccgctggtgggggcgatcttctggccgcgcgccaccagcgccggcgccatcgccagcatgctgaccggcagcctgtgcgtggtggggctgatggtctggcacggcatcgacgccaacagcccaatctacggcggcctgctgggcggcggcgtcgccttcgtgttgggcagcctgttgagccgcccggcagcgcagctgcagacccaaaccgagcgctga

SEQ ID NO: 422344 - DNA, 813 bp, Serratia marcescens
gtgaaagaaaaaatcaaagtcgcatgctgccagttagcgttgcgggtcggggaagcggaacataatcgggcgctgtccgcccaggctatccgccgggcggcgcagcgcggtgccaacgttatcgtgctgccggagctggtgaacagcggctacgtgctgcgcgataaggcggaggcgagggcgttggccgaggctgaagacgggccgagcctcagcctgtggggagccctggcgcgcgagttggatgtggcgatcgtcgccggtttctgcgagcgcctgcccgatggcgaggtggccaacagcgcggcattgatcgatgcgcagggggtgagggcgatttatcgcaaagcgcacctgtggcacgaagagagcaccatctttaccgccggcgatcggccgccgccggtcatcgagacccgcttcggccggttggcgatgatgatctgttacgatctcgaattccctgagtgggtacggctaccggcgctggccggcgctcagctgctgtgcgcgccggtcaactggccactggcgccgcgcccgcagggcgaacggccggcggagatggtgaaggcgcaggccaacgccgccgtcaatcggctgttcatcgcggtgtgcgaccgttgcgaaacggagcgcggcgttgcgtggatcggcggctcggtgatcgtcgacgccgacggctatccattgacgcagagcctggcaggcgaaggcatggtgctggcatcgatggatatcggctcggccgatgacaagcacatcggccgccacaatcacgtgcatcgcgatcggcggccgatgctgtattga

SEQ ID NO: 422345 - DNA, 984 bp, Serratia marcescens
atggacagcaaaagcatggtggtgaactgtgtggcgtacaaagccggccaacggctgggcgaagtgaccatcaacgatatcagcgaggtggtcaaacagccggataccttcatctggctggggctgcggcagccggagccggcgtttatgcgcaaggtgcaggaggagttcggcctgcacgatctggcgatcgaagacgcgctgtgcgcgcaccagcggccgaagctggaaacctacggcgactcgctgttcatcgtggtgaaaaccgcgcagtggggcgagaacgacgaaatcgaatacggcgaaacccatttcttcgtcggcaaaaactttctggtgacggtgcgccacggcgcctcgcccagctacgcgccgatccgcgccaaggcggaggagaaccgcaagcagatgtgccgcgggccgggcttcgccctctattcggtgttggacttcgtggtggacaactaccgcagcgtggtgacgcgcttcgagagcaccatcgagaatatcgaagccaacatgtttcagtcggagttcgatcaggcggcgatcgagaacgtctataccctgcgccgccacctgttggcgctgcgcaacgccgcgctgccgatggatgaaatctgcaaccagctgatccgcctgcacgaagaggtgatcccgaaagagctgcgcgcctatgtacgtgatgtgcaggatcacgcgcatcaggtggtcagcaatatcgacgacatgcgcgaaatgctgaccaacgccatgcacgtcaacctggcgctggtgacggtcaaacagaacgaagtggtgaaacgcctggcgggctggggggcgattttggccatcccgacggtgatcttcagcctgtacggcatgaactttgccgacatgccggagctgaagttcccgtgggcctatcacgccacgctgggggtgaccgccgtcggctgcattttcctgtatcagaagctgaagaaatcgggctggctgtaa

SEQ ID NO: 422346 - DNA, 420 bp, Serratia marcescens
atggacattaccgttaccgacgcgattgacgaacacaccctcgatgcgatcaggcaaggcctgcgcgcttacaacctgccgcatatcgacgcccgtcaccgcaagccgctcagcgtctatgcgcgcgacgaggccggcacggtgatcggcgggctgaccgccgaaacctggggcaactggctgagcgtcgaatggctgtgggtggcggattcccagcgcggcagcggcctcggcggccggttgatgcgcgccgccgaacgcgaggcgcaggcgcgcggctgccgctacgctcgcctggataccttcagcttccaggcgcggccgttctacgaaaaactcggctatcagctgcaaatgacgctgaaagattatccggtggaacatgagtgttattttcttaccaaaaccctgactgattaa

SEQ ID NO: 422347 - DNA, 1101 bp, Serratia marcescens
atgccccgattgactttgctggccggtttgctgctgtgcagcggcctgctgcacgccgcgccgacggtcagccaactgcaggacggcctggaacacccgtggtcgctggcctttttgccggcggaacaaggcctgcttatcaccgagcggcccggccggctgcggctgtggcagcagggcaaaggcctgtcgccgccgatcgccggcgtgccgcaggtttacgccgaggggcagggcggcctgctggaggtgttgccggcccccgacttcgccgccagccgccgggtgtacctcagcttcgccgaatcgggcgagggcggcaaagccggcacggcggtcggctacggccgtttgagcgaagacggaaggcggctggaaaacttcaaggtgatcttccgccagctgcccaagctgtcggtcggcaatcacttcggcggcaagctggcgttcgacaggcagggctacctgtttatcgcgctgggcgaaaacaaccagcggccgacggcgcaggagaccgacaagctgcagggcaagctggtgcggctgaccgccgaaggcgcggtgccgccggacaacccctgggtcggccaggccggcaaacggccggaggtttggtcctacggccaccgcaatccgcaagggctggcgctgaacccgtggagcggcgcgatctgggaacacgagcacggcccgcgcggcggcgatgagctcaacctcccgctgccgggtaaaaactacggctggccgctggccacctacggcatcaactattccggccagccgatccccgaggccaaaggggaacgggtgcccgacaccgaacagccgctgcactattggcgggtttcgcccggcctcagcggcatggcgttctatgacgggcagcgcttccccgcctggcggcactcgctgttcatcggcgcgctggcgcaaaaggagctgattcgcctgacgctggaaggcgacaaggtggtggcggaagagcggttgctgggcgatcgcggcgagcgcattcgcgaggtacgcagcgggccggatggctacctgtatctgctgacggacgagcgggacggcaagctgctgaaagtgggggcgtcgtaa

SEQ ID NO: 422348 - DNA, 621 bp, Serratia marcescens
atgctgaccatttggggtcgtgagaattcgaacaacgtcaggaaggtgctgtggtgcgccgccgaactggggctgagctatacccacatcaacgccggcggcgcgttcggcaaggtgaacgaagagagctaccgcgcgctgaacccgaacggcctggtgccgctgctgcaggacgatgacttcgtgctgtgggaatccaacaccatcgtgcgctacctggcggcgaaattcggcgacgcgacgttctatccgcaagatctgcaggcacgcgccgccgccgagaagtggatggactggaccacctcgaccatcgtcccggccttcaccatcgtcttttggggcctgatccgcaccgcgccggaattgcgcgacatggcgaaaatagaagcggcgatcgccacgctggaaaaacacttcgacgtcattgaacaggcgctggcacatcagccttacctctccggcgacgcgttcggcttcggagatattccgctcggcagcttcgcctacgcctggttcgaaatgccgatcgcccgccacccgcggccgaacatggagcgctggtatcagcaactgcgcgctcgcccggcctatcagcgcggcgtgatgagcgaactcacctga

SEQ ID NO: 422349 - DNA, 657 bp, Serratia marcescens
atggacttagccttattcgacctggatgaaaccctgattgacgatgacagcgccagcctgtggatccgctggctggtcggccagggcttcgcgccggcggagctggagttgcaggagcagcagctgatgcagctctattatcagggcaagctgtcgatggaggactacatgcaggccacgctggcgccgctggccggcctgagcgtgcaaaccgtggccggctgggtgcaacgctacattcgccgcgatatcctgccgcgcgtctaccccgccgcccgtgagcgcctgcagtggcaccgcgagcgcggcgactgcatcctggtgatctccgccaccggcgagcacctggtggcgccgatcgccgaacagctcggcgccgacgatgcgctggcgatcggcgtggaaatcagcgacggccgcttcaccggcaacacctacggcaccatgacctaccaacagggcaaggtgatccgcctgcagcactggctggcgcagcatccgcacctgaagttcgagcacagccacggctacagcgactccctcaacgataaggcgatgctgcaattcgtcgacagcgccacggtgatcaaccccgacagcgaactgagcgcgctggcggcggagcacggctgggaagtgtgccgctgggaacgctga

SEQ ID NO: 422350 - DNA, 1026 bp, Serratia marcescens
atgatgacgcatctgacgacgctgaagacgctgccgctgctggatctttcgcagcttgacggcgatgcgcgtcagcggcgcgcctttctcgacgatctgcgcgcggccgcccgcgacgtcggctttttctatctgcgcgggcacggcgtggacagtgcgctgaatgcgcggctgcagcagggcgcgcggcaatttttcgcgctgccggaagccgacaaattggcggtgcagatggtgcattcgccgcactttcgcggctacaaccgggcagcggcggagctgacgcgtggccagccggactggcgcgagcagttcgatatcggcgccgaacgcccggcgctgacgctgtctgacgacaccccgcgctgggcgcgcctgcaggggccaaaccagtggccggcggcgctgccgacgctgaaaccgctgctgctgcagtggcaacaggcgatgaccgccatgtcgctgcggctgctgcgcgctttcgctttggcgctgtcgttgccggagcaggctttcgatcgcttgtatggcgataagcccaacgagcacatcaaactgattcgctatccggggcgggacgctaccgccagcgcacagggcgtcggcgcgcacaaggactccgggtttctcagcttcctgctgcaggacgagcaaaaagggctgcaggtggaggtgagcgaagggcagtggctcgatgcccagccgcgtgaagacaccttcgtggtgaacatcggcgagctgctggaactggcgaccaacggctatctgcgcgccacggtgcaccgggtggaaacgccgccggcggggcgcgataggctgtcgatcgcttttttcctcggcgcgcgcttggacgcggtggtgccgttgtatcaactgccgccgccgctggcggcgcaggcgcgcggcccggccagcgatccgctcaacccgctgctgcgcgacgtggggtataactacctgaaaggccgcatccgttcccaccccgatgtggcgcagcgcttttatcgggacgtcatcggcgtctga

SEQ ID NO: 422351 - DNA, 1146 bp, Serratia marcescens
atggccaagtttgatacgttgaccgttcacgccggttacaccccggacgccaccggcgccgtgatgccggcaatttacgccacctccacctacgcccaaccggcgccgggcgagcataccggctacgaatactcccgcagcgccaacccgacgcgcaccgcgctggaaagcgccatcgccgaactggagggcggcagccgcggctacgccttcgcctccggcctggcggcctgctccacggtgctggagctgctcgataaggacagccatctgatcgcagtagacgatctgtacggcggcacctatcgcctgctggaaaaagtgcgcagccgcaccgccggcctgcgcgtcacctacgtgtcgccggcggatctcgccgggctggagcaggcgatcgagccggacaccaaaatgatctgggtagagaccccgaccaacccgctgctgaagctggcggatctgagcgccattgccgcgatcgccaaaaagcatgggctcatcagcgtggcggacaataccttcgcctcgccgtatctgcagcgcccgctggatctgggctttgacgtggtggtgcactccgccaccaaatacctcaacggccactccgacgtggtggccggcgtcgcggcggtgggggataacccggcgctggcggaacagctcggtttcctgcaaaacgcggtcggcggcattctcgatccgttcagcagcttcctgacgctgcgcggcattcgcaccctggcactgcgcatgcagcgccacagcgacagcgcgctgcgcatcgcccagtggctggagagccagccgcaggtggaaaacgtctactatcccggcctgcctagccatccgcagcacgcgctggcggcgcgccagatgacgcgcttcggcggcatgatctcggtgcggctgaaaggcgacgacgcctatgcgcgccgggtcatcaagcgttcgcgcctgttcaccctggcggaaagcctgggcggcgtggaaagcctgatcagccagccgttcagcatgacgcacgcctccattccgctggaacagcgcctggcaaccggcatcacgccgcagctggtgcgcctgtcggtggggattgaggatgtggaagatctgatcgccgatctgcagcaggcgctggcggaataa

SEQ ID NO: 422352 - DNA, 1368 bp, Serratia marcescens
atggcgatcccccattccgtcatcgagatgattggcaataccccgatgctggaactgacccggttcgataccggcccgtgccggctgttcgtcaagctggagaatcaaaaccccggcggttcgatcaaagaccgcgtagcgctgtcgatgatcgaacaggccgagcgcgacggcaagctgcagccgggcggcaccatcatcgaagccaccgccggcaataccggcctgggattggcgctggtggcggcgctgaaaggctataagctgctgctggtggtgccggacaagatgagccgcgagaagatcttccacctgcgcgcgctgggcgtggaagtgcagctgacccgttcggacgtcggcaaggggcatccggcttactatcaggattacgccaaacgcctggccggggagatccccggcgccttttatatcgatcagttcaacaacccggccaacccggcggcccataccaccaccaccgcccccgagctgtggcggcagatggagcaggacgtggacgctatcgtggttggcgtcggctccggcggcacgctgggcgggctgagccgctatttcgccgaggtttcgccgcagacggaattcgtgctggccgaccctgcgggttcaatactggcggactatctcgacaacggtcacatcggcgaagcgggcagttggctggtggagggcatcggcgaagacttcgtcccgccgctcagcgactttgaccaggttcgcaacgcttaccgcatcggcgacgcagaagccttcaccaccgcgcgcgatctgctgcgcaaggaaggcgtgctggcgggatcgtccaccggcaccctgctggccgccgcgctgcgttactgccgcgcacagaccgaacccaagcgggtagtgacctttgtctgcgacagcggcaacaaatacctgtctaaaatgtataacgaccactggatgctggaacagggcctgttgagcaaaccgcagcacggcgatctgcgcgatctgatcgcctaccgccacgacgaaggcgcggccgtttctgccgcgccggacgacacgttggcgattgtgcacgcccgcatgcggctgtacgacatctcgcagctgccggtgctggaaggcgatcgggtggtcggcctgatcgatgagtgggatctgctgaacgccgtccaggccgacgccgcccacttcagcctgtcggccggcagcgcaatgaccaagcgggtccatacgctgcaaaaagaagccggctacgaagaattgcaggccaccttcaaccatggccacgtcgcggtggtgctcgacggcgagcgcttcctcggcctgattacccgcacagacgtgcttaacgcctggcgccaaaaattacgttaa

SEQ ID NO: 422353 - DNA, 1206 bp, Serratia marcescens
atgatgaaaaaaaacttatccacttccctgaaaaaactgaccttcagcgtaggcatcctgttgctggccgccccggccgtgcacgcggccgagccgccggcgccgccgcaggtagacgccaaggcctacattctgatggattacaacagcggcaaggtgctgaccgaaggcaatgccgacacccgtctcgatcccgccagcctgaccaagatcatgtccagctacgtgattggccaggcgatcaaggccggcaagatcaagccggaagacctggtcaccgtcggcaaagacgcctgggcgcccggtaacccggcgctgcgcggttcttcgctgatgttcatcaagccgggcgatcaggtgccggtactggagctgaataagggcatcgtgatccagtcgggcaacgacgccagcatcgcgctggctgactacgtggcgggcagccaggattcgttcgtcggcctgatgaacaactacgccaaatccctggggctgcagaacacccacttcctgacggtgcacggcctggatgcggaagggcagtacagcaccgcgcgcgacatggcgctgctgagccaggcgctgatccgcgacgtgccggacgaatacgcgctgcataaagagaaagagttcacctttaacaagatccgccagattaaccgtaaccgcctgctgtggagcagcaacctgaacgtcgacggcatcaagaccggttacaccagcggcgccggccacaacctggtggcgtcggccaccgacggcccgatgcgcctgatctcggtggtgctgggcgcgccgagcgatcgcgtgcgctttagcgaaagcgaaaagctgctgacctggggcttccgcttctatgaaaccgcgacgccgatcaaggccgataagccgttcgtcacccagaaagtgtggttcggcgacgtcagcgaagtgccgctcggcgtggcgaaagacgcctcggtcaccattccgaaagggcagatgaaaaacctgaaggccagctacaagctgacccagccgacgctggaagcgccgctggcgaaaaaccaggtggtcggcaccatcgatttccagctggacggcaagaccatcgaacagcacccgctggtggtgatgcaagaggtgaaagagggcaacttcttcagccgcatctgggatatggtgatgatgaagctgagccagtggttcggcgggatcttcggctga

SEQ ID NO: 422354 - DNA, 498 bp, Serratia marcescens
atgaacatgacgagtaaaacgcgctgcgctttgctgtgggcgctgagcctgattagcgccgcggctcaggccgccgaccagggcaccaaggtcaacatcaccgccaccgtggtggcgcctccgccttgcgtgatcaacgacgggcgcaccatcgatatcgacttcggcaaggtcggcatcaaacgcatcgacggcaatcgctatatgcaacgcatcgattacagcatcaaatgcgagtttctggataacagccgccagctgaaaatgaagatcatgggcagcgcggcggccttcgacggcagcgtgttaaccagcagcgtcaatggattgggcatcaaactgttggccaacggtaaggccttcgccatcaatacgccgctgaacatcgactacgccaatccgccgacgcttgatgcggtgccggtgaaaaacagcgccgtcaccctggcggaaggcgatttcaccagcggcgccaccatgctggtggactacttttaa

SEQ ID NO: 422355 - DNA, 918 bp, Serratia marcescens
atgctgattggcaacgccaacgcgtttacctgccgcacgtccgatggcggactgattccacccgggggctcgaccacgccggttgacgtccgggtacgcatcgggccacagctttcttatggcaaaaacgaaatcgtcaacgtcagccaggtcacctgtaaaaacgacgtcgcgagctggtatgactatctcaaaaccgacagcccggcgctgtcgatgaacagtgcgatttttggcgccatcggcagcggcaccaccatcaacggcagcgattacaactccccggtgccatcaggcatcagcgtactcagccttaccggcctgcaaacccagtcggtcgccatccgggtctatatcgtgttgaaccgtttcccaacgccggacatcaaggtgaacaagggcgacgtcatcggccaaatcaactttattcagaccaacgatcagccgggttgcccacagtgcggcgtttatcgctggcgcctgatcgccgacaacgacgcctacttcgtcaccaccagttgcaccatcaacaacggccagcagattaacgtcgacttcggccagatccgtcaggactttctgacccagagcgccaatgatgcccagataaaacaggacaaagcgctcagctaccaatgcgacgaccagagcgcgacgcaggatattctgatccgcatggtcagcgatgccagcggcttctccagcgactttatcaagaccaccaatcctaacgtcggcgtggcgatgatgtacaacggcgcggtggtgaagccgaacaacgccttcagaacgcgcatcgtcaacggccagggcaacgataccgtgacctttgtaccggtaaagaacaatgtcccttacaccagcatcgccaccggcccgctgtcgggttcggccacgctgatcttcagcgcaccttga

SEQ ID NO: 422356 - DNA, 330 bp, Serratia marcescens
atggaagcgttatctccgaaacaaaaggaaatacggcaattgcagcacgatctgctgcaaacattattcgcgcagtcgccccgtaagtgccctatcggcgggttgccgccacagcagcaatggctatcgacgcggcaactggccaatgccgtcaacgtcggtgtttaccgggcgcggcggcttttgctggatcttgtctcccggaaaaaagtgattgtgacggacggctctatcaacaactcattgaggtggtatcccaccgcgttgctgaacggtgataacgacggcatctccaacagcgatgcccctcactcccctttaacggaataa

SEQ ID NO: 422357 - DNA, 522 bp, Serratia marcescens
atgaaacttaacaaaatcatgatggctgcagtgattgcatttggcgcaagttcttttgcacaggcagccgatcagggacacggtaaggtcaccttcacgggctctattattgatgcgccatgctctattgcgcccgagtcgatcgatcagaccgtagatctgggccaggtttccaacgtggcgttgaaaaacggcggcaaatccaacccgcgtccgtttgagatcaaactggagcagtgcgacatcaccacgctgaaaaccgttaaaaccaccttcagcggcgtcgcatcgtccaccgacaaggatctgttgggtatcgcgggcaccgccagcggcgccggcgtagccatctcttacaatggccagccgatcaaactgggtgaagcgactaccgcgcagaccctgaataccggcaacaacaccctgcatttcgccgcctacctgcagggcgaaggcgcttccgccgccatcgttccgggtgatttcactgccgtagccgatttcaccctggcttatcagtaa

SEQ ID NO: 422358 - DNA, 537 bp, Serratia marcescens
atgtttttaccaaggaatcgagcgggtgccgttcttttggcgtcgttggcgtttgcgcccggccatgcaacttccgccgcgcaggggtggggcaaagtcaacatgcacggcgccattatcgacaccgcctgcgccattgccgccggcagccgcgatcagacgatcgatatggacactattcctctcgggcagatcattcgtgacggccaggggatgaccaaacctttcagtatcgaattggtcaattgcgttttggaacggccggaaaacaagcctgactggaaattctttcaggtcacgtttgatggttatgcggaaggcgctctgtttggcgtacagggcgatgcgcgcggcgttgcattggagataaaagacagcagcggcacggcggttattccagggaaacctttgccgatggagggaataataccggggaaccgagtgctgaattattccatgacgttgatgccgaatcaccagccgttgaaggtgggagcgtatttttccacagtgcgttttaagctggattatttttga

SEQ ID NO: 422359 - DNA, 2535 bp, Serratia marcescens
atgctttcaccggcagggaagttatttcgtcttcaggccttggggctttgcgttgccctttctctcggaaatccaatcgcgttggtctatgccgccgacgtgattcaattcaataccgacgtattggacatcaacgatcgcaaaaatatcgatctgagccaattcacgcgcagcggctacatcatgccgggcgtttataccatggtggtgcacgtcaataagaacgatctgccggaacagccggtgacgtttatggcgcccgagaacgatcctaaaggcagcgaagcctgtctttcgccggagttggtcaaccaactggggctgaaagaaaaactgttaagcacgctgaactggacgcacggcggccgttgccttgacgcctccagcctggcggggatggaagcccgcggcgatcttgccagctcttcgctgtatctcaacattcctcaggcctatctggaatacagctcggaaaactgggacccgccttcgcgctgggatgatggtattcctgggctgctgtttgactataacgtcaacgcccaaacgcaaaaacatcagaagggcggcagcagttacagcctgagcggcaacggcaccggcggcgccaacctgggtgcctggcgtctgcgcgccgactggcaggccaacctcaaccatcagaccggctcttctcagccgaccgataaacagttcgactggagccgctattacgcctaccgggcgatcccggcgctgcgttcgcggctgacaatgggtgaggattacctgaactccgacattttcgacagcctgcgctttaccggtgtcagtctgcgatccgacgacagcatgttgccgcccaacctgcgcggctatgcgccggaagtgaccggcgtggcgaaaaccaacgccaaggtggtggtcagccagcaggggcgcgtgctgtatgaaacgcaggtggcggcggggccgttccgcattcaggacatcaacgatgcggtttccggcgagctggacgtgcgcgtcgaagagcaggacggcagcgtgcaggagttcaagatgaacaccgccaacatcccttatctgacgcggccgggtacggtgcgttacaagctggcgacgggcaagccgtcggagtgggggcgccatctgcgcgggccgatgttcggcaccggcgagttctcctgggggatcagcaacggctggtcgctgtacggcgggggcatcgccggcggcgattacaacgcgctgtcgctggggatcgggcgcgatctgatggcgctgggggcgctgtcgttcgatgccacgcagtcgcgtgcgcgtttgccgcaggatggcacgctgaccggcggttcgtaccggctgagctattcgaagaacttcgatgaatacgacagccaggtcaccttcgccggttaccgcttctctcaggaagacttcatgagcatgggggactacctggatgcgcgttacgaaggggggcgcagcggcaagagcaaggagatgtacaccatcaccttcaacaaacagttccgcgatctggggctgagcacttatctcaactacagccaccaaacctactgggatcgggcgccgaacgatcgttacaacctgatggtgtcgcgctacttcgacatcggcgatttcaaaagcgtcagcgtgtcgctgtcggcctatcgcaaccgttacaacgagcgcaacgacgacgggatgtatctgtcgctgtcgctgccctggggcagcgcgggcacgctcagttacaacatgacgctcgatcgcgaagagaacgcccaccgggtcgggtactacaaccgggtcgatgaacacaacaactatcagatcagcgccggcgccgcacgcagcggagcgacggccagcggttattacagccatcagggcgacatggcgcagatcaacgccaacgccagctaccaggccggccgctacagcgccgtcggcatcggcgcacagggcggcctgacaatggcggctgaaggagcggtgctgcaccgcgtcaatacgccgggcggcacgcgtttgctgctcgataccgaaggcgtcgccggtgtgccggtgcgtggctacggcagtacggtgctgaccaaccgttacggcaaggcggtggtggcggatgtaaacagttactaccgcaacaaggccagtatcgatctcaacagcctgagcgacaacgtcgaggcgacgcgttcggtggtgcaggccacgttgaccgagggggccatcggctaccgcaagtttgaggtgattgccggcgagaaggcgatggcgatcgtcaagctggcggacggcagcgagccgccgttcggcgccacggtgctgaatgcccgcaaacaggagaccggcatcatcaatgacggcggaagcgtttacctgtccggcctcaatcccggcgagcgcatgagcgtgcactggaacggcgcggcgcagtgtgaaatccagctgccggcgccgctgccggccgaaatgttgatgaacacgttgctgctgccttgccgtcctcttgccggcgacaagccggcggccgacgccaactga

SEQ ID NO: 422360 - DNA, 765 bp, Serratia marcescens
atgatgaatctgactatgaccagaaagaccgttttccttgtgggcccgctcgccgccgcgttgacgatcggcgcggtcagcctgcccgctcatgcggccatcgcgctggatcgcacgcgcgtgattttcgacggcgacctgaaaacggtcagtctcaacatcagtaaccagaacaaacagttgccgtatctggcgcagggatggatcgaagacgatcgcggcaacaagatccaaagccctttcaccgtgctgccgccggtgcaacgggtggaaccgggcaaaccgagccaggtgaagatccagtcgctgccggcggcgcgtcagctgccgcaggacagggagacgctgtattacttcaacctgcgcgagatcccgccgcgcagcaataagccgaacacgctgcagatagcgctgcagacgcgcatcaaaatgttttatcgcccggcggcgctcgccccgaaaaagaatgccgcaccgtggcaggagcagctgacgctgacccggcagggcgacaagtacgtagtgaacaacccgaccccgtattacgtgacgatcgttgaggcgagcgccggcaagggcgggaaaggggcggcgggctttgaaccgctgatggtggcgccgaaggccagcgccccgctgaacgtctccgccgcgagcctcggcaacgggccgtcgctggcgtacatcaacgattacggtgggcggccgcagttgaacttccgctgcgccggcaatgcctgccaggtcgtgccggtcgccaaatga

SEQ ID NO: 422361 - DNA, 657 bp, Serratia marcescens
atgcaacgaaagatccccatgttgttgggaaaagcctatgaacgtcatcagcgacgcactatcggcctgacggtgttggccgcgctgatggtgccgctgacggcgggcacgatgctgatgctgatgccgccggcccgcgcggtggacaactgggaggtggagggcgcgaacggcacgctccacgtctacggcgcgttgacggaaagcgcctgcagtctggaaatgaccaccgctcgtcaggaagtgtggctgggggagacgggaacggcgcattttcagcgcccgggcgatcgcggcacgccggtggcgttcgagctgacgctgaaagactgcctgcgggcgccggcgagcaaccgcgacgcctggaccggggtgctggcctggagcggcagccagcctgcggtgtccgtggcgtttgccgcgccgacggatgacgacgcgccgagcctggtcagggtcgccggcgtcaccggcttggggttgcagttggcggatgccagcggcctgccggtgcgcctcggcgcgcgtaacaaaccgatcttgctgacgccggggcaaaacaccctgacgtatacggtgacgccggtgcgcaccccggcgacgctgagcgccggcgcctaccgtgcggcgatcgatttccgcctttattacgactaa

SEQ ID NO: 422362 - DNA, 555 bp, Serratia marcescens
atgcgcgcgacagagacgaaccggcgccggagcgcgctgttgggggcaggcatggtcatggtggccggcatgatggcgcagccggcggacgcggcggaaaacatgcgctttcacgggacgctggtggccgagccgtgcgtcattcagccgggagatgaggatatccaactggatttcggcaccatcgtcgacaaatacctgtatctgaacacccgcacccatagccaaaccttcgcgttgcacctgaccgagtgcgatctcagcctgggcaatacggtggccattacgtttaccggcaccgagaacgccaaactgcccggcctgctggcgctggatgccggcagcatggcttcggggatcggcatcgggttggaggacagcagcggcaaggcgctgccgctcaatcgcgccagcgataaattccgcctgaatgccggcaacaccacgctcacgctgcaggcctatgtgcagggggaaccggaggctatccaaacgaagaccatcggccgcggcaccttcagcgcggtggccacttttacgctggaatacgaataa

SEQ ID NO: 422363 - DNA, 423 bp, Serratia marcescens
atgatgataaagcccctcaatcgcaccctgcgcatgggcctgctgtgcctgttggcgttgagcgccgccgcctgtcaaaaccaaaaatcgggcaaacccgctgtgaacacccaaaatcaggctgtgcaagcgccgtcagaagaggctttgcgcaagcagcgtgaggccgagcagctgcagcagtgccagcagcaactgggcgcattgcgcaccatcaacgagaaacaatatcagcgctataaacaggccttcgacagcctgatgagcggcgcttcgcagtacgccaatctgcgcgcccgggtaaacggcgacacgcaggagacggtggatgcgctgtatcgctacaaggtcaactatctgtgtgccggggtgaatcaggcggtgttgaccgggctggcggatcgcggagagcaggttaaatga

SEQ ID NO: 422364 - DNA, 1389 bp, Serratia marcescens
atgaggatgcgtctgctcggctgtgtcgctctgctgttcaccggcgttgcgcaggcggacgacggcgtgccggcgctgctgcagtttgccgagcagtatcaacggcagagcaccgggccgaagagcgaaaacgcggcgcccgccgaccgcgcgtcggggcaaaaaaagcgtgagccggcgaagcgcccgtcggacacccaacagccggcttcaccggccaaagcttttacgctgagccaggcattattggcgcgtgaccaacagctggcgcgccagcgaatggaactgacgatgttgcgccaggaacttgccgcgctgcgggcggagaaagcggcgccacccgtcgcgacgttgccggactcgtcaacgctgcaacagtggatcgccgggctgggcgccgcctggcgcggttcgcccgatgcccagcgcgccgaggcgctgctgcgtcaggcgacgcaggaaaccgccaaaaccaaagcggcggcgatgcaggccgaacggcgcgccagcgagctggagtccgccgcacaggcatcggcacagacgcttgcacaacgccagcgtgagcaccaggaggcgctgcacgctctgcgcgccgcgttggaagcgagtgagcagaagcgagccgctgagcagaaggcgacccagcaggcgcgcgaggcgctgttggcgctgcatcagcggctgcaatgggagatgacgccggagcagttgaaggatgaacgcaagcgtttgtcctacgcggcgggcagtgcgctggggcgcgacattcagggggtagtggcggagcgtcaaagctggggcgtaccggtggatcgcgacagcctgttggcgggcgtcatcgatagcgtgtcggggcgtttgcagctgtcgccggatgaactgaatgcgctgacggcgcaggcggatgccgccgccgtggccgcgcgtgagaaacgcgttaacgaacagcggcggcgtgacgaagattacctggcgcagttccgtcaacaaaagggcgttaagccgtcggcgatgggcttctggtatcgggtggattacgccggggagggggcgttggcgccaacggcggtggtcgatgtggtggtgaaggagaaactgaccgacggcacggtgatccaggatatggaactgagcggcaaggtgctgtcgcaaccgctgtccgaatatccgccgctgtttcgggaggcgataagccatctgcataaccacggttcgctgacgatggtcgtgccgccggcgctggcctacggcgaaaccggctatccgccgaaggtgccgcccaacgccaccatggtttatgaattacgcatcgacaacagccaggcaccggcaaagggtgccaaggcggttaaacgggaagccgacacggcgggagggcagggatga

SEQ ID NO: 422365 - DNA, 666 bp, Serratia marcescens
atgaacaccatgataaaaatcgcgctatttgatgaaaaccgttacttcagcgctggttggcaggaggccctggcgctgcacttcagcacttacggcaagcgcacgctgttactggatgcgcagcaggttcacgaagccgatctggtgttctgctattttcctcccggcgtgcaaagctgtttttgtcacttctttgaggcgcaggctgcggggcgccaaacgctgtatttctcgttgcgaacgccggaggggcggcataaacgcaccgccggcactcgctgcgcgctggaggccggcgtcatctaccacgatacgccgctggtatcggcgctgtatcaggtgaacgctgagttggagcggcgcagcaaatggccgggcaggccgagttgtggcatgaactgcgtatgccagcaccgaggcctgacgctgcgcgaacaggagatcatgcgctgcatgacgcgggagatgggagtgacgcaaatcgcacggatgctggacatcagcgtgaaaaccgtcagcaatcacaagatgagcgttatgcgcaagatggggttccggcgtaatgccgaactttacggctggctgcggcacagcgcccgtcccggcgccgtgggggcgcgagccggcattcagcctggcattgcggtagggaaggcgcagcactga

SEQ ID NO: 422366 - DNA, 1368 bp, Serratia marcescens
atggtcagcgttttcgatattttcaaaattggcatcggcccatccagttcccacaccgttggcccgatgaaagccggcaaacagttcgtcgacgatctgatcgcccaccagcagttgcaggacaccacccgcgtggtggtcgacgtgtacggttcgctgtcgttgaccggtaaaggccaccacaccgatatcgccatcatcatgggcctggccggcaacctgccgcacgacgtggacatcgacagcattcccggctttattcgcgacgtcgaacagcgcggccgcctgccgctggccaacggccatcacgaggtggatttcccgcatcacggcggcatgaatttccacagcgataacctgccgctgcacgaaaacggcatgcgcatccgcgccttcgccggtgagcgcctgctgcacagcaaaacctattactcgatcggcggcggtttcatcgtcgacgaagagcacttcggccagtctgccgagggcgccacgccggtgccctacccgttcaaatcggcgcacgatctgcagcagcattgcaaagacaccgggctgtcgctgtccggcctggtgatgcagaacgagctggcgctgcgcagcaaggccgatatcgacgcgcacttcgccgacgtctggcaggtgatgagcgccggtatcgagcgcggcatcaacaccgaaggcttgctgcccggcccgatgaaggtgccgcgccgcgccgccgcgctgcgccgcattctggtgaccggagacaagaacaatatcgacccgatgaacgtggtcgattggatcaacatgttcgcgctggcggtcaacgaagaaaacgccgccggtggccgcgtggtcaccgcgccgaccaacggcgcctgcggcatcattcctgcggtgctggcttactacgacaagttcatccgtccggtaaacgccaactcctacacccgttacttcctggcatccggcgtgattggcgcgctgtacaagatgaacgcctcgatctccggcgccgaagtgggctgccagggggaagtgggcgtggcctgttcgatggcggcggccgggttgaccgagctgctgggcggcagcccggcgcaggtgtgcatcgcggcggagattgccatggagcaccatttggggctgacctgcgatccgctcgccggccaggttcaggtgccctgcatcgagcgtaacgccatttccgccgtcaaggcggtcaacgccgcacgcatggcgatgcgccgcaccagcgaaccgcgagtttgtctggataaggtgatcgaaaccatgtacgaaaccggcaaagacatgaacgccaaataccgcgaaacctcacagggcgggctggcgatcaaggtcgtggcctgcaactga

SEQ ID NO: 422367 - DNA, 1299 bp, Serratia marcescens
atggacactacacagaccggcacaattgcctctgcggcctcgggctccagcagtacctggcgtaaaacggataccatgtggatgttgggcctgtacggcaccgccatcggcgcaggcgtcctgttcttgccaatcaacgccggcatcggcggtttgattcctctgatcatcatggccatcatcgcttttccgatgaccttctttgcccaccgcggcctgtgccgtttcgttctgtccggcaagaatcccggtgaagacatcaccgccgtggtagaagagcacttcggcatcaccgccggtaaactgatcaccctgctgtacttcttcgccatctacccgattctgctggtttacagcgtggcgatcaccaacaccgtcgacagcttcatcacccaccagttgggtatgacgtcgccaccgcgcgccatcctgtcgctgatcctgatcgtcggcctgatgaccatcgtgcgcttcggtgagcaggccatcgtgaaaaccatgagcatcctggtcttcccgttcgtcgcggtgctgatgctgctggcggtgtatctgatccctaactggaccggcgccatcttcgaaaacgtgtcgctgtccggcagcggtaccggcatgggccacggcctgatcatgaccctgtggctggcgatcccggtaatggtgttctccttcaaccactcgccgatcatctccgccttcgccgtcgccaaacgcgaagagtacggcgcagacgccgagaagaaatgctcccgcattctggcctacgcacacatcatgatggtgctgaccgtgatgttcttcgtgttcagctgcgtgctgagcctgacgccggaaaacctggcggaagccaaggcgcagaacatctcgattctgtcttacctggctaaccactttaacaacccgatgatcgagtacatcgcgccggttatcgccttcgtcgccatcaccaaatcgttcctgggccactacctgggcgcgcgtgaaggcttcaacggcctggttgccaagtcgatgaagagccgcggtaaaaccgtcagcaccgccaagctgaaccgcatgaccgctatcttcatgctggtgaccacctggatcgtcgccaccctgaacccaagcatcctgggcatgatcgaaaccctgggcggcccaatcatcgccatgctgctgttcctgatgccgatgtatgccatccgtaaagtgcctgccatgcgcaagtacagcggccacatcagcaacgtgttcgtggttgtgatgggtctgatcgccatctctgctatcgtgttcagcctgctcggctaa

SEQ ID NO: 422368 - DNA, 765 bp, Serratia marcescens
atggaaacgcggcgcgaagaacgtatcaaccggttagttcaggcgttaaaacgcgctgacaagatccacctgaaagaagccgccgtgctgctgggggtctcggagatgaccattcgccgcgatctgagcgccgaaccggcggcggtggtgctgctcggcggctacgtggtgaccgatccgcgcagcaacggcgtcaccaactacttcgtttccgatcaaaaagccaagcaggtgacggagaaacggcgcatcggcctgctggcggcgccgttgatcaatgaaaacgacacggtgtttttcgactgcggcaccaccaccccggcgatcatcgacgccatcgccgacgagctgatcttcaccgccgtgtgtcattcgctgaacaccttcctggcgctgcaggacaaaccgaactgcaaagtggtcctgtgcggcggtgagttcaagccgaacaactacatcttttccagcgtcggcggccgcaacgagctcgatcacatctgcccgaacatcgcctttatctccgccgccggcctcagcctgcagcatggcgccacctgcttcaacttcgacgagctggagatgaagcatcgcgccatggcgatggcgcagcaaaagatcctggtggcggatcacagcaagttcggcaaaaccaaaccggcctgcatcggcccgctgacgcagttcgatcgggtgatcagcgaccgccaaccggacgccgacttcatggcgttcttcaacgacaacgccatcgctacccgctattaa

SEQ ID NO: 422369 - DNA, 681 bp, Serratia marcescens
atgaccaccgaaaacatcgattacgccagctacgttgaccacaccctgctggcgatggacgccaccgaactgcagatcgccaaactgtgcgaagaagcgcagcagcacaacttctatgcggtatgcgtcaactccggctacgtgccgctggcggcccagctgctgcaggaaagcactgtgaaagtctgctcggtgatcggtttcccgctgggcgccggcctgaccgtcgccaaagcctttgaagccaaagcggcaatcgccgccggcgcgcaagagatcgatatggtgatcaacgtcggctggctgaaaagcggcctgctggacgaagtgaaagccgacatcgccgccgtgcgcgaggtttgcgcggcgatcccgttgaaggtaatattggaaacctgcctgctcagcgatgcgcagatcgtccaggtttgtgaaatgtgtcgcgaactcgatgtcgccttcgtgaaaacctctaccggcttcagcaccggcggcgctcgggaagagcacgtcaaactgatgcgcgagaccgtgggcagcgaaatgggcgtgaaagcttccggcgccgtgcgcgatcgcgccaccgccgagaagatgatcaacgccggcgccacgcgtatcggcaccagctccggcgtcgccatcgtatccggcgcccagccggcggcgggcagctactga

SEQ ID NO: 422370 - DNA, 837 bp, Serratia marcescens
atgaagatcaacatcgaactggatcctgaagctttcggggcgcatcggcaggaactgttccgcaatgcggatttcgcggtgagcgcgcatcgctgcgcagaacgcgggccgatgctgacgctggcgaactgccgcggcgcgctgacggtcttgccgtatgagggtctggcgatttgggacgccgagtttgacggttattcattgaaatcgggccgccgcagcgcccgcggtctcgggagaaagcgcgctgacgacgcggcgttctgccccgcctggccgagccacgacggcgcgccgctgcagatgcagcgcgtgtggctgcagctgacgggcgatgagctgacgttgcatggcgaaggcgagcggttgggcgggcgttggcgcatcggcccggcgctgcgtttggcagcccagagcgcgcagttcgccatagagatgaaggtcactaacctggccgagcggccgcagccgctgcgctatgtgtgtcgcctcaactatgattgcattcccgacgcggtattccgccagaatctgccgacgccggctttgttaggggatgcgatcgggcaagaactgctgtgctccgacgatctgacgcgctatgtggatcaggccgagttctttatgctgacgccgcaaggccggcgctatgtgacgcgtttcgccaccgggcagttcaactatggcctccggcgcatcgccgttcagggcaaccggcggctgctggcctttgttcagccggcgaactgccgcccgaatgcgccagagggtgaggcgggggtgatgctgggagcgggaaaaacgcgtgcgttctgcgtgaccaccggcgcggtgtga

SEQ ID NO: 422371 - DNA, 606 bp, Serratia marcescens
atggagcagttaaaccatgttcttttcgcctggatcaatgcgaccccggcgtctcccgagtggatgattgatttcgccacctttttggcgcgcgatctgatcattatcgtgccgctgctgatcgtcggcctgtggctgtgggggccgcaaagccagctggtttcacagcgcgaagtggtggcgaaaaccacgatcgcgctgctgttcgccatgcttgccgcctccgctatcggcgcgctgctgccgcatgagcgcccattcgtcgccggcgtggggtataccttcctggcgcacgcgccggacagctcgttcccgagcgatcacggcaccgccatctttacctttgcgctggcgttcctgttctggcaccgggtctggtccggtgcgctgctgatgattgtcgccatcggcatcgcctggtcacgcgtttacctcggcgtacactggccgctggatatggtcggcggtttcctgctcggcctggtcggctgcctgttcgcccagctggtgtggaatctgttcggcgatcccctcgccgacaagctgtcgcgcctgtatcgtttcctgttcgccttcgccattcgccgcggctgggtgaaagagtaa

SEQ ID NO: 422372 - DNA, 735 bp, Serratia marcescens
gtgaatccagaatcgtcattaaatcaatcctcaacggcaccgcaaattaagacaaccgccctttactccctgccggcatccttttaccgttggcaggtttttggcctgctgatcagcggcctgctgttcctgtggctctcccgcaacgaacagctggactgggcgatcagcaacttttggtacgatgccgccagcgggcatttcccgtggcaaaacaatgattggctggatctgatcaaccaccgcctgctgaagcaaatagtgatcgtcggggcggtactggcgctgttttggggcatctatcgccgcagcgcgcgcctgatcgtcagcatgttgcttctcggcatcggcccgctggtggtgggcattctcaaggccaccagcgcgcactcctgtccgtgggatctgatcgagtacggcggcaaggcgatgtccttcccgttgttcggtgcggtgccggcgctgccgggccccggccgctgtttccccggcgggcacgcctcgagcggtttcgcggtcatggcgttgtttttcctgttttatccgcagcgcccgcgcctggcctggtggtgctggtgcggcggcattgcgctcggcatgctgatgggctttggtcagatcatgcgcggcgcacattttcttacccataacctgtgggcgggttggtgggtttggttaagccagttggttatttattggatggttagcggctattggtgccgcaagatgaggtaa

SEQ ID NO: 422373 - DNA, 846 bp, Serratia marcescens
atgaagaataaagcgcgtgtcttactgttggcggccgccggtgcggccttttctccgttgagttttggccaacctgcggccgccgggccgatcgtggtgcagggcgccatgccggtagaggcggaacgtttcgccctgcggttggaaaacccgcgcgaggagcagatcggcggctggcgcttttggcacggcaccgtagacggctacccggtggtggtgtcggagacgctgaagggcatgtccaacgccgcggcggccacggcgatcgccgccacgcagttccgcccggtggcgatcatcaaccagggcaccgccggcggccacgatcctgcgctcaaggtgtatgacatcgtgctgggcaaatattcggtcaatctcggggcgttcaaaacgccggccaaggcgttgggggcaggcagcgactcgcggcagtggcagccgatggatctgttggcttccaaaggcagcgccggcgaggacaaaaaggcgcacagcctgcgtcagtttcccgccgaccccaacctgctggcgattgcgcaaagcgttaagggcgattaccgacagggcaaggtcgtggaaggggtaatcggctcggccgacgtgtggaacagcgagctggaccgcattcgctatttccacgaccgctatcagacttcggtcgaagagatggagaccgcctccgccgcgcagatcgccgccgaattcaaggtgccgttcgtcggcattcgcgtgttgtccaacaacatcaccaatcagggcaactacgatccgcaaaccgggctggcatgccaggattatgtctatcaggtggtgaaggcctatgttgccaacctgaagaaacgctga

SEQ ID NO: 422374 - DNA, 513 bp, Serratia marcescens
atgaataaggcatccgttgtattttccggcctgctgatggccgtttccgccggcgctatggcggctacctctggcgatgacgcggatatcagcaaacagccactggaaaaggtcgcgccttacccgaaagccgagaagggcatgaaccgccaggtgatctacctgccgaagcaagaacacgaagagaactacaaagtggagctgctgatcggcaagacgctggaagtggactgcaaccgccacatgatcggcggcacgctggaaaccaaaaccctctccggctggggctacgattatctggtgctggagaagctctctgaaccggcctcgaccatgatgggctgcccggacaacactaagaccaagcaattcatcgccgctaacctgggcgacgccgcgatgcagcgctacaacagccgcctgccgatcgtggtgtatgcgccgaaagacgcggaagtgaaataccgcatctggaaagccgaagataccgtaagccaggccgagcagaagtaa

SEQ ID NO: 422375 - DNA, 906 bp, Serratia marcescens
gtgcgtcaacgaaggttgcctaacctggcggtattacgggctttcgaagctacggtgcggtacggcagcgtgtcgaaagccgccaaatctctcaacgtcaccgacggcgccgtcagccgtgcggtgcgcgaattcgaacaaaccttgggattcgcgctgtttcagcgcaccagccgcatggtgcatccgacgccgcaggcgcaagagctggcgagcgagatcggccgggggctggacaacctgcagtcggcgatcgaccgcgcctgtcggcatcatcagaatcgcccgttggtgatctcctgcgagccgacctttctgatccgctggctgatcccgcgcctggccggtttgcagcaggcggtggggaaagagcgcgatctgcagctggtctccgccggcggcgccgtcgccttctcgcgcgaaggcatcgatctggcgattcgccgcaacgatttcccgatcgccgacgacgtggtcgcccgcccgttcctcaaagaacgggtcggcccggtatgccgccgggagcatgccgcggcggggcgtgaactgcgcggcaccctgctccacaccgagacgcgaccgttcgcctggcgcgactggtgcgcccacagcggcttcgagatccagccgggcaacgagctgcgtttcgaacatttctatctcagcctgcaggcggcggtcgccggcgccggtatcggcatcggcccgttggcgctggtggcggatgacatcgtcaacggcgcgctggtggcgccatatggctttgcgcctgacgggacggattacgtgctgatgacccaggccgacggccaggaggatgcgatcttctcaacggtgttggattggctgatcgccatgggggaagaaaccgaacgggcggtattggcgggcggaaagaaagcgtaa

SEQ ID NO: 422376 - DNA, 1116 bp, Serratia marcescens
atgattgccattctcgccgatgatcttaccagcgcgctcgacggcgcggctccgttcgccgcacgcggattgaacgcctgcgtcatgctgcgcctgcccgatgccgcgttgcagggcgctgagatcgtcgctttcgatttagattcccgcttcgtttcgccggagcaggcggagcggcgttttcgccatgccgccgcctgcgtgaaaccggcgcgcctcatctacaaaacggtggattccacgctgcgcggcaatctggggccggaaacgcgcggggcgctgacgggcagcgggcgccgtctcgccatcgttgcgccggcctttccggatgccggccgcaccacggtgggcggccggcaatacgtcgacggcgtcgcgctggagcagaccgcctttgcgcgcgatccgaagaacccgatcgtcaccggctatgtcatggagcgcatggcggggctggagccgacgcgttttcaggtattcgacgccgcagacaacggcgagttggatggggtcgtgaggcggatcggcattgccgaaccggtggtgtgggtgggatcgccgggcctggcggcggcgctgtcgcgtgcgttgtcctcggaggagaacgcgccgcccactcaaccgccgctgagagcccgcaaggtgctggtggcgattggcagcctgcatccggcgaatgacgcccagctggcaagcctgcggcaggcgggcgcggtgctggtcacgctgcctgaagcggccgatcccgaggcggtagcgcaagaggtgcgagcagcgtttgcgcgtgccgatgtggtttgcctgatgtcgccccggtcgcgagcggccacggcggatcatgccgctgcgctgggcgcggtcgtcagccgttgcacgccagccttcgacgggctggtggcgaccggcggcgataccgcgcggcgcatcgtcgacgctatggcggccggctcattgacgctgttcggcgaggtggaacccggcgtgcctttcgggttgttaaatctgccgggccgcaggctgccgttcgccaccaaggcgggcggttttggccgggccggtacgttgttgaactgcgtaacccggttgcgcgctgaccgagaaggagaagaacaatga

SEQ ID NO: 422377 - DNA, 1002 bp, Serratia marcescens
atgaccctttccaccttgccgctggcgataacgatgggcgatcccgccggcatcgggccggagatcattgccaaactggcggccacagagcggttgagcacgccttatgtggtgattggcgatgccggcgcactggcgcgcgcggcggccagtctggggctgacgctgcctatccgcgaactgcccgcctcgctggcgggatgggacgaagcctggctgcgaggggagaccgccgtctattccgccggcgttgcgctgccggcggacttgcccctcggcaggctcgataagcgcgcgggggcggcgtcttatgcctgggtggttgccgccatcgatctggcgctggcggggcgcatcgccggcatcgtcactgcgccgctgaacaaggaagcgatgcgcctggcggggatcgattatccggggcacaccgagatcctggcggcgcgatcgggcacccaggacttcgccatgatgctggccaatgacgagctgcgggtgatcctggtttccattcacgtttcgctgcgggacgccatcgacgcggcgaccgtggaaaacgagctgcgcgcgtttcatctggcgcaaacggcctgccgggcgttgggcatagcgaaaccgcgcattgcggtggccggcctgaatccgcacgccggggagaacggcctgttcggccgcgaagatcttgacgtcatcgtgcccgccatcaccctggcgcgggaacaggggttggacgtcagcggcccctggcccggcgataccgttttcatgcgcgcccggcgcggggagttcgacattgtggtcgcccaatatcacgaccagggcctgatcccggtgaaatatctcggggtggatcacggcgttaacgtcaccgtcggcctgccgtttatccgcacctcggtcgaccacggtacggcgttcgatattgcgggcagcggacgggcggaacacgccagcctgctgtacgccttccggcaggcggaaaaaatgctgcgcgcccaataa

SEQ ID NO: 422378 - DNA, 693 bp, Serratia marcescens
atgcacacacccgagtttattttcatgctgacgcgcaacgacagcacggtgcccgatgcgcaagcgcggctgccagaagtgctggctgccggcgtgaagcatatcggctttaaggatatcggcctgccgctggatcaactcaaacagttggcgcaggcgatccacgccggcggcgccaccgcttatctggaagtggtcagcctggatgaagaaagcgagatgaattcggcgcgcgcggcgctggaattgggcgttgatgtattgatggggggaacgcgcccggaaagcgtgctgccgatcattcgtcagtctgacctgcgctactatccgttcgccggccgcatcagcggccaccccagcgtgctggaaggtgacattgacgatattgtcgccagcgcccgccagcgcgctgctttaccgggcgtgacagggctggatctgctggcctaccgctttgccggcgacgtgccgacgttgattcggcgggtgtgcgatgcggtcgacaaaccgatttatatcgccgggtctatcgaccgggaagatcgcatcgccgccgtggtgacgggcaatgcggttggtttcaccgtcggtaccgcggcgctggacggcgtgtttcccgccgataagccggggctgacggcgcaaatcaacgcggtgaaatgcctgattggcaatgtgatccgcaaactgtaa

SEQ ID NO: 422379 - DNA, 351 bp, Serratia marcescens
atgaataaagggttagggagtgccgttgtggcggtgagcctgttgttaaccggctgcgatactttcagcctgctgcgcgatcaaaagatcgccgacgcttttcacgtcggcgccgacaagcgctcggtcagccgggatttcggcgcgccgatcgccaccctgccgacgctgaacggccagggcgtgtgccacgactataaccaccgcttgccgaacggtaccgtgacgccgttctacgttggcttcagaaacagcgacggcaaagtggtggccttcggcccaaccacctgcggggaagcgcaggccaacggcaatctgaacagtgatgaacctatcaaacagcggttctaa

SEQ ID NO: 422380 - DNA, 1779 bp, Serratia marcescens
gtggtgatttataacgtcgttttaaggctgaatctatctcttatagttatctatatcaagcacttactggtaaacaataagttatcctccgtgaacataaacgtcgctagtttgttaaacggtaactacattctgttactgttcgtggtactcgcactggggctgtgcctcggtaaactccgtctgggctccgtccaactcggtaattccattggcgttttggtggtttcgctgctgctcggccagcaacacttcgccattaacaccgaggcgctgaatctcggctttatgctgtttattttctgcgtgggcgtggaagccgggcccaactttttctcgattttcttccgcgacggcaaaaactacctgatgctggcgttggtgatggtcggctcggcgatggtgatcgccatcggtctcggcaaactgttccactgggacatcggcctgaccgccggcatgctggccggctcgatgacctcgacgccggtgctggtgggcgctggcgacacgctgcgcaacaccatcgtcaacggcccggcgctgctggcggcgcaggatcatctgagccttggctacgccctcacctacctgatcggtctggtcagcctgatcttcggcgcgcgctacctgccgaagctgcagcaccaggacctgtccacctctgcccagcagatcgcccgcgaacgcggcctggacaccgacagccagcgcaaggtctacctgccggtaatccgcgcctaccgcgtcggccccgaactggtggcctgggccgacggcaagaacctgcgcgaactgggcatctaccgccagaccggctgttacatcgaacgcatccgccgcaacggcattctggccaacccggacggtgacgcggtgctacaggtgggcgacgagatctcgctggtcggctacccggacgcccacgcgcggctggacccgagcttccgcaacggcaaggaagtgttcgatcgcgatctgctcgacatgcgcatcgtcaccgaagagatcgtggtgaagaacagcaacgcggtgaacaagcgcctgagccagctgaagctgaccgaccacggctgcttcctcaaccgcgtgatccgcagccagatcgaaatgccgatcgacgacagcatcgtgctcaacaaaggcgacgtgctgcaggtgagcggcgacgcgcgccgggtgaagagcgtggcggagaagattggctttatctcgatccacagccaggtgaccgacctgctggcgttctgcgccttcttcatcatcggcctgctgatcggccagatcaccattcagttcagtaacttctcgttcggcatcggcaacgccgccggcctgctgatgtccggcatcatgctcggcttcctgcgcgccaaccacccgaccttcggctacattccgcagggcgcgctgaacatggtgaaagagttcggcctgatggtgtttatggcgggcgtgggcctgagcgccggcgccggcatcggccacagcctgggcgcggtcggcggccagatgctgatcgccgggctgatcgtcagcctggtgccggtgattatctgcttcctgttcggcgcctacgtgctgcgcatgaaccgcgccttactgttcggcgccatcatgggcgcccgcacctgcgcgccggcgatggagatcatcagcgacaccgcgcgcagcaatatcccggctctgggctatgccggcacctacgccatcgctaacgtgctgttaacgctggcgggttcacttatcgtggtgctatggccagggatactcggctga

SEQ ID NO: 422381 - DNA, 390 bp, Serratia marcescens
atgacgagttatagatattggctgggcattctcagctgttttctgttgttcagcctggtgtttctcggccagcaaaccggcctgttcggcagcacggatcatgagcaccacggcgaaaccggcctgctgctgtttgtgatccccggtgcgatcgccagctatctgtcgagccgcaagcggctgctttgcccgctgctcggtgcgctgtatgcgctgccgctgtgcctgctgatccgccacttctggctgacgccgtcctcttcgttctggcaggagctggcgtacgccaccagcgcggtgttctggtgcgtgttcggcgcgatgctgatgctgttcgccctcggcctgttgcagacgctgcagcagctgcaccggcggcagcggcaataa

SEQ ID NO: 422382 - DNA, 264 bp, Serratia marcescens
atgtttgcagtaatcttcgggcgtcctggctgtccttattgtgtccgcgctaaagaactggcggaaaaactgactgaagaacgcgacgatttcaacttccgttacgttgacatccacgcggaaggcatcaccaaggccgatctggaaaaaaccgtcggcaaaccggttgaaaccgtgccgcagatcttcctggatgagaagcacatcggcggttgcaccgatttcgaagcttacgccaaagaacacctgaacctgttccagtaa

SEQ ID NO: 422383 - DNA, 303 bp, Serratia marcescens
atgcgttcattcggtgacttaccgcgcccggtgctggtgttggaagggctgggcatcgtgatgctggtgctggcctacctcagcattcacggccacctgcagctgccgggctggctggcttcgcagcaggcggcggtcggcatgattttcctcggcgtggcgctgatggtgccggcggcggcgtttctggtgtggcgcgtggtgcagggcttcgggccgctgatgcgcggcgggttgccgccggaaaacgatcgccgcaaaccgcaatcgaaagataatcaggacagcgatccgcgcgcctga

SEQ ID NO: 422384 - DNA, 903 bp, Serratia marcescens
gtgaaaattgccattctttctcgcgacggaacgctctactcatgcaagcggctgcgtgaagcggcggaagatcgcgggcacagcatcgatatcatcgatccgctctcctgctacatgaacatcaatccggcggcgccgaccattcattatcgcggccgccaactggagcgttacgatgcggtgatcccgcgcatcggctccgccatcaccttttacggcacggcggtgctgcgccagttcgagctgctcggcagctacccgctaaacgaatccgtggccattacccgcgcccgcgacaagctgcgttcgctgcagctgctggcgcggcagggcatcgatctgccgattaccggctttgcccattcgccggacgataccggcgatctgatcgaactggtcggcggcgcgccgttggtggtcaagctggtggaaggcacgcagggcatcggcgtggtgctggcggaaacccgccaggcggcggaaagcgtgatcgacgcctttcgcgggctgaacgcccacatcctggtgcaggagtacgtgcgtgaagcgcaggggcgcgacgtgcgctgtttggtggtcggcggccgggtggtggccgccatcgaacggcaggccaagcccggcgagtttcgctccaacctgcaccgcggcggcacagcccgcaaggtgaccatcaccgccagggagcgggcgatcgcggtgaaagcggccagcacgctggggctggacgtcgccggggtggatatcctgcgcgccgagcgcggcccgctggtgatggaggtcaacgcgtcgccggggctggaaggggtggaaaccaccaccgggctggacatcgccggcatgatgatcgaatacattgagcagcgcggccggccgggctttcgcctgaaatccggcggttga

SEQ ID NO: 422385 - DNA, 480 bp, Serratia marcescens
atggattcactcattgtccccgatttggcgctgttgcggcgctggctggatcagtcgggcatctctttctttgagtgcgattcctgccaggcgctgcacctgccgcacatgcagaacttcgacggcgtgttcgacgccaagatagatctggtggacaacgtcattctgttctctgcgctggccgaggtgaaaccgaccgcgctgatcccgctggtggcggacctgagccagatcaacgccagttcgctgaccatcaaggcgttcgtcgacattcaggacgacaacctgccgaagctgatcgtctgccagtcgttgagcgtggcggtcggcatcacctacgagcagtttacccacttcatgcagcagggcgaagagcaggtctcgatggtgatcctcgaggcgcgggcgaacgatctgctgtttatgggtgatgaagaagagatccccgctggcgccgtgcgtcagccgatgctgcactga

SEQ ID NO: 422386 - DNA, 1110 bp, Serratia marcescens
atggtcacccaacgtaaaaagtggttatcgggtgtggttgccggcctgttgatggccgcgtccgtcacggcgtcagccgaagagaaaacgctgcacgtgtataactggtccgactatatcgcgccggataccctggccaaattccagaaagaaaccggcatcaaggtggtgtacgacgtctttgactccaacgaagtgttggaaggcaaattgatggcgggcagcaccggttatgatctggtggttccttcatccaacttcctcgagcgccagtcgcaggccggcatcttcgagccgctcgacaagagcaaaatgcccaactacaagaatctcgatcccgagatgctgaagctggtggcgcacaatgacaaggacaacaaatacggcatcccttacctgatggtgaccaccggcatcggctacaatgtcgacaaggtgaaggcggcattgggcaaagacgcgccggtcgacagctgggatctgatcctcaagccggaaaacctcgagaagctgaaaagctgcggcgtctccttcctcgatgcgccgagcgaggtctacgccaccgtgctgcactatctgggcaaagatcccaacagcaccaacgcggcggactataccggcgcggctaacgatctgctgctgaagctgcggccgaacatccgttacttccactcgtctcaatacatcaacgatctggcgaacggtgatatctgcgtggcgatcggctggtcgggcgacgtgatgcaggcggccaatcgcgccaaagaggcgaagaacggcgtgaacgtggcctacgcgatcccgaaagaaggggcgctgacctactttgacatgttcgccatgccggcggacgccaagaacaaagacgccgcctaccagttcctgaacttcctgatgaaacctgacgtgatggcgggcatcagcaactatgtctattacgccaatgcggtgaaggactccacgccgctggtgaacgctgaggtgcgcaataacccgaacgtctatccgccggccgatctgcgcgccaagctgttcacgcttaacgtacagtcgccgaagctggaccgtgtcattacccgcgcatggactaaagttaaaagcgggaagtga

SEQ ID NO: 422387 - DNA, 1134 bp, Serratia marcescens
ttgaacgacgccatccctcgtcctcaagccaagtcgcagaaggttttcacccctctgctggaaatccgtaacctcaccaaaaccttcgacgggcagaacgcggtcgaagacgtcagccttaccatctacaagggcgagatctttgcgttgctcggcccgtccggctgcggcaaatccaccttgctgcgcatgctggccggtttcgagcagccctcggaagggcagatcgtgctcgatgggcaggatatgtcgcacgtgccgccgtaccagcggccgatcaacatgatgtttcagtcctacgcgctgttcccgcacatgacggtggagcagaacatcgccttcggcctgaaacaggacaaaatgccacgggcggcgatcgccgagcgggtggcggaaatgctggcgctggtgcacatgcaagagtatgccaagcgcaagccgcaccagctttccggcggccagcggcagcgggtggcgctggcgcgcagcctggccaagcggccgaagctgctgctgctggatgagccgatgggcgcgctggacaagaaactgcgcgatcgcatgcagttggaagtgaccgacattctcgagcgcgtcggcgtcacctgcgtgatggtgacgcacgatcaggaagaggcgatgaccatggcggggcgcatcgccatcatgaaccgcggcaagttcgtgcagatcggcgagccggaagagatctacgagcatccgaacagccgcttcagcgccgaatttatcggctcggtcaacgtcttcgactgcgtattgcaagagcgccacgacgatgcgctgatcctgcaaagcccagggttgcgccatgcgatcaaagtcgatccggacgcctcggtggtggacggcgtgccgatccaggtggcgctgcggccggaaaagatcctgctgtgcgaacaggtgccggaagacggctgcaacttcgcggtgggagaagttgcgcatatttcctacctgggcgatctgtccatttatcacgtgaagctgcacagcgggcagattatcagcgcccagctgcaaaacggccaccgtttccgcaaggggatgccgacctggggcgatgaagtgcgtctgtgctgggaaaccgacagctgcgtagtgttgacggtgtag

SEQ ID NO: 422388 - DNA, 963 bp, Serratia marcescens
atgaccctgctttctgaacgcacgccggaaccgccggccaaaacgcccggcaccctcaaggcgctgttccaccgcctgctgatggctcacggccgcaagctggtgatcgcgctgccgtatttatggctgacgctgctgttcatgctgccgttcctgatcgtgttcaagatcagcctggcggagctggcgctggcggtgccgccttacaccgagctgatgagctgggtggacggcaagctgaacatcgcgctcaactttgccaactacatgcagctgaccgacgatccgctgtatatcgacgcctacctgcagtcgctgcgcgtggcggcggtctcgacgctgtgctgcctgatcatcggttatccgctggcctgggcggtggctcacagcaaggcgtcaacccgcaacattctgctgctgctggtgatcctgccttcctggacctcgttcctgatccgcgtctatgcctggatgggcattctgaaaaacaatggcattcttaataacttcctgatgtggctgggtgtcatcgatcagccgctggtgatcctgcacaccaacctggcggtgtatatcggcatcgtttattcctatctgccgtttatggtgctgccgatctacacggcgctgatccggctggattactcgctggtggaggcgtcgctggatctgggcgcccggccgctgaaaaccttcttcagcgtgatcgtgccgctgacgcgcggcggcatcatcgccggttcgatgctggtgttcattccggcggtgggggagttcgtgatcccggaactgctcggtgggccggacagcattatgatcggccgcgtgctgtggcaggagttcttcaataaccgcgactggccggtagcttcggcggtcgccaccatcatgctgctgttgctgatcgtgccaattttgtggttccacaaacaccagaacaaggaaatgggggggcaggcatga

SEQ ID NO: 422389 - DNA, 846 bp, Serratia marcescens
atgaacaacttgccggtagtgcgttcaccgtggcgcatcgccatcctgacgatcggctttaccttcctgtatgcgccgatgctgatgctggtgatctactccttcaacagctccaagctggtgacggtgtgggccggctggtccacgcgctggtataccgaactgttccacgactcggcgatgatcagcgcggtgggactcagcctgaccatcgccgccgcttccgccaccgccgcggtggtactgggggccatcgccgccgtggtgatggtgcgcttcggccgctttcgcggttcgaccggcttcgcgtttatgctgactgcgccgctggtgatgccggacgtgatcaccggcctgtcgctgctgttgctgttcgtggcgatggggcacgccttcggctggccgtcggagcgcggcatgttcaccatctggctggcgcatgtcaccttctgtaccgcttacgtggcggtggtgatcagctcgcgcctgcgcgaggtggatcgctcaattgaagaggcggcgatggatctgggggcgccgccgctgaaggtgttcttcgtcatcaccttgccgatgatcgcgccggcgctgatctccggctggatgctggcgttcaccctgtcgctggacgacctggtgatcgccagcttcgtctccggcccgggcgccaccacgctgccgatgctggtgttctccagcgtacgcatgggggtgaatccggaaattaacgcgttggccagcctgatcctgctggtggtgggcattctcggcctgatcgcctggtggtttatggcgcgctcggaaaaacaacgatcgcgcgaattgcagcgggcggcccgtagctga

SEQ ID NO: 422390 - DNA, 471 bp, Serratia marcescens
atgctgaaaagcgggcagggaatgggatcgacttcggatgcgccggtgccggtgatggtggcgggtaccgccatggtcgcgatcaagtgtatcagcgtggtgctgctgctgggcgagctgggcgtcgacggcgcgcaggagttcgtcaacaccagcgcgcaggcgtgggattctacctttatctttctggccggcctgctgctgctgtgcctgcaaatcagctgcggttttgccgtgatgcgcggccgcaactgggggcgctgggggtatgtagcctgccagtgcatcgtggtgctttacctgctgttggccaccatcggcagcgtctttcccgaggtgttcaccgtggaaggcgaaaccagcggccaaatcctgcacgttctgatcctgcaaaagatccccgacgcggtgatcctggcgttgctgttcgttcccaccgccagccgccgcttcttcaccgcgcgcaagtga

SEQ ID NO: 422391 - DNA, 1128 bp, Serratia marcescens
atgcattgcgctttgtatacggcgggcacctgccgttcctgtcagtggctggaaaagccctatccgcagcaactggccgacaaacagcatcacctgcactcgctgctggccgggcgcgacgtcgcgcagtggctgcagccggtggcgggggaactgagcgcatttcgcaataaagccaagatggtggtcagcggcagcgtggagcgcccgctgctcggcatgctgcaccgcgacggcacgccggtcgacctgagcgactgcccgctgtaccctgccggttttgcgccgatgttcgcggtgctgaaaagctttatcgcccgcgcgggcctgacgccgtacaacgtggcacgcaaacgcggcgagctgaagtacctgctgctgaccgaaagcacgctcgacggcggcgtgatgctgcgcttcgtgctgcgctcggaaaccaagctggcgcagctgcgcgccgcgctgccgtggctgcagcagcagctgccgcagctcaaggtgatctccgccaatattcagccggtgcacatggcgatcatggaaggggagcgcgagattgcgctgaccgaacagcaggcgttggaggagcggttcaatcaggtgccgctgtttatccgcccgcaaagcttcttccagaccaacccgcaggtggccgccgatctgtatgccaccgcccgcgactgggtgcgcgcgctgggtatcgacagcatgtgggatctgttctgcggcgtcggcggtttcggcctgcactgcgcgcagccgcaaacgcggctgaccggcatcgaaatcagcgcggaagcgatcgcctgcgcgcgccagtcggcgcagcggttagggttgttgcacgtagattttcaggcgctcgattccacccgtttcgccaccgccgaaggccaggtgccgcagctggtgctggtcaacccgccgcggcgcggcatcggccaggcgctgtgcgactatttgagccggatggcgccggactatattctctattcgagctgcaacgccgagagcatggcgaaagatatcgagatgttgccggggtaccgcatcgaacgggtgcagctgttcgacatgttcccgcatactgcgcactacgaagtgctgacgctgttggtgcggcgttaa

SEQ ID NO: 422392 - DNA, 285 bp, Serratia marcescens
atgacttataagcttgaattcgaagaacatgcgctgaaggaatttaaaaaactgtccccggtgatccgggaacagttcaaaaaaaagctggtatcggtattggttaatccccacgtccccgccaacaaactcgccggtttgcccgattgctacaaaatcaaactcagagcatcaggctttcgtttggtgtatcgcgtcatggaaacggagatcgtggttctggtcctgtcagtgggcaaacgcgaacgttcagcggcttacacggctgccaaaaagcgcctttaa

SEQ ID NO: 422393 - DNA, 252 bp, Serratia marcescens
atgacggttcaacccattcttgccgattccgcagtcagcatcagcgattttaagaaatcgcccaacgccgcccttaaagaggcacaagggcagccggtcgccgtcctgaccaacggtaagatttcgggatattacgtctcaccggaaacctgggaggctatcgcggagtacctggaagatatcgaactcgctgaaatcgttcgttcacggatgaacggcaaacgcattaaggtcaatttggatgacttataa

SEQ ID NO: 422394 - DNA, 735 bp, Serratia marcescens
atgaaaaaactgctgcttgccgcgacgatgttggccggaatcacctttaacgccaccgcggccgagaccatccgcttcgccgcctccgccacctacccgccgttcgaatcgctcgacgccaataaccagatcgtcggcttcgatatcgatctggccaacgcgctgtgcaagcagatgcaggcgcagtgcaccttcaccaaccaggcgttcgacagcctgatcgccgcgctgaaattcaagaaatacgatgcggtgatttccggtatggatatcacgccggagcgcagcaaacaggtcgccttcacccagccttactacgccaactcggcgatcgtgatcgcgcaaaaaggcaagttcagctcgctggcggatctgaaaggcaaaaaactcggcatggaaaacggcaccacccaccagaaatacatgcaggacaagcacccggagattaacaccgtctcttacgacagctaccaaaacgccattctggagctgaaaaacggccgtatcgacggcgtgttcggcgacaccgccgtggtgaacgagtggctgaaagccaacccgcagctggcgccggtcggcgagcacatcaccgatgcgcaatacttcggcaccggtctcggcatcgctgtgcgcccggacaaccaggcgctgctggccaagctgaacgccgcgctggacgccatcaaggccgacggcacctacaaggccatcaacgacaaatggttcccacagtaa

SEQ ID NO: 422395 - DNA, 669 bp, Serratia marcescens
atgattgagtatttgccggaaatcctcaaagggttgcacaccagcctgacgctgaccgtcgccgcgctgatcgtcgcgctggtgctgtcgctgctgctgacggtgatcctgacgctgaaaacgccaatcctgacgccgctggtcaagatctacgtgacgctgttcaccggcacgccgttgctggtgcagatcttcctgatctactacggccccggccagttcccggcgatccgcgactacccgtggctgtggaatctgctgtcgcagccttggttgtgcgcgatgatagcgctggcgctgaacagcgcggcctacaccacgcaactgttctacggcgcggtgcgcgccattcccgccgggcaatggcagtcgtgcgaagcgctgggcatgtcgcgccggcagacgctgcgcatcctgctgccgttcgccttcaagcgcgcgctgtcgtcttactccaacgaagtggtgctggtgttcaaaagcacctcgctggcttacaccatcacgctgatggaagtgatgggctacagccagctgatgtacggccgcacttacgacgtcatggtgtttggcgccgcaggcctggtgtacctgtgcgtcaacggcctgctgacgctgctgatgcggctggtggagcgccgcgcgctggcgtttgagcgccgcaactga

SEQ ID NO: 422396 - DNA, 717 bp, Serratia marcescens
atgaatgaatttcaacctttagcaagcgccgccggcatgaccgtcggccttgccgtttgcgccctgatcctcgggctgattctggcgatgctgttcgccgtatgggaatcgtcccgctggaaagcggtcagctggctcggcaccgcctgggtgaccgtgctgcgcggcctgccggaaatcctggtggtgctgtttatctatttcggttcgtcgcagctgctgctgatgctctccgacggctttaccctcaacctcggtctgttccagctgccgattcagctggcgatcgacaatttcgaagtcagcccgttcctgtgcggggtgatcgctctggccctgctctattccgcctacgcttcgcagacgctgcgcggcgcgctgaaagcggtgccacaggggcagtgggagtccggccaggcactggggctcggcaaggcggcgatcttctttcgcctgatcatgccgcagatgtggcgccacgccctgcccggcctcggcaaccagtggctggtgctgctgaaagacaccgcgctggtgtcgctgatcagcgtgaacgatctgatgctgcaaaccaagagcatcgccacccgcacccaggagccttttacctggtatgtgatcgcggcggccatctacctgctggtgacgctgttcagccaatacgtcatcaaacgcattgagctgcgcgccacgcgctttgagcgggggccggtctga

SEQ ID NO: 422397 - DNA, 732 bp, Serratia marcescens
atgaaaaaactaataatcgccgccgttctggccggcatcagcgtttccgcctccgcagccgaaaccatccgtttcgctaccgaagcctcctatcctccatttgaatttattgacgccggcaacaagattcagggttttgatgtcgatctggccaacgcgctgtgcaaagagatgcaggccgagtgcaccttcaccaaccaggcgttcgacagcctgatcccaagccttaaattcaagcgtttcgatgcggtgatggccggcatggacattacgccggaacgtgaaaagcaggtgctgttcaccaagccgtactacgataattcggcgctgttcatcgcgcagaaaggcaaaatcgccgacgtggcggcgctgaaaggcaagaaagtgggcgtgcaaaacggcaccactcaccagaaatacctgaccgacaagcacccggaaatcaccaccgtgccttacgacagctaccagaacgccattttggatctgaagaacggccgcgttgatgcggtgttcggcgataccgcggtggttaacgagtggctgaagcagaatgacgcgctggcggcagtgggcgccaaagtcacggataaagactacttcggcaccggcctcggcatcgcggtacgccagaagaacaccgagctgcagggcaagttcaacgccgctctggacaagatcaagcaggatgggacctatgaaaccatctacaaaaaatggttccagcagtaa

SEQ ID NO: 422398 - DNA, 750 bp, Serratia marcescens
atgtctattcaattctggcgcatgagtattcaacttaacggtatcaattgctattacggcgctcaccaggcgctgtttgacatcacgctggattgtccagccggggaaaccctggtgctgcttggcccaagcggcgccgggaaaagttcattgctgcgggtgctgaacctgctggaaatgccgcgttcgggccaactgcagatcgccggcaaccaattcgacttcaagcaggcgcctggcgagaaagccattcgcgaactgcgtcaaaatgtcggcatggtgttccagcaatacaacctgtggcctcacctcaccgtggttcagaacctgatcgaagcgccttgccgcgtgctgggtctgaccaaggctcaggcgatggagcgcgccgacaagctgctcaagcgtctgcgcctgaccgacttcgccgatcgcttcccgctgcacctttccggcggccagcagcagcgcgtggcgatcgcccgcgccctgatgatggaaccgcaggtgctgctgttcgatgaaccgaccgcggcgctggatccggaaatcaccgctcagatcgtcagcatcattcgcgaactggccggcaccggcatcacgcaggtgatcgtcacccacgaagtggaagtggcgcgcaagaccgccagccgcgtggtgtacatggaaaacggccacgtggtggagcaaggcgacagcagccacttcacgcaaccgcggaccaccgagtttgccaactacttatcacactaa

SEQ ID NO: 422399 - DNA, 543 bp, Serratia marcescens
atgaaaacaaaaacgattgcggctgttttacccttagcgctgttgctgagtgcctgtaccacggtggagccggcatacaaggatatcggcacccgcagcggcagctgtgtggaaggcggcccggatacggtcgcgcaaaagttctatgacctgcgcatccagcagggcgctggcctgccggacagtaaccgcctggcgcagctgcagccttacctgagcaaagtgctgtatcaggatctggtcagcgccgcccagaacccgggcaagcatcggatcaccggcgacttgttctccggcaatgcgcaggggccaggcagcgcgtccgtcgccagcgcctcgaccattcctaacaccgatgcgaaaaacatcccgctgcgcgtcgacttgagctaccaaaaagacgccaacagcaccgtgaactggcaggacgaagtgctgatggtgcgcgaaggcacctgctgggtggttgatgatattcgctacctgaatgttccagcgcatgccaccaacggcagcgtgcgccaggtgttggaaaaccagtaa

SEQ ID NO: 422400 - DNA, 324 bp, Serratia marcescens
atgcagctttcaactaccccgaccctggaagggttcaccatcaccgaatactgcggcgtggtcaccggcgaagcgatcctcggcgccaacatctttcgtgatttcttcgccggcgtgcgcgatatcgtcggcggccgctcgggcgcttatgagaaagagctgcgcaaggcgcgcttgatcgcgttcgaagagctggaagatcaggcgaaagagctgggcgccaacgcggtggtcggcatcgatatcgattatgaaaccgttggcaaagacggcagcatgctgatggtgaccgtcagcggcaccgcggtgaaagccagccgctaa

SEQ ID NO: 422401 - DNA, 837 bp, Serratia marcescens
gtgaaaatttggccagggatcatcgccgccgcgctgctggcgggatgccaaaacccgcagcaggacacgctcgtcgatcgcggcgcttaccagctcgaaaccctgcatcaggcgcagggcgcggatcaacgcatccgctttctggtgatgcactacacggcggaagacttccactcatcgctgaaaacgctgaccgacgaacacgtcagcgcgcattatctgctgccggcgcatccgcagcgcgaacacggtaaaccgacggtgttccgcctggtgccggaagcgatgcgcgcctggcatgccggcgccagcgcctggcgcggccgcagcaacctcaatgacacctcgatcggcatcgaaatcgtcaacaagggcttcacccgcagcatgctgttcacccactggcagccctatacggcggagcagatcgccgtgctgatcccgctgagccgcgacattatccaacgctatggcatccagccgcaggacgtggtggggcacagcgacatcgcgccgcagcgtaaacaggatcccggcccgctgttcccatggcggcagctggcccaggccggcatcggcgcctggccggacgaacgcgacgtgcagcgtttgctggcggggcgcgatcgccatgcgccggtagcgatggcgccgctgctcgaaaagctggcgcgttacggctacgcgatcgacccgtcgtggaatgcgcggcagcagcgcaatgtgctggcggcgtttcagatgcacttccggcccgacgatgtgcgcggcgaaccggatgcggagagtgaagcgattgtcgatgcgctgctggtgaagtacggcgcggcgcgttga

SEQ ID NO: 422402 - DNA, 1011 bp, Serratia marcescens
atgaaggtattggtcaccggtgccaccagtgggttaggccgtaacgccgtcgaatatctgcgccgtcagggcatcaaagtgcgcgccaccggccgcaaccaggcgatgggcggcctgctggaaaaaatgggcgcggagttcattcatgccgatctcaccaatctgatctcttcgcaggccaaggcgatgctgacggacgtcgacgtgctgtggcactgctccagcttcacctcgccctggggcaccgaagaggccttcgaactggccaacgtccgcgccacccgccgcctcggcgaatgggcggcggcctacggcgtggcgcagttcattcacatctcttccccggcgatctatttcgattaccaccatcaccgcaacgtggccgaagactttcgcccgcagcgctacgccaacgagttcgcgcgcagcaaggccgccggcgagcaggtgatccagcagctggcgctgtccaatccgcagacccatttcaccattctgcgcccgcagggattgttcgggccgcacgacaaggtgatgctgccgcggctgctgcagatgatcaaacgctacggcaacctgctgctgccgcgcggcggcgcggcgatggtggacatgacctacctggagaatgcggtgcacgccatgtggctggcgacgctaaaagaagatacgccgtccggccgcgcctacaacatcaccaaccagcagccgcgcccgcttcgcaccgtggtgcagcagctgatcgacgatttgggcatgaagtgccatatccgctccgtcccctatccgatgctcgacatgatggcgcgcggcatggagcgcctcggcagcaaaagcgagaaggagccggtgctgacccactacggcgtcgccaaactcaatttcgacctcacgctcgataccacccgcgcgcagcaagagctgggctatcagccgatcgtctcgctggaagaaggcatcgcgcgcaccgcccgctggctgaaagatcacggcaagctgcacggcctgtaa

SEQ ID NO: 422403 - DNA, 1440 bp, Serratia marcescens
atgacaccccaacgcgtactggttcttggagccagcggctatataggccagaacctgatcccgcacctgatcgaacaggggcaccagattaccgccgccgcgcggcgcatcgagtggctgcaggagcggaactggccgcaggtcaactgcctgtatgccgatctgtaccgcccggagaccctgagcgcggcgctgtgggagacagatacgctttactatctggtgcacgcaatgggcgacggcgacgattttatcgagaaggagcgccaggcagcggaaaacctgcgcgacgcgctgcgcaatgccggcgtcaaacaggtgatctttctcggcgcgctgcagccgaacgacgacagctcaccgcacctggcggcccgccgcctgaccggcgaaattttgcgccagagcggcgtgccggtgaccgaactgcgcgccggcatcatcgtcggccccggctcggcggcgttcgaagtgatgcgcgacatggtctataacctgccggtgctgacgccgccgcgctgggtgcgctccaagtcgtcgccggtggcgctggagaacctgctggtttatctggccgatctgctggcgcacccggcgcaggagcaccgcatcttcgacgttgccgggccggagtacctcagctatcaggatatgttccaacgctttatcgccatcagcggcaaacggcgctggctgatcccgatccccttgccgacgcggctgatttcggtgtggttcatcagcctgatcacctcggtgccgacgccgatcgcccgcgcgctgatccaggggctgaagcacgatctgcccgccgacggccggccgctgcaggcgctgatcccgcagcggctgcacaccttcgatcaggcggtcgccaccacgctgcagcgcgaacaggaggtggtcgattccgccgactggggctacgatccggcggcgcgggcccgctggcgccccggctacggttactatccgaaacaggccggctgttcgctggacaccgccgccacccgcgaggccctatggcaaacggtgcagcagttggggggcgaagaaggctatttctacgccaatattctgtggcggatccgcgcccgcatggacgacatgatcggcaacggcgtggtctatggccgcccggcgcgcgcgagcctggcgctgggcgacgagatcgacggctggaaagtcatcacgctgaaaccgctgcggcaactggcgctgctgttcggcatgaaggcgccggggctggggcggctgagcttcaccattaccgatcacggcgatcgccgcacgctggacgtgcgcgcctggtggcatccggccggcttcagcgggctgctgtattggttcgccatgatgcccgcgcatctgttcattttccgcggcatggcgaagcgcatcgccgaacttgccgagggtctggaccgccaacagcgctga

SEQ ID NO: 422404 - DNA, 348 bp, Serratia marcescens
atgaagctcaatgtgatttgttacgccctgctgggcctggcgctggtcgccagcctgttctcgctgcatccggtgtggatgtggttgctgctggccaacctgctgacgtttctgatctacggcggcgataagctggcggcgcgcaaggggtggcggcgggtgccggaggcgacgctgttgctgttcggcgcgctgggcgggtggttgggcgcactggcggcacagcagctgtttcgccacaaaacccagaagcagccgtttaaaacctggttcatcctcagcgtggcgctcaacctggtggcggtgctggggttgtggtactgggtttatggccgctggatcttctga

SEQ ID NO: 422405 - DNA, 825 bp, Serratia marcescens
atgaatacaggcaacttgttattgcggctgcggcaggatttggcggggtacagccccacgttgcaaaagctcggcaactatcttcttgcgcagccctcccgcgccgtttacctgaccatcaccgaactggcgcgtgaaagcgccaccagcgaagccagcgtcacgcggctgtgccgccatctgggctgcaaaggctataccgaatttaaaatggcgctggccctcagcctgcaacaaagccagccggaggcggcgacgcggcaaagcgcggcggaaaatttgctggaagagagcgttcaggcgctgcgggataccggcgcactgttggatccgcaggcgctgcaacaggcggcggacagcctgcagcgttgcgcttcggtgcagatttacggcgtcgccgccagcgccatcatcggcgatttcctgcactacaagctgctgcgcctcggcaaaccggcgcagctgttcagcgacatgcaccgggcggcgatgaacgccgcctcgctgagtgagcgggatctgctgatcgtcatctccagctccggctccaccaaggacgtgctgcatgcggtggcattggccaaagggcgcggcgcacgcgtgatcgccgtcagcaacacccaacgcagcccgctggccaagctggcggatacgctgctggtggcggccaaaccggaagggccgctgaccgccggcgccctgccggccaaggtcggcgccatgctgctggtggagttgatgatcgccgaactggctcggcgcgatcccgcctacgctcaggcgatgcaggccaccgccagcgccaccctgccgctgctgctgtaa

SEQ ID NO: 422406 - DNA, 1557 bp, Serratia marcescens
atgtcaacaccagaattgtcgcgctccggcggctggttcgaaaaagcccagctgttcggcaaatcgttcatgctgccgatcgccgtgctgccggcggccggcctgctgttggggatcggcggtgcgctgtccaatcccaataccgtcgaggcttatcccttcctcgacgttggctggctgcaaagcgtatttaccgtgatggccagcgccggcgccatcgtgttcgccaacctggcggtcctgttcgcggtcggcgtggcggtggggttggccaaaagcgacaagggcacggcggggctggcctcgctgatcgcctacctggtgatgaacgccaccatcaatgcgctgttgaaaatcaacggcacgctggtcgcgcagaacgccggcgcggtggggcagggaacgattctcgggatccagacgctggagaccggggtgttcggcggggtggtcatcggtctggtgacttggtatctgcacggccgctacaacaagatagcgctgccgccgttcctgggttttttcggcggctcgcgctttgtgccgatcgtcagctcgctggcggcgatggcggtcggtgccctgatgaccgtggtgtggccgcctttccaacggctgatcttcggcatgggcgggctggtggacgccagcggctatctcggcacctttatctacggcttcgtgctgcgcatgctcgggccgttcggcctgcatcacatcttctacctgccgttctggactaccgcgctcggcggcagcgaagtgatcaacggacagctggtggaaggcacgcagcgcattttcttcgcccagttggccgacccgaatacgcagcagttctacatcggcacggcgcgcttcatgtccggccgctttatcaccatgatgttcggcctggtcggcgcctgcctggcgatgtaccaaagcgcgcgcccggagaaccgcaaacgcgtcggcgggctgctgctgtcggcggcgctgacctctttcctgaccggcatcaccgaacctatcgaattctcgttcctgttcatcgcgccggcgctgtacgtggtgcacgcgctgttcgacggcctggcgttcgcgatcgcgcacattctgcatatcaccatcggccagacgttctccggcggttttatcgatttcatgctgttcggcgtgctgcagggcgaagcgaaaacccactggatgtatgtgccgctggtcggggtgccctggttcttcctgtactacttcacgttccgtttcctgatcctgcgcttcaatttcaaaacgccggggcgcgaggtggaaaccgcgccggaagcggtgacgaccggcaccgaacgctcgcagcaggtgctggcggcgctgggcggcaaagagaatatcgtcgaactggattgttgcgccacgcggctgcgcgtgacggtaaaacagagccggttgctggacgaaagcgggctgaaggccagcggcgcgcgggcggtgatcgttcgcggcaacggcgttcaggtgatctatggcccgcacgtgaccattattaaaaacgaagtcgaggagttgttggatttatga

SEQ ID NO: 422407 - DNA, 696 bp, Serratia marcescens
atgacgctttccattttgcagcagattaagggccggctggtggtgtcttgccaggcgctggacgacgagccgctgcacagcgattttatcatggcgcgcatggcgctggcggccgagcaaggcggtgcggcggcgatccgcgccaacggcgtcgaagacgttaaagccatcctgcgcacggtggcgctgccggtgatcggcattatcaagcgcgattatgccggtagcgatgtctatatcacgccgaccctgcgtgaaatcgatgagctgatgactgcggcgccgcagatgattgcattggacgctaccggccaccggcggccaggggagctgcagctggcggcgctggttgccgcgatccgcgccaggtatccccggctgctgctgatggcggacatcgccaccgtggaagaagcgcaagaggctgccaggttggggttcgactgcgtgggcaccacgctgcacggctataccgccgaaagccggggcgcccgactggcggaggacgatttcggctttctgcgtgcggtgctggcggcggtgccggtgccggtcatcgccgagggcaatgtcgaaacgccggcgatggccgcgcgctgcctggcgctgggggcgcatgcggtggtggtgggcggcgccattacgcgcccgcagcagatcacccgccgctttgtcgaggccatcggcgggcggtga

SEQ ID NO: 422408 - DNA, 1017 bp, Serratia marcescens
atgcttatcgatctacgcagcgacaccgtcaccctccccagcgccgccatgcgccaggcgatggctcaggcagaggtcggcgacgacgtctacggcgatgacccgacggtcaacgcgctggaggccgaggcggtgcgcctgtcgggcaaagaggcggcgctgtttttgcccagcggcacccaggccaacctggtggcgctgctgagccactgccagcgcggcgacgagtatctggtcggccaacaggcgcacaactataaatacgaggccggcggcgcagcggtgctgggcagcatccagccgcagccgatcgaggccgacgcggacggcacgctgccgctggacaagctcgccgccgccatcaaacccgacgatatccacttcgcccgcacccggctgctgagcctggaaaacaccatcggcggccgagtcctgccgcaggcctacctgcagcaggcgtggcagtttacccgcgagcggcagctggcgctgcatatcgacggcgcgcgcatcttcaacgccgccgtggcgctgaacctgccgctgaaagagatcgtgcaatactgcgacaccttcaccatttgcctgtcgaaagggctgggcgcgccggtcggatcgctgctgtgcggcagcgaggccttcattcagcgcgcgctgcgctggcgcaagatgaccggcggcgggctgcgtcaggccggcatcctggcggcggccggcctctacgcgctggagcataacgtcgcgcggctgcgcgaagaccatgacaacgcggtctggctggagcaacagctgcggcagatcggcgtggaggtcgtcgaacccggcgcacagaccaacgtgctgtacctgcgccaaccgccggcgctggcggccaaattcggcccgtggatgcgcgaacgcgacgtgctgatcagcagcggcccgctgacgcgcattctgacccacctcgacgtcagccgtcaggatctgcagcgggtggtcgagctgtggcgggagttcctccagcagcacgcctga

SEQ ID NO: 422409 - DNA, 1722 bp, Serratia marcescens
atgaagcaaaccgtagccacactgatcgccaaaacgctggatcaagccggtgtaaaacgcatttggggcgtgaccggcgattcgctcaacggccttagcgacagcctgcaccgcatgggcaccatcgaatggctgggcacccgccatgaagaggtggccgccttcgccgccggcgccgaagcccagctcaccggccagctggcggtgtgcgccggttcctgcggccccggcaacctgcacctgatcaacggcctgttcgactgccaccgcaaccatgtgccggtgctggcgatcgccgcgcacattccttccagcgaaatcggcagcggctacttccaggaaacgcatccgcaggagctgttccgcgaatgcagccactattgcgagctggtttccaacccggaacagctgccgcgcgtgctggagatcgccatgcgcaaggcaatcctcaaccgcggcgtctcggtggtggtcctgccgggcgatgtggcgctgcgcatggcgccggaagacgcgtccctgacctggcataccccggcgctgccgctggtgcagccgccgatgagcgagcttaacaagctggcggaaacgctgaacaaggcgaagaacatcaccctgatgtgcggcagcggctgcgccggcgcgcacgatgaggtggtcaagctggccgagctgctgcaggcgccggtggtgcacgcgctgcgcggcaaagagcatatcgaatgggataacccttacagcgtcggcatgaccgggttgatcggcttctcctccggctaccacgcgatgatgaacgccgacacgctggtgctgctcggcacccagttcccctaccgcgcgttctaccccaccaacgccaacatcattcagatcgacatcaaccccggcagcatcggcgcacactgcccggtcaatatggcgctggtaggcgatatccacaccaccctcaccgccctgctgccgcagctggagcccaagcgcgaccgggcgttcctcgacaaggcgctggagcattaccgcaacgcgcgcaaggatctcgacgggctggcgaccgccaacgacgaccagccgatccacccgcagtatctggcgcagcagctcagtcggtacgccagcgacgacgccatcttcacctgcgacgtcggcacgccgacggtgtgggccgcccgctacgtgaaaatgaacggcaagcgccgcctgctcggttcgttcaaccacggttcgatggccaacgccatgccgcaggcgataggcgcccaggccaccgcgccggataaacaggtgatcgccatgtgcggcgacggcggcttcaccatgctgatgggggatttcctgtcgctggcgcagctcaagctgccggtgaaaatcgtggtgttcaacaacagcgtgctggggttcgtggcgatggagatgaaggccggcggctacctgaccgacggcaccgatctgcataacccggacttcgcggcgatcgccaacgccgccggcatcaagggcatccgcgtggaaaaagcctcggatctggacggcgcgctgcaggagatgttggcgcaccccggcccggcgctgctggacgtggtcaccgccaagcaagagctggcgatgccgccgcagatcaagttcgaacaggcgaaaggtttcagcctgtacatgctgcgcgccatcatcaacggccgcggcgacgaagtggtcgagctggcgaaaaccaactggctgcgctaa

SEQ ID NO: 422410 - DNA, 1002 bp, Serratia marcescens
atgactcaacccactccgctttgcccgaaccgcatgcaggtacattccatccagcgcgaaaccgccgacgtctggacgctgaacctgatatgcgacgttttctacccttatcaggcgggccagtttgcgctggtcagcatccgcaacagcgaggagacgctgcgcgcctatacgctctcctcctcgcccggccagagccgctttctcagcatcagcgtgcgctgcctgccggacggcgtcggatcgcgttggctgacgcaagaggtcaagcccggcaacacgctgtggttgtccgacgcgcagggcgagttcagctgcgagcgccacccggccgatcgttatctgatgctggccgccggctgcggcgtgacgccgatcgtctcgatgtgccgctggctgaccgccaaccgtccggcctgcgatatcgccgtgatctttaacgtgcgcacccccgccgacacgattttcgccgatcaatggcgcgcgctgtgcgccgcccatccgcagctgcgcctgacgctgatggccgagcgggatctgcaacccggctacctcagcggccgcatcgatgagcagacgctgcggcaggcggcgccggatatcgccgaacgcacggtgatgacctgcggccctgcgccctatatggaacaggtggagcagctgtgccgccggctcggcgtgccggccgagcgtttccataaagagcagttccacacgccgacaacgcaggccgatgccactgaagggctgacgctgcgcgccgcccacccgctgcgcgaattccgcgtgccggtcggcagcacgctgctggcggcgatggaggccaatgccctgccggtcaacgccgcctgccgcgccggggtgtgcggctcgtgcaaaacccgcatcctcgagggcgactacatcaccaccagcaccatgacgctgagcgcggaagaaatagcgcaaggctacgtgctggcctgcagttgccagctgcggggcgacgtcacgctggcgtga

SEQ ID NO: 422411 - DNA, 1650 bp, Serratia marcescens
atgttctgtgtgcaatgtgaacaaaccatccgtaccccggcaggcaacggctgcgcgtatgctcagggcatgtgcggcaagacggcggaaacctccgatctgcaggatctgctggtggcggcgctacagggcctttccgcctgggcgctgcaggcgcgttcgctgggcatcgtcgatcacgagatcgacagcttcgccccgcgcgccttcttctccaccctgaccaacgtcaacttcgactcccagcgcatcatcggctacgcgcgcgaaaccctgctgctgcgcgattcgctggccgcccgttgccggctgctggatgccggcgtgcgcgtcgatcacccgatggcggcgctgcagctggccggtgacgatatgcctgcgctgctgcaacaggcggcgcagtttgccctcaacggcgacaaggccgaggtcggcgacgacgtccacggtttgcgcatgctgtgcctgtacggcctgaaaggcgccgcggcctatatggaacacgcgcacgtgctcggccagttcgacgagcagctctatgccgactaccacgcctttatggcctggctcggcactcggccgcgcgacgtcgacaccctgctgaacaacgccatgggcatcggcaagatgaacttcaacgtgatggcgatcctcgatcgcggcgaaacccaggcctacggcgatccgcagcccagcgcggtcaacgtgcgcccggtggccgggaaagccattctgatctccggccacgatctgaaagatctgcgcatgctgctcgaacaaaccgaagggcaaaacgtcaacgtctacacccacggtgaaatgctgccggcgcacggctatccggagctgaaaaaattcaagcacctggtgggcaactacggcagcggctggcagaaccagcagacggaattcgccaaattccccggcccgatcgtgatgacctccaactgcatcatcgatccgaacgtcggcaactacggcgatcgcatctggacccgcagcatcgtcggctggccgggcgtcaaccatctggaaggcgacgacttcggcgccgtgatccgccaggcgcagggcatgaacggcttcccttataccgagatcgagcacctgatcaccgtcggcttcggccgccagacgctgctgaacgccgccgacacggtgatcgatctggtgtcgcagaaaaaactgcgccacgtcttcctggtcggcggctgcgacggcagccgcgacgagcgcagctacttcaccgacttcgcccgcagcgtgccgcaagactgcctgatcatgacgctggcctgcggcaagtaccgcttcaacaagctggacttcggcacgctggaagggctgccgcgcctgctggacgtcggccagtgcaacgacgcctattccgccattatgctggcggtcaagctggcggacacgctcggctgcagcgtcaacgaactgccgctcagcctggtgctgtcgtggtttgaacagaaggcgatcgtcattctgctgacgctgctgtcgctgggggtgaaaaacatcgtcaccggcccgaccgcgccgggcttcctgaccgacaacctgatggcgatcctcaacgagaaattcggcctgcgtccgatcaccaccgtcgagcaggatatcaacgcgctgctcgcctga

SEQ ID NO: 422412 - DNA, 897 bp, Serratia marcescens
atgtactcaggactgttgattattctgttaccactgattgtcggttacctcattcccttacgccatcgcccgctgctggtgctgatcaaccggctgctgagctggatggtgtacgtgatcctgtttttcatgggtatcagcctggcgttcatggaagatctcagcagcaacctggtgctgatcttccaatacagcgcggtgttcttcttctgcattctctgcgctaatctgctgttgctggcgctgctggagcggcgcatgccgtggcgcagcagccataaacaggaaaagctgccttcgcgcgtgcacatggcgctggagtcgctcaagctgtgcggcgtggtgctcggcggcttcctgctcggcctgacgcagtggcaatggctgcagttcgcccataaaggcagcgaatatgcgctgatcttcctgctgctgttggtcggcattcagctgcgcaacagcggcatgacgctgcgccagatcgtgctcaaccgccgcggcacgctggtggcgttggtggtgaccgtcgcgtcgctggccggcggcgcgctggcggcgcagctgctggggctgccggtcaaggccgggctggcgatggcctccggcttcggctggtactcgctgtcgggcattctgatcaccgacgcctacggcccggtgatgggcagcgccgcgttcttcaacgatctggcgcgcgagctggtggcgatcatgctgatcccgacgctggtgcgccgcagccgctccaccgccctcggcctgtgcggcgccacctcgatggacttcaccctgccggtgctgcagcgcagcggcgggctggacatggtgccccccgccatcgtgcacggcttcctgctgagcctgctggcgccggtgctgatcgccctgttctcctga

SEQ ID NO: 422413 - DNA, 1659 bp, Serratia marcescens
atgttcttggagcgtatcgaaattgtaggttttcgcggcattaaccggctgtccctgatgctggacgacaacacgctgttgctcggcgaaaacgcctggggtaaatccagcctgctggatgcgctgacgctgctgctggcgccggagcagaagctgtatcggtttgaggcgcacgacttccatttcccgcccggagaagaggcggccaaagagcgccacctgcaggtggtgttcaccttctgcgaaaaagacatcggccatgcgcacctgccgcgctatcgccacctgacgccgctgtgggtcaagggcgaggatggcctgagccgcattcattaccgctgcgaaggcgagctggccgacgacggcacggtgtgcacctggcgcggttttctcgacgccgacggcaacgcctttcaactgcaccatatcgaacagctggcccacgccatcatccgcattcatccggtattgcgcctgcgcgacgcgcgctttattcgtcgcctgcgccccagcagcctcggcgatgaacgcaaacccgatacccaggcgctggcgcagcagttggatcagctgacgcgcgagctggtgcgcaatccgcagaagctgaccaacggcgaactgcgtcaggggctggcggccatgcagcaactgctggagcactacttcgccgagcaaagttcgcaggtgacgcggccgcgccgccgcggcggcgaaccggagcaggatgcctggcgtgcgctggacggcatcaaccgcatggtggccgagccgaacagccgcagcatgcgccttatcctgctggggatgttttccaccctgctgcaggccaagggcgacgttaagctggatgcgcatgcacggccgctgctgctggtggaagacccggaaactcgcctgcacccgattatgctgtcggtggcctgggggctgctcaatcagctgccgctgcagcgcatcaccaccaccaactccagcgaactggtgtcgctggtgccggtggagcacgtctgccggctggtgcgcgagtcggggcgggtcgcgacctaccgtctcgggccgcgcgggctgagcgccgaagacgggcggcgcatcgcgtttcacatccgtttcaaccggccgtcgtcgctgttcgcccgctgctggctgctggtggaaggcgagaccgaagtgtggctgctgaacgagctggcgcgccagtgcggctaccatttcgaggcggaaggggtgcgggtcatcgagttcgcccagtgcggcctgaagccgctgctgcgcttcgcccgccgcatgggcatcgagtggcatgcgctggtggacggcgacgaggcgggcaaaaagtacgccaataccgtgcgcagcctgctggacaatcatgaagacaacgaacgcgatcggctgaccgcgctgccggcgccggacatggaacacttcatgttccgcgaagggttcggcccggtctatcaccggatggcgtcggtgccgatcaacgcgcaaatgccggtgcgcaaggtgatcctaaaagcggtccaccactcgtcgaagccggatctggcgatcgaggtcgcgatgcaggccggcgaatggggcacggactcggtgccgccgctgctgaagaaaatgttctcacgggtgatctggctggcgcgcggccgggcggactga

SEQ ID NO: 422414 - DNA, 954 bp, Serratia marcescens
atgtcacagctcagctacccactcgcctccgcccggccccttaacggctggcaactgatgacggcgctgatcaatggcgaaaaggcgccaagcaacgcctggaaaaagcccgcgtttcgcctgaagtttctcggccgttcgctgctcaactggcgcaccaccagcggcctgctcagcaccctggccagcaacccgctgcgggaggagatcctgagcgcgcagccgaacctgccgtgcaaactgcatcgcccgtacctggcggccaacatgagcaagatcgaatgcctgttcgccctgcgcgatcattacgatcttatcgcacagcgcatgccgctgaagatgcgcctcggccacctcggcccgcagcctttcgtgctggcccgcgcgatgggcaaaaacggagcgccgatcgcgctggaactggcggcgatcgacaagctgaataaggaaggggaagccacgctgctgctgcgcaacgccaacggcgtgatgctggcggagatcacctttgcgctgatgcattatcagcagcagccgacgctgttcatcggcggcctgcagggcgcaaaccatgaggtgccgcacgccgagatccagcacaccaccaaagagtgccacggcctgttccccaaacggctggtgctggaaggcatctgcacgctggcgcggcacctcggcatccgccagatcgtggcggtcggcaacgccacccatatctatcaaaactggcgttaccagagtaagaagaaggatcaactgcacgccgattacgatcagttctggctgtcgatgggcgccaaaccgctcgacagcggctatttcctgctgcccgcgcgcatcgcccgcaaacctctcgaagaggttgccagcaagaagcgcgccgagtatcgccgccgctatcagctgctggacgagctggaacagggattggcggcgcatttctgcgcccgataa

SEQ ID NO: 422415 - DNA, 1116 bp, Serratia marcescens
ttgacagggtttacaggacataaacgccgctggatactcgttctggcggtcattgcggcgcttgccgcggcggccgtttggcactttcgccatccggcgccaaccgatttcaaaacggtgaaagccagcaaacgcgatctgcagcagaacgtgttggcgaccggccagctggacgcggtgcgcaaggttgacgtcggcgcgcaggtcagcgggcagttggaaaagctgtatgtcgagatcggcgacaaggtgaagaaaggccagttgctgggcgttatcgatccgcaacaggcgcagaacagcatccgcgaaggcgaggcgacgctgcgtgaactgcatgcgcaactgctgcaggcgcaggccgaacagcagctggcggcggtcacgctgcagcgcaaccaggcgttggccaagctgcaggcggtgtcgcgccaggatctggatcaggcggcgacgcagctggcggtgaagaaagcgcaggtgggcaccatcaatgcgcagatcgcgcggaaccaggccagcctggataccgccaagatcaacctggcctatacccgcatcgaggcgccgatggatggcgacgtggtgcagatcaccacgctgcagggccagacggtgatcgcggcgcagcaggcgccgaacattctgacgctggcggatctcggcaccatgctggtgaaggcgcaggtgtcggaggccgacgtcatcaacctcaagccgggtcagaaggcctggttcacggtgctgggcgatccgacccggcgcttcgacggcgtgctgaaagacattcagccgacgccggaaaaggtcaacaacgccatcttctattatgcgcgtttcgaagtgcccaacccggaaaggctgctgcgcttgcaaatgacggcgcaggtgcatattcagttggctggcgtcgagcaggcgctggtgatcccgctggcggcgctgggcgatcagatcgccgacaatcgctaccacgtctcggtgctgaagcagggcaaggaagagaagcgcgaggtggccatcggcctgcgcaacaatatcgacgtgcagatcctcagcggcctcgaggcgggcgatgaggtgatcgtcagccgcggcggcgtgggggccggctga

SEQ ID NO: 422416 - DNA, 1944 bp, Serratia marcescens
atggcggcgctgttgcagctgagcggcattcgccgcagctaccgttccggcgagcagacggtggaggtgctgaaggggatcagcctgagcatcgacgccggtgaaatggtggcgatcatgggggcctccggctccggcaaatcgacgctgatgaacattctcggctgtctggacaagccgagcgccggcgtgtatcgggtggccgggcaggatgtggcgacgctgagcgacgatgcgctggcgcagctgcggcgcgagcatttcggctttatctttcagcgctatcatctgctgccgcacctgagtgcggcgcacaacgtcgaagtgccggcggtgtacgcggggctgggcaaagcggcgcggcgcgagcgggcggaggcgctgttgcggcgtctggggctgggggagcgcgtcaactaccggccgagccagctttccggcggccagcagcagcgcgtcagcatcgcccgcgcgctgatgaacggcgggcaggtgatcctggcggatgaaccgaccggcgcgctcgacagccactccggcgaagaggtgatggcgatcctcaaacagctgtgcgcccagggccacacggtgatcctggtgacccacgatccggcggtagcgcgccaggcggagcggatcatcgagatccgcgacggcgagattatcgccgattcgcgtccggcaccgcgggagaatgcgcaggccaagccgctggcgctggccgcggcaccttcctggcggcagatgggcggccgtttccgcgaggcgctggtgatggcctggcgtgcgatggcggccaacaagatgcgcaccgcgctgaccatgctcggcatcattatcggcatcgcctcggtggtgtcgatcctggtgatcggcgatgccgccaagcagatggtgctggcggacattaaatctatcggcaccaacaccgtcgatatctatcccggcaaggacttcggcgatgacgatccgacctaccggcaatcgttgaaatacggcgatctcgatgcgctgcgcgaacagccgtacatcagcgcgctgtcgccgagcatcagcagcagcatgcggctgcggctgggcaacgtcgacgcggcggccaacgtcaacggcgtcagcgagcagttcttccgcgtgtacggcatgagctttacccagggcgtcggcatcgactcaatgcaggtgcagtcgcaggcgcagacggtggtgatcgacgccaatacccagcggcggctgttcccgcaccagaagaacgtggtgggcgaggtgatcctggtaggcaacatgccggcgacggtggtcggcgtggccaaggagaagcagtcgatgttcggcagcagcaagacgctgaacgtgtgggtgccttacagcaccatggccaaccgattgatgggcaacaattattttgactcgatcaccgtgcgcatccgcgacggctacgacagcaaggaagcggaacagcagctgtcgcgcctgttgacgctgcgccacggcaagaaggacttcttcacctataacatggacagcctggtgcaaaccgccgagaaaaccacccgcacgctgcagctgttcctgacgctggtggcggtgatttcgctggtggtcggcggcatcggcgtgatgaatatcatgctggtgtcggtgaccgaacgcacgcgcgagatcggcatccgcatggcggtgggcgcccgttccggcgacgtgttgcagcagttcctgatcgaagcggttctggtctgcctggtgggaggcgcgctggggattacgctgtcgttcgccatcggcctggcggtgcagctggtattgccgggctggcagatcagcttcccgccggcggcgttgctgagtgcgttcctctgttccaccggcatcggcgtggtgttcggctatctgccggcgcgcaatgccgcgcggctgaatccgatcgatgcgctggcgcgcgagtag

SEQ ID NO: 422417 - DNA, 222 bp, Serratia marcescens
atggagacgggtactgttaaatggtttaacaacgccaaaggttttggcttcatctgcccagccggcggcggcgaagatattttcgcgcattattccaccatcaagatggatggttacagaacgttgaaggcgggccagcaggtcagcttcgacgtgcatcaagggccgaaagggaaccatgccagtcttattgtgccggtggaaagcgaggcgctgtcctaa

SEQ ID NO: 422418 - DNA, 321 bp, Serratia marcescens
atgggcaataacaacgactggctaaactttgaacacttggccgaagaaaaacaaatcgatgcggtaaaaccgccgtctatgtataaagttatacttaacaacgacgattacacaccgatggaatttgtgattgacgttctgcaaaagttcttttcttatgatattgaacgcgcaacgcaactgatgctcacggtccactatcaaggcaaggcgatctgtggtgtttttaccgccgaggtggcggaaaccaaagtcgtccatgtgaaccggtacgcaagggagaacgagcatccgttgctttgtacgctggaaaaagcctga

SEQ ID NO: 422419 - DNA, 2280 bp, Serratia marcescens
atgctcaatcaagaactggaactcagtctcaacatggctttcgccagggcgcgtgagcacagacacgagtttatgaccgtggagcacctgttgctggcgttgctgagcaaccctgccgcgcgagaagcgcttgaggcatgtacggtggatctggccgcgttgcgccaggagctggaagccttcatcgaacaaaccacaccgacgctgcccgccggcgaagaagagcgcgacactcagccgacgctcagcttccagcgcgtgctgcagcgcgcggtcttccatgtgcaatcttccggccgcagcgaagtgtccggcgccaacgtgttggtggccatcttcagcgagcaggagtcgcaggcggcctatctgttgcgcaaacacgacgtcagccgtctcgacgtggtgaacttcatttcacatggcacgcgtaaagacgagccgggccaagcgccgaatgcggaaaacccggtgaacgaagagcagtccggaggggaagaccgtatggaaaacttcaccaccaacctcaatcagttggcccgtgtgggcggcatcgatccgttgatcggccgcgatcgtgagctggagcgcgcgattcaggtgctgtgccgccgtcgtaaaaacaacccgctgctggtcggcgaatccggcgtcggcaagaccgccatcgccgagggcctggcctggcgtatcgtgcagggcgacgtgccggaagtgatggcggactgcacgctgtattcgctggacatcggttcactgctggccggcaccaaataccgcggcgacttcgagaagcgcttcaaggcgctgctcaagcagctggagcaggatcagaacagcattctgttcatcgatgaaattcacaccatcatcggcgccggcgcggcttccggtgggcaggtggatgccgccaacctgatcaaaccgctgctgtcgagcggcaagatccgggtgatcggctcgaccacctaccaggagttcagcaacatcttcgaaaaggatcgtgccctggcgcgccgtttccagaagattgacatcactgaaccgacggcggaagagacagttcagatcatcaacggcctgaagaccaaatatgaagcgcaccacgacgtgcgttataccgccaaggcgattcgcgccgcggtggagctgtcggtgaaatacatcaacgatcgtcatctgccggacaaggcgatcgacgtgatcgacgaggcgggcgcccgcagccggttgatgccggccagcaagcgcaagaaaaccgtcaacgtggccgatatcgaatccgtggtggcgcgcatcgctcgtatcccggagaaaaccgtgtcggccagcgatcgcgacgtgctgagaaacctgggcgatcgcttgaagatgctggtgttcggccaggatcaggcgatcgaagcgctgaccgaagcgatcaagatgagccgcgccggcctgggccacgagcgcaagccggtcggttccttcctgttcgccgggccgaccggggtcgggaaaaccgaggtgaccgtacagttggccaaggcgatggatatcgagctgctgcgtttcgacatgtccgagtacatggagcggcataccgtcagccgtctgattggcgcgcctccgggctatgtcggttacgatcagggcgggctgctgaccgatgcggtgatcaagcatccgcatgcggtggtgctgctcgatgagatcgagaaggcgcacccggacgtgttcaacctgctgctgcaggtgatggacaacggcacgctgaccgacaacaacggccgcaaggcggacttccgcaacgtgatcctggtgatgaccaccaacgccggggtgcgggaaaccgaacgcaaatcgatcggcctggtgcagcaggacaacagcaccgacgcgatggaagagatcaagaaggtgtttacgccggagttccgcaaccgtctggacaacatcatctggttcaaccatctgtctaccgaggtgatccagcaggtggtcgacaagtttattgtcgaactgcaggcgcagctggatgcgaagggcgtctcgctggaagtgagcgacgaagcgcgcgactggctgtcggtgaagggctacgaccgcgcgatgggcgctcgtccgatggcgcgcgtcatgcaggaaaacctgaagaaaccgttggccaacgaactgctgttcggctcgctggtggacggcggctccgtgaaggtcgagctggacaaggacaagaaacagctgacctaccacttcctcagcgccgccaagcgcaaggcggacgagggcgcggtgcactaa

SEQ ID NO: 422420 - DNA, 219 bp, Serratia marcescens
atggccaaagaagacaatattgaaatgcagggcaccgttcttgatacgctgccgaacaccatgttccgcgttgaattggaaaacgggcacgtggtaaccgcacacatctccggtaaaatgcgtaaaaactatatccgcatcctgacgggcgacaaagtcactgtagagctgaccccgtacgacctgagcaaaggccgcattgtcttccgtagccgttaa

SEQ ID NO: 422421 - DNA, 726 bp, Serratia marcescens
atgcgcatcgtgaagctttccccacagtcgctggcgttcccctcgcctgaaagcgccctgcgcgaccctaacggcctgctggctatcggcggcgacctgacggcgccgcggctgctggcggcctacgagcgcggcatcttcccctggtattcgccgggggaagccatcctgtggtggtcgcccgatccgcgtgcggtgctgttcccgacagagtttcatctcaaccgcagcctgaaacgctttttgcgccacgatccgtttcgcatcacgctcaatcacgacttcgccgcggtgatcgccgcctgcgcccaccggccggatgaaggcacctggatcggcccggaggtacagcgcgcctatcagcatctgcaccgcctcggctacgcgcactcggtggaggtatggcaggataatcaactggtcggcggcatgtatggcgtggcgcagggcgcgttgttctgcggcgaatcgatgttcagccgcgtcaccaacgcctcaaaatgcgcattgatggccttttgccgccattttgccgcttatggcggggaattgattgactgccaggtgctgaacgctcacactgcccgccttggcgcgcgtgaaattccgcgccgtcaatttttgcagcagctccgcacccttcaacggcggcctttggcgtcggcgtgctgggagccgcaagtcatatccccacagccggctgaaccgccctctccagtaaactaa

SEQ ID NO: 422422 - DNA, 1740 bp, Serratia marcescens
atgcgcgttttgctgccgtttttggcgttgtaccgccgccatagcctgctgattagcctcggcatcctcttggcgatcgtcactctgctggccagcatcggcctgctggcgctctccggctggttcctggccgcctcgtcgctggccggactggcgggcctgctgacctttaactacatgctgccggccgccggcgtgcgcggcgcggcgatcttccgcaccgccgggcgctatgccgagcgcgtggtcagccacgacgccaccttccgcgtgctgtcgcatctgcgggtgttcaccttcagcaagatcctgccgctgacgccgggcggcatcgcccgtttccgccaggccgagctgctcaaccgcctggtggcggacgtggacacgctggatcatctttatctgcgggtgatctcgccgctgatcagcgcagcggtggtgatcctggtggtcacctacggcctgagctggctggatcctgcactcgccctgacgctgggcggcatcctgttgctgttgttactgctggtgccgccggtgttttatcgcgccggcaagccgatcggcggccagcttaccgcgctgcgcggccaataccgcaccgacctgaccgcctggctgcaggggcaggcggaattggtggtgttcggcgccgtcaacgacttccgccagacgctgaacgccaccgaacagcggtggcaacgccgccagtggcagcaggcctcgctgagcggcaaggcgcaggcgctgatgatcctcgccagcgggctgacggtgacgctgctgctgtggctgaccgccgccggcatcggcggcgatagccagcccggcgcgctgatcgcgctgttcgtcttcgccgcgctggcgtcgttcgaagcgctgatgccggtcgccggtgccttccagcacctcggccaggtgatcgcctccgccacgcgggtcaagcagatcatcgatcgtcagccggaggtcaccttcccggccgccggcccggccgccgccgatcgggctcagcttagcctgcagcagctgagcttcacctaccccgaccagccgcagccggtgctgcgcgacgtcacgctcgaagtcgcggctggcgaacacatcgccttgctcggccgcaccggctgcggcaagtccaccctgctgcagctgctgacctgcgcctggcgcaccgacggcggcaacattctgctcaacggcgaaccgctggaggattatgatgaagccacgctgcgtcggatgaccacggtcgtcagccagcgggtgcatatcttcagcgatacgctgcgggaaaacctgcggctggccgcgccggatgccgacgacgctcgcctgagcgaggtgctgcggcaggtggggctggataaattgctggacagcgacggcgggctgaacgcctggctgggcgaaggcggccggcagctgtccggcggcgaacagcgccgcctgggcatcgcccgcgcgctgctgcacccggccccgctgctgctgctcgacgaaccgaccgaagggctggacgccgaaaccgagcagcagatcctggcgctgctgcgccggcattgtcagggtaaaacgctgatcctggtgacgcaccgtctgtacggcctggagcatctcgaccgcatttgcgtaatggacgacggccggattgtcgaacagggcgatcacgccaccctgatgcgccggcagggccgctatgcccgctttcgcaaccgtatcagcaacctggcgccgtaa

SEQ ID NO: 422423 - DNA, 1686 bp, Serratia marcescens
atgctgttggggctgttcagcggcctgctgatcgtggcgcaagcgtggctgttggccagcctgctgcacgccctgatcatcgagcataccccacgcgaacagctgatcccttcgtttatctggctggccgccgcgttcgcgctgcgggcgctgttaagctggctgcgggaacgggtcggtttccggtgtggtcaggtgatccgccagcgcatgcgccaacaggtgctggataagctgcagcagctcgggccggcctggatccagggcaaaccggcgggcagctgggccagcatcatcgtcgagcagatcgaggatatgcaggactattactcgcgctatctgccgcagatgtatctggcggtcttcatcccgctgctgatcctgatcgccgtcttcccgatcaattgggccgcaggcatcattctgctggcgaccgcgccgctgatcccgctgttcatggcgctggtcggcatgggggccgccgacgccaaccgccgcaacttcgtggcgctggcgcgattgagcggcaacttcctcgaccgcctgcgcggcctggacaccctgcggctgttcgaccgcgcgcaggccgaaaccgcgcagatcgccaaatcttccgaagacttccgcagccgcaccatggaagtgctgcgcatggccttcctctcttccggcgtgctggaattcttcgcttcgatctccatcgccgtggtggcggtgtacttcggcttttcctacctcggcgaactcaacttcggcagctacggcctcggcgtaacgctgttttccggttttctggtgttgattctggcgccggagtttttccaaccgctgcgcgatctcggcaccttctaccatgccaaggcgcaggcggtcggcgcggcggaagcgctggaaaccttcctcagcgccgaaggcgagcagatgggcaacggcacgcggcaactgcccgccgatcaaccgctgacgctgcaggcgaacgcgttggaaatcctgtcgccgaacggcgtgctgctggccgggccgctgagcttcaccctgcaaccgcagcagcgcgtggcgctggtcgggctgagcggcgccggcaaaagttcactgctcaatctgctgctcggcttcctgccctatcgcggatcgctgaccgtcaacggcgtcgagctgcgtgacctgtccgcagaaacctggcgccagcagctgagctgggtcggccagaacccgcacctgccggcgcaaaccctgcgcgccaatatcctgctgggctgcccgcaggccgacgaagcacagctgcagcaggcggtggaactcgcctacgtcagcgaactgctcccttatctgccgcaggggctcgacaccgaagtgggcgacaacgccgcccgcctgtcggtcggccaggcgcagcgcgtggcggtcgcccgggcgctgatcggcccgcgccgcctgctgctgctggatgaaccggccgccagcctcgatgcccacagcgagcagcgggtgatgcaggcgttgaacgccgcttcgcatcagcaaaccaccctgctggtgacgcaccagttggaagacaccgaagactacgatcagatttgggtgatggataacgggcgcatcgtgcaacagggcgattacgccaccctcagcgcccagccgggcctgttcgccactctgatcgcccatcgccgcggggagctttaa

SEQ ID NO: 422424 - DNA, 972 bp, Serratia marcescens
atgggcacggctaaacatagcaaattactgattctgggctccggcccggccggttacaccgccgccgtttacgcggcgcgcgccaacctgagcccggtgctgatcaccggtatggaacaaggcggccagctgaccaccaccactgaagtggaaaactggccgggcgacgccgaaggcctgaccggtccggcgctgatggagcgcatgcgcgagcatgcggagaagttccagaccgaaatcgtcttcgatcacatcaacagcgtcgatctgcagcagcgtccgttccgcctgttcggcgacagcggcgaatacagctgcgacgcgctgatcatcgcgaccggcgcctccgcccgctatcttggcctgccttccgaagaggccttcaagggcaaaggcgtttccgcctgtgcgacctgcgacggcttcttctaccgcaaccagaaagtcgcagtggtcggcggcggcaacaccgccgttgaagaagcgctgtacctgtccaacatcgccgccgaggttcacctgatccaccgccgcgacagcttccgctcggagaagatcctgatcgaccggctgatggaaaaagtgaaaagcggcaacatcgtgctgcacaccgaccatacgctggacgaagtgctgggagatgaaatgggcgtgaccggcgtgcgtatccgcagcaccaaagcggaaaacgaaacccgtgaactggaactggccggcgtgttcatcgccatcggtcacagcccgaacaccggcatcttcggcggccagctggagctggaaaacggctacatcaaggtgcagtccggcattcacggcaatgcgacccaaaccaccatccccggcgtgttcgccgcgggcgacgtgatggatcacatctaccgccaggcgatcacctccgccggcaccggctgtatggcggcgctggacgcggagcgttacctggacggcatcgccggcgcagaagtctgctaa

SEQ ID NO: 422425 - DNA, 495 bp, Serratia marcescens
atggcagacaacaagaaacgcccgggtaaagatcttgaccgtatcgaccgcaacatcctgaatgagctgcagaaggatgggcgtatttcgaacgtcgagctttcgaagcgcgtggggttatccccgacaccatgtttggaacgcgtgcgccgtctcgagcgccagggtttcattcatggctataccgcattgcttaacccgcattatctggatgcgtccctgctggttttcgtggagatcacgctgaaccgcggcgcgccagatgtgtttgagcaattcaactcggcagtgcagaagcttgaagagattcaggagtgtcatctggtttccggtgatttcgactacctgttgaaaacccgcgtaccggacatgtcggcttaccgtaaactgctgggcgaaaccttgctgcgtttgccgggggtcaacgacacccgtacctacgtagtgatggaagaagtgaaacagagtaaccgtctggttatcaaaacacggtaa

SEQ ID NO: 422426 - DNA, 3642 bp, Serratia marcescens
ttgagccaggaatatacagaagataaagaagttaccctgaaaagactcagcagtggccggcgtttgctggaggctgtgcttatcgtggtagcgatttttgccgtttacctcatggctgcgctggtcagtttcaacccgtctgacccaagctggtcgcagaccgcgtggcatgagccgattcacaacttgggcggcggtgttggggcctggttggccgacacgctgttcttcaccttcggggtgctcgcctacgcgataccgccgatcatgctggttctgtgctgggcggcctatcgccaacgggccaacagagactacgtcgactatttcgcactctccctgcgcctgatcggcaccctggcgttagtgctcacctcctgtgggctggcggcgctgaacgttgacgatctctattacttcgcttccggcggcgtgatcggcagcctgctgagcaacgccatgttgccatggttcaacggcatcggcgccacgctggcgctgctgtgcgtgtgggcggcggggctgacgctgtttaccggctggtcctggctggtgatcgccgagaagatcggcggggcggtgctgggcgtcgcgaccttcatgaccaaccgttcgcgtcgcgaagcgcgttatttcgaggatgacgagcgttacgttgacgacgagcctgagcaggcagggaagggcgccgccgcagcggttgccgcgaccgccgccggagccgcggccgccgatgacgacgtgttgttctctgcgccttcggtcactgaaagcgccaaagaggcggcggaagacgccgccgatccgttgctcagcggcctgcgagccgacgatggtgaggttgaagccgacgccgcgccaatcgcgccggcggcttcgcctgcaccggcggtgaaggcagcgatccacgagcccgttgcagcgccgatcgccgctcaggcgccgtcggtaacggtggcgccggccgcgccggcctcggtcaatcagcacccggtgagcgccccggcgcaagacgccacgccgccgctgtactccttcgaaattccggaagaaacgcctgcacctaaggcgacgcgtcctgtcgatccttatcaggatgacgatgagccgcgtctcggcaattggcaagagccggctgcgccgcagccgccggcgcgttctccctttgattttaccgccgcacagcgcgacagcgccgacgtcagcggagcgggtggtttcagcgctaccggtgccaagccacagctggatacggcagccgctgccgctgcgggcgccgcagcggcgaccttcatgccggccttcacggccaccagcgacggcaatccgcaggttaagcagggcatcggccctgagctgccgcggccgaacccggtgcgcatcccgacccgtcgcgagctggcttcttacggcatcaagctgccttcgcagcgtgcggccgagcaggaacagcgccaggcggatcctcagcagccgacggcggtgagcccgcaggaagaagaggcgctgcaggaaaccgcgctgcgtcaggcgtttgccgagcagcaaagccaacgctacggcgaaagctatgcgccggagcaagatgacgagagcgccctgcaggaagccgagctgagcaaggcgtttgccgagcagcagagccaacgctacggcgaaggctatcaacaggacgacgaagaggcgctgcaagaggccgcgctgcgccaggcgttcgccgagcagcagcaggcgcgctacggccagcaagcggctgctccgcaagcgccggccgccagcccggtcgatacccgcaatgctttcagcttctcgccgatggcggatctggtggatgatggcccgagcgagccgatgttcacgctgtctccgcagcttgaagagcgcattgaacagcaaagcgagcaacaggacgacgtgccgttcggccagtttgagcctgcggcgccggttgcccaacctcagcaaccgcactcgcagcctcagcaataccagcagccgcagcaacaacagtatcaacagccgtcgcagccatatcagcagccacagcaaccggtgcagcagcagcctcagcaaactcaggccgagcagcatccggcgatggacagcttgattcacccgttcctgatgcgcaacgatcagccgctgcagaagccgaccacgccgctgccgacgctggatctgctgaccgaggccccgaaagaggtagaaccggtcgactccttcgcgctggaacagaaggcgcgtctggtggaggccagcctggccgattaccgcgtgaaagccgacgtggtggacatcctgccggggccggtcatcacccgcttcgagctggatctggcgccgggcgttaaagcggcgcgcatttccaacctgtcgcgcgatctggcacgctcgctgtcgacgtcggcggtgcgcgtggtagaagtgatccccggcaagccttacgtcggtctggagctgccgaacgccaagcggcaaacggtgtacctgcgcgaagtgctggattgcccggccttccgtgacaacccgtcgccgctgtccatcgtattgggtaaggacatctccggcgaaccggtggtggccgatctgggcaaaatgccgcacttgctggtcgccggtaccaccggttccggtaagtcggtcggggtcaacgccatgatcctgagcatcctgtataaagccacgccgaaagaagtgcgctttatcatgatcgacccgaaaatgctggagctgtcggtttacgaaggcattcctcacctgttgaccgatgtggtcaccgacatgaaagacgccgccaacgcgctgcgctggtgcgtgggggaaatggaacgccgctacaagctgatgtctgccctgggcgtgcgtaacctggccggctacaacgagcgcgtcgatcaggccgaggcgatggggcgtccgatcccggatccgttctggaagccgaccgacagcatggacatcacgccgccggtgttggagaaagagccgtacatcgtggtgatggtcgacgaattcgccgatctgatcatgacggtcggcaagaaggtcgaagagttgatcgctcgcctggcgcagaaagcgcgtgcggcgggtatccatctggtgctggcgacccagcgtccgtcggtggatgtgatcacgggtcttatcaaggccaacatcccgacgcgtatcgcctttaccgtgtcgagcaagatcgactcccgcaccatcctcgatcaggggggcgccgagtccttgctgggtatgggcgacatgctctatctggcgccgaactcctcgattccggtgcgcgtgcatggcgcattcgtgcgcgatcaggaagtgcacgcggtggtcaaggattggaaagcgcgcgagcggccccaatataaagagggcattctcagcggcggcgaagacggcgagggcggtgccggcggtggtatggacggcgacgaagagctggatccgctgtttgaccaggcggtggatttcgtggtggataaacgccgcgcctccatctccggcgtacagcgccagttccgtatcggctataaccgcgcggcgcgcatcatcgaacagatggaagcgcagggcatcgtcagcgagcaggggcacaacggcaaccgcgaggtgctggcgccgccgcggcacgattga

SEQ ID NO: 422427 - DNA, 612 bp, Serratia marcescens
atgaaaaaactgttagttgcctgctgtctgctttcgggattcgcttctacttccgtgctggccgatgccgcacaggatctgcaaagtcgcctggcgaaggtgaacagtttccacgccagcttctcgcaaaccgtgaccagcgccgacggtgccgcggtgcaacagggggaaggcgagctgtgggtgaagcggccgaacctgttcaactggcatatgacgtcacccgatgagagcgtgctggtctccgatggccaaaccctgtggttctataacccgttcgtcgagcaggtgacggcgacctggctgaagaacgccaccggcaatacgccgtttatgctgatcacccgcaataatgccagcgactggaaacagtacaacgtgaagcaaaagggcgatgatttcgagctgacgccgaagtccgccagcggcaacctgaagcagttcgccatcagcgtgaccaacagcggcaccatccgcagcttcgccgcggtggagcaggacggccagcgcagttcctacacgctgaaaagccagcagaacgtcgccgccgatccggccaaattcaaatttaccccgcctaagggggtgacgctggacgaccagcgccagtga

SEQ ID NO: 422428 - DNA, 1347 bp, Serratia marcescens
gtgagtaataatctgtcgctcgatttttcccagaacgagttccagccgttggccgcgcgtatgcggccgaccacgctggcgcagtatatcggccagcagcacctgctggccgccggcaagccgctgccgcgcgccattgaggccgggcagctgcactcgatgattttatgggggccgccgggcaccgggaagacgacgctggcagaactgatcggccgttacggccaggcggatgtcgaacggatctccgccgtgacctccggtatcaaggaaatccgcgaggcgatcgagcgggcgcggcaaaatcgcgacgccggccgccgcaccatcctgttcgtcgacgaagtgcaccgcttcaataagagccagcaggacgctttcctgccgcacatcgaagacggcaccatcacctttatcggcgccaccaccgaaaacccgtcgttcgagctgaactcggcgctgttgtcccgcgcccgcgtttacctgctgaaggcgctgactgccgaagatatcggccaggtgctggatcaggcgatgggcgacaaggcgcgcggctttggcggccagaatatcgagctgccggcggaaacgcgccgcctgctgtcggagctggtgggcggcgacgcacgccgggcgctgaacagcctggaaatgatggccgacatggcggagttggacgccaaaggcgtgcgggtgctgacgccggagctgctgaaagaagtgtcgggcgagcgcagcgcgcgcttcgacaacaagggcgaccgttattacgatctgatttccgcgctgcataaatcggtgcgcggctcggcgccggacgccgcgctgtattggtatgcgcgcatcattaccgccggcggcgatccgctctacgtggcgcgccgtctgttggcgattgcctctgaagacgtgggcaacgccgatccgcgcggcatgcaggtggcgatcgcagcctgggattgcttcacccgcgtggggccagcggagggcgaacgcgccatcgcgcaggcgatcgtctacctggcctgcgcgccgaagagcaatgcggtttacaccgcgttcaaggctgccatgcgcgacgccaaagagcaggccgattatgacgtgccggagcacctgcgcaacgcgccgaccaagctgatgaaggaaatggggctgggggcggagtaccgttacgcccacgacgaacccaacgcctacgccgctggcgagaactatttcccgcccgaaatggcccatacgcgctactatcaaccgacctcgcgcgggctggaagggaaaatcggcgaaaagttggcatggctggctgagcaggatcaaaatagcccgacaaaacgctaccgctag

SEQ ID NO: 422429 - DNA, 1293 bp, Serratia marcescens
atgctcgatcccaatctgctgcgtaatgagctagacgcagtcgccgtcaaactggctcgccgaggctttaaactcgatctggatctgctgcgttcgcaggaagaacgtcgcaaagttctgcaggtagaaactgaaacgctgcaagcggaacgcaactcccgatcgaaatccatcggcgcggccaaagcgcgtggggaagacatcgagccgctgcgtcgcgaagtgaacgagctgggtgacaagctggatgccgccaaggcggcgctggatgcgttgcagagcgagatccgcgattacgccctgacgctgcctaacctgccggacgacgccgtgccggatggtaaagacgacagcgaaaacctggaagttgcccgctggggcgaaccgcgccggtacgacttcgcggtgcgcgatcacgtcgatctgggcgaaatggccggcgggctggattttgccgccgcggttaagctgaccggttcgcgcttcgtggtgatgaaagggcaaatcgcccgcatgcaccgcgcgctgtcccagttcatgctggatctgcacaccgagcagcacggctacctggaggcctatgtgccttatctggttaaccacgccacgctgtacggtaccggccagctgccgaagttcggcgaagacctgttccatacccgtccgctggaagaagaagccgacagcagcaactacgcgctgatcccaacggcggaagtgccgctgaccaacttggtgcgcgacgagatcgtggaagaggaaactctgccgctgaaaatgactgcacacacgccatgcttccgcgcggaagccggttcttacggccgcgacacccgcggtttgatccgcatgcaccagttcgacaaggtcgagatggtgcagatcgttcgtccggaagattcgatggatgccctggaagagctgaccggccacgcggaaaaagtgctgcagctgctgaacctgccttaccgcaaggtgctgctgtgcaccggcgacatgggcttcggcgcgtgcaaaacttacgatctggaagtgtggctgccggcgcaggatacctaccgcgagatctcgtcctgctccaacatgtgggacttccaggcgcgtcgcatgcaggcgcgctgccgcagcaaagccgacaagaaaccgcgcctggttcacaccctgaacggctccggcctggcggttggccgtacgctggtggcggtgctggaaaactaccagcaggccgacggccgcattcaggtgcctgaagtgctgcgtccttatatgggcggcctggaatatatcggctaa

SEQ ID NO: 422430 - DNA, 366 bp, Serratia marcescens
atgagtcaggcaaatgatgcggcggtagaggccctgctggcggacatcggcagcacgcacggcgaactgctggagatcgtacagcaggtgcgccggatagctgcagcgtgcggcaacggcgtcaccgaatcggtcaaatacggcggcatcatgttctcgcatagccaatttttctgcggcgttttcgcctatcgccaccacgtcacggtggagttcggccacggctaccgattggaagatcgttatctccagctcgaaggcagcggccagtatcggcggcacatcaagctccactcgcccgacgaggtgaaaagcaaacatctggcggactacattcaacaggcttatgcgctgactacgggctga

SEQ ID NO: 422431 - DNA, 1020 bp, Serratia marcescens
atggtcagttcctcttatttcagcggcaacctgttgggcacgctggtggcgggcaaactgatccagcgcgtcggcttcacccgcagctatcatctttcttgtctggtgttcgccgccgcgactgccggcatggtgctgtcgatcgatttttggagctggctgggctggcgcttcttcgccggcgtcggctgcgcctggatctgggtgatcgtggagagcgcgctgttgcgcagcggcaacctgagcaaccgcggccagctgctggcggcctatatgatcgtttattaccttggtacggtgaccggccaattgctgttgagcatgacctcgaccgagttgctgcacgtggtgccgtgggtgaccgccattgtgattagcgccatgctgccgatgctgttcgcgcgggtcaaccgccatgaagacgagccgcagcaggcggcggtgtggaccatgctgagacgccgcagcgcgcgcctcggcatcaacggttgcatcatttccggcattgtgctcggttcgctatacggcctgatgccgttgtacctctcccatcagggcatgagcgacgccaacgtcggttactggatggcgctgctggtcagctccggcatcgtcggccaatggccggtcgggcgcctggccgatcgttacgggcgcctgctggtgctgcgcattcaggtgttcgtggtgatcctcgccagcgtggcgatgctcggcaactacgccatggcgccttcgctgttcatcctcggctgcgccggctttaccctgtatccggtggcgatgtcctgggcctgcgagaaggcgctgccgcacgagttggtggcgatgaaccaggcgctgttgatgagttacaccatcggcagcctgctggggccgtcgatgacggcgttgctgatgcaaaactattccgaccgcgtgctgttcgtgatgatcgccgccgtggcgctggtttacctgctgatgctgctgaagaaacagaagccggatcaccatcacacgccgttcgccgccgcctga

SEQ ID NO: 422432 - DNA, 741 bp, Serratia marcescens
atgtcagcaattggtcgcatccactccttcgaatcctgcggcaccgtcgatgggccagggatccgctttatcgtcttcttccagggctgcctgatgcgctgcctctattgccataaccgcgacacctgggacacccacggcggcaaggaagtgaccgtcgaagagctgatgaaagacgcggtggcctaccgccacttcatgaacgcctccggcggcggcgtgaccgcatccggcggcgaggcgatcctgcaggctgaattcgtgcgcgactggttccgcgcctgccacgccgaaggcatcaatacctgcctggacaccaatggctttgtgcgccgctacgatccggtgatcgacgagctgctggacaccaccgatctggtgatgctggatctgaaacagatgaacgacgagatccaccagaacctggtcggcgtctccaatcaccgcacgctggaattcgcccgctacctggcgaaacgcaaccagcgcacctggatccgctacgtggtggtgccgggctggtcagacgacgataagtcggcgcacctgctgggcgagttcaccaaagacatgaccaacatcgagaaaatcgagctgctgccctaccacgagctgggcaagcacaaatggatagcgatgggggaagagtacaagctggacggcgtgcacccgccgaaagccgagaccatggatcgcgtcaaaggcatcctggaaagctacggccacaaagtgatttactga

SEQ ID NO: 422433 - DNA, 2283 bp, Serratia marcescens
atgaccgaacttaacgagaaattagccaacgcttgggaaggtttcagcaagggtgactggcagaatgaagtcaacgttcgtgacttcatccagaaaaactacacgccttatgaaggtgacgagtccttcctggctggggcaactcaggccaccaccaccttgtgggacaaggttatggaagggatcaaactggaaaaccgcactcacgcgccggttgatttcgacaccaacgttgcttcaaccatcgtttctcacgacgcgggttacatcgccaaagagctggaaaccatcgtgggtctgcagaccgacgcccctctgaaacgcgcgctgatcccgttcggcggcatcaaaatggtcgaaggttcgtgcaaagtgtacggccgcgagctggatccgcagctgaaaaaagtgttcaccgaataccgtaaaacccacaaccagggcgtattcgacgtttacaccaaagacatcctgaactgccgtaaatccggcgtgctgaccggcctgccggacgcctacggccgcggccgcatcatcggcgactaccgccgcgtggcgctgtacggtatcgacttcctgatggccgacaagctgaaccagttcaaatcgctgcaggaaaaactggaaaacggtgaagatctggaaatgaccatccagctgcgcgaagagatcgctgaacagcaccgcgctctggctcagatcaaagagatggccgccaaatacggctacgacatctccggcccggccaccagcgcgcaagaagcggtgcagtggacctacttcggctacctggccgcggtgaaatcccagaacggcgcagccatgtccttcggccgcgtgtccaccttcctcgacgtgttcatcgagcgcgacatcaaggcgggcaaactgaccgaagaacaagcgcaggaactgatcgaccacctggtgatgaaactgcgtatggtgcgcttcctgcgtacccctgagtacgatgagctgttctccggcgacccaatctgggcaacggaatccctggccggtatgggcgttgacggccgcaccctggtcaccaaaaacagcttccgcttcctgaacaccctgtacaccatggggccgtctccggagccgaacatgaccatcctgtggtctgagaagctgccgctgaacttcaagaaattcgcggcgaaagtgtccatcgacacctcttccgttcagtacgaaaacgacgacctgatgcgccctgacttcaacaacgatgactacgccatcgcttgctgcgtcagcccgatgatcgtcggcaaacaaatgcagttcttcggtgcccgcgccaacctggcgaaaaccatgctgtacgccatcaacggcggcgttgacgaaaaactgaaaatgcaggtcggccctaaagaagcgccgatgatggacgaagtgctggactatgacaaagtcatggcgcgcatggaccactttatggattggctggccaagcagtacgtgaccgcgctgaacatcattcactacatgcacgacaagtacagctacgaagctgcgctgatggcactgcatgaccgtgacgtttatcgcaccatggcttgcggcatcgccggcctgtccgtggcggccgactccctgtctgccatcaagtacgcgaaagtcaccaccattcgcgacgaagacggcctggccatcgacttcaaagtggaaggcgagtatccgcagttcggtaacaacgacgcccgcgtcgatgacatcgcctgcgacctggtggaacgtttcatgaagaaaattcagaaactgcgcacctaccgcaatgcggtaccgacccagtccgtactgaccatcacctccaacgtggtgtacggtaagaaaaccggtaacaccccggatggccgccgcgcaggcgcaccgttcggcccaggtgccaacccgatgcacggccgcgaccagaaaggcgcagtagcctccctgacctcggtagccaaactgccgtttgcctacgcgaaagacgggatctcctacaccttctccatcgtgcctaacgcgctgggtaaagacgacgacgtgcgtaaagccaacctggcgggcctgatggatggttacttccaccatgaagcctccatcgaaggcggccagcacctgaacgtcaacgtgatgaaccgcgaaatgctgctggacgcgatggaaaaccctgagaaataccctcagctgaccatccgcgtttccggttacgccgtgcgcttcaactcgctgaccaaagagcagcagcaggacgtgattactcgtaccttcactcaaacgatgtaa

SEQ ID NO: 422434 - DNA, 861 bp, Serratia marcescens
ttgaaaactgacagccccttcgatctgattttacctgcggcaacggcgaaaatcgctgaagatgccggcgtgtataaagccaccaaacatccgctgaaaacgttttatttggcgatcaccgccggtgtcttcatttccatcgccttcgtcttctacatcacggcgaccaccggcaccgccggcgtgcctttcgggctggcgaaactggtcggcggcatctgcttctctctcgggttaatgctggtggtggtgtcgggcgccgacctgttcacctctaccgtgctcatcgtcatcgccaaggccagcggccgcatcagctggggccagctgggcgccaactggctgaacgtttatctcggcaatctggtcggcgcgctgttcttcgtggcgctgatctggttctccggcgagtatatggtcgccaacggccagtgggggctgaatgtcctgcaaaccgcagaccacaagctgcatcacacctttatcgaagccgtgtgcctcggcattctggctaacctgatggtctgcctggcggtctggatgagctactccggccgcaccctgaccgacaagatgctcgctatggtgctgccggtcgggatgtttgtcgccagcggcttcgagcacagcatcgccaacatgtttatgatccctatgggcatcgtggtcaaacacttcgccacgccggaattctggcaagccgtaggggcggtacctgagcaattcgctcatctgacagtaagcaacttcatcatcgacaacctgattccggtcaccatcggcaacatcatcggtggcggtctgctggttgggttgacttactgggtaatttatctgcgcgggggccgcgaacagcactaa

SEQ ID NO: 422435 - DNA, 1764 bp, Serratia marcescens
atgacgcaaacttttatccccggtaaagatgccgccctggaagactccatcgcccgtttccagcagaaactgagcgatctcggtttcaacatcgaagaagcctcctggctgaacccggtgccgcacgtgtggtcggtgcacattcgcgatcgcgattgcccgctgtgcttcaccaacggcaaaggcgccagcaaaaaagccgcgctggcctccgcgctgggtgaatatttcgagcgcctgtccaccaactacttcttcgccgatttctatctgggccggcagatcgccgaaggcgacttcgtgcactacccgaatgagaaatggttcccgatccctgaagacgacgcgctgccggccggcatcctcgacgaacgcctgcacgccttctacgatccgcagcaagagctgagcgccagcgatcttgtcgatctgcagtccggcaacgccgatcgcggcgtgtgcgcgctgccgtttacccgccagtccgatcagcaaaccgtgtacatcccgatgaacatcatcggcaacctgtatgtttccaacggcatgtccgccggcaacaccgccaacgaagcgcgcgtgcagggcctgtcggaagtgttcgagcgctatgtgaaaaaccgcatcatcgccgaatccatcagcctgccggcgatcccggacgaagtgctgaaccgctacccgggcgtggtggaagccatcgccaaactggaagaggaaggtttcccgatcctctcctatgacgcctcgctgggcggcaactacccggtgatctgcgtggtgctgttcaacccgaccaacggcacctgcttcgcctcgttcggcgcgcacccggacttcggcgtggcgctggaacgcacggtgaccgaactgctgcagggccgcagcctgaaagatctcgacgtgttcaccgcgccgaccttcgatgacgaagaagtggcggaacacaccaacctggaaacgcacttcatcgactccagcggcctgatctcctgggatctgttcaaacaggacgcggattacccgttcgttgactggaacttcagcggcagcacgcaggaagagttcgccaccctgatgagcatcttcgacaaggaagacgcggaagtgtacatcgccgactacgagcacctgggcgtctacgcttgccgcatcatcgtgccgggcatgtccgacatttatccggcggaagacctgctgctggccaacaacagcatgggcgcgcacctgcgcgacacgctgctggcgctgccgggcagcgagtgggagccggaagagtacctggcgctgatcgagcaactggatgacgaagggctggacgatttcacccgcgtacgcgaactgctgggcattgccagcggcaaagacaacgcctggcataccctgcgcgtgggcgagctgaaggcgatgctggcgctggcgggcggcgatctggatcaggcactgatctggaccgaatggacgcaggatttcaacgcctcggtgctgagcccggcgcgcagcaactactaccgctgcctgcaaacgctgctgctgctggcgcaggagcctgaacgcgaagcggcgcaatactataccgcgttcgtgaagatgtatggccaggaagcggtcgacgccgcctccgccgccatcagcggtgaagaacgcttcaacgggctgttcgccgtctatgccgatctgaaggcgctgccggcccatcaggcgctgctggcggcctacgagaagctgcaggcggccaaacgccgccactgggccaaggcctaa

SEQ ID NO: 422436 - DNA, 1047 bp, Serratia marcescens
atgaaatcagtgaaactcagcgcgttaaccctcttgttgaccggcttcagcgcctcggcgctggcgctgcccaacatcaccctgctggcgaccggcggcactatcgccggcggcggtgagtcggcgacgaaatccaactataccgcgggcaagctgggcgtcgaggcgctggtcgatgcggtgccggagctgaaaaacgtcgccaacgtgcagggggagcaggtggtgaacatcggctcgcaggacatgaacgatcaggtctggctgacgctggcgaagaaaattgacgccgactgcggcaagaccgacggcttcgtcatcacccacggcaccgatacgctggaggagacggcctatttcctcgatttgacggtgaaatgcgacaagccggtggtgctggtaggggcgatgcggccggcgacggcgatgagcgccgacggcccgttcaatctgtacaacgcggtggtgacggcggcggatccgcaatcggccaaccgcggggtgctggtggcgatgaacgacaccgtgctggatgcgcgcgacgtcaccaagaccaacaccaccgccgtgcagaccttccagtcgccgaactacggcccgctggggtatatccacaacggcaagatcgattaccagcgctcgccgcagcgtaagcatacccgggatacgccgttcgacgtcagcaagctgaacgaattgccgaaggtcggcatcatctacaactatgccaacgcctccgatgcgccggccaaggcgctgatcgccgaaggctaccagggcatcgtcagcgccggggtcggcaacggcaacctgtataaaaccgtgttcgacaccctggcgacggcggcgcacaatggtgtggcggtggtgcgctcatcgcgcgtgccgaccggcgccaccaccgaagatgcggaagtggacgacgccaagtacggctttgtggccgccggcacgctgaatccgcaaaaagcgcgcatactgctgcagctggcgctgacgcaaaccaaagacgcgaagcagatccagcagatgttcaatcagtactga

SEQ ID NO: 422437 - DNA, 1086 bp, Serratia marcescens
atgactcaggtttataattttagctctggcccggcgatgctgccggtggaagtgttgcgtcgtgcggaacaggaactgtgcaactggcacgggctgggcacgtcagtgatggagatcagtcaccgcagcaaagaattcatcgccgttgccgagcaggcggaacaagatctgcgcgatctgctgaaagtcccctccaactataaagtgctgttttgccacggcggcgcccgcgcgcagttcgccgcgctgccgctgaacctgttgggcgacaaggccaccgccgactatatcgacggcggctattgggcgcacagcgccatcaaggaagcggaaaagtattgcgccccgaacgtcatcgacgtgaaaacccgtatcgacggcctgagcggcatcaagccgatgaaagcgtggcagctcagcgacgacgcggcttatgtccactattgcccgaatgagaccatcgacggcgtggccatcgatgaaacgccggacttcggcgacaaggtggtaatcggcgattactcctcgaccatcctgtcccgcccgctcgacgtcagccgcttcggcgtgatttacgccggcgcgcagaaaaatatcggcccggccggcctgactctggtgatcgtgcgcgacgatcttttgggcaaggcgcgcaaagaagtgccgtcgatcctcgattacaccgtgctggccgagaacgactcgatgttcaacaccccgccgaccttcgcctggtacctgtccgggctggtgttcaaatggctgaaagagcagggcggcctggtggagatgcaaaaacgcaatcaggccaaggccgagctgctgtacgcgaccatcgataaatccgacttctaccgcagccaggtggcgatcgccaaccgttcgtggatgaacgtgccgttccaactggccgatgcggcgctggacaaggtgttcctcagtgaagccgaggccatcggcctgcaggcgctgaaaggccaccgggtagttggcggcatgcgcgcttctatttacaatgccatgccgctggccggcgtgcaggcgctgaccgatttcatggccgacttcgaacgtcgtcacggttga

SEQ ID NO: 422438 - DNA, 1287 bp, Serratia marcescens
atggtggattccctgacgttacaaccggtcgccctggtcaatggcaccgtcaacttacccggctcgaagagcgtttctaaccgcgctctgctgctggcggcgctggcgaaaggcacgacccggctgaccaacctgctggacagcgacgacgtgcgtcatatgctgaacgcgctgcaggcgttgggcgtgaactaccagctttccgccgatcgcaccctgtgcgaagtgaccggcgtggccggcccgctggtggccgaacggccgctggaactgttcctcggcaatgccgggacggcgatgcgtccattggcggcggcgctgtgcctcggcgaaggcgacgtggtgctgaccggcgaaccgcgcatgaaagagcgcccgatcggccatctggtggacgcgctgcgccagggcggggcgcagattgattacctcgagcagaccgattacccgccgattcgcctgcgcggcggcttccagggcggcgacgtcaccgttgacggcagcgtctccagccagttcctgaccgcgttgctgatgaccgcgccgctggcgccgcaggatacgcagatccacatcaagggcgagctggtttccaagccgtacatcgacatcacgctgcatctgatgcgcaccttcggcgtatcggtgagtcacgacaactaccgggtgttccatatccaggggcgccagacgtatatcgcgccgggcgattacctggttgagggcgacgcttcttccgcctcttacttcctggcggcggcggctatcaaaggcggcaccgtgcgcgtgaccggcatcggccgcaaaagcgtgcagggcgacaccaagtttgccgacgtgctggagaaaatgggcgcgcgcattacctggggcgacgatttcatcgaatgcagccgcggtgaactgcgcggtatcgacatggacatgaaccacattcctgacgcggcgatgaccatcgccaccgcagcgctgttcgccgaggggccgaccaccatccgcaatatctacaactggcgggtgaaggagaccgaccgtctggcggcgatggccaccgagctgcgtaaagtgggggcggaagtggacgaaggcgaagactacattcacgtcgtgccgccggccaaactgcagtttgccgagattggcacctacaacgatcaccgcatggcgatgtgtttctcgctggtggcgctgtcggatactccggtcaccattctcgatccgaaatgcaccgcgaaaaccttcccggactatttcgaacagctggcgcgcatcagccagccggcgtaa

SEQ ID NO: 422439 - DNA, 690 bp, Serratia marcescens
atgacggctacagccccggtgataaccgttgatggaccaagtggcgcaggcaaaggcacgctgtgtaaagcgttggccgagtcccttggttggcgtttgctggattccggcgcgatctatcgcgtgctggcgctggcggcgttgcatcatcaggtggatatcacttctgaggaagcgctggttccgctggccgcacatctcgatgttcgcttcgttgcccaggacggcaagctgcaggtgattttggaaggtgaggacgtcagcaatgagatccgcaccgaaaccgtcggcaacaccgcgtcgcaagcggcggcgtttccgcgcgtgcgcgaggcgctgctgcgccgccagcgcgcattccgcgaggcgcccggcctgattgccgatggccgcgacatgggcacggtggtgttcccggacgcaccggtcaagattttcctcgacgccagctcggaggagcgcgcgcaccgccgcatgctgcagttgcaggagaagggctttaatgttaactttgaacgtcttttagccgagataaaggaacgggacgaccgtgaccgtaatcggcctatcgcgcctctggtgcctgcttctgacgccctcgtgctggattctaccagcatgtcgatcgaagaagtgatccggcaggcgttgacgtatgcacagaaagtgttggcgttgccgcagcaataa

SEQ ID NO: 422440 - DNA, 1674 bp, Serratia marcescens
atgactgaatctttcgctcaactctttgaagaatccttaaaagaaatcgaaacccgcccgggttccatcgttcgtggcgtcgttgttgctatcgacaaagatatcgtgctggttgacgccggtctgaaatctgagtctgccatcccggctgagcaattcaaaaacgcccagggcgagctggaaatccaggttggtgacgaagttgacgttgctctggatgctgttgaagacggcttcggtgaaaccctgctgtcccgtgagaaagctaagcgtcacgaagcttggatcacgctggaaaaagcttacgaagaagctgagactgtaactggtgttatcaacggcaaagtgaagggtggcttcaccgtcgagctgaacggcatccgcgcgttcctgccaggttccctggttgacgtgcgtccggtacgtgacactctgcacctggaaggcaaagagcttgagttcaaagtcatcaagctggatcagaagcgcaacaacgttgtcgtttctcgccgtgcggttatcgaatccgagaacagcgctgagcgcgatcaactgctggaaaacctgcaggaaggcatggaagttaaaggtatcgttaagaacctcactgactacggtgcattcgttgatctgggcggcgtagacggcctgctgcacatcactgacatggcttggaaacgcgttaagcacccaagcgaaatcgtcaacgttggcgatgaaatcactgttaaagtgctgaagttcgaccgcgagcgtactcgtgtatccctgggcctgaaacagctgggcgaagatccatgggttgctatcgcgaaacgttacccagaaggcaccaagctgactggtcgtgtaaccaacctgactgattacggctgcttcgtagaaatcgaagaaggcgttgaaggtctggtacacgtttctgaaatggattggaccaacaaaaacatccatccgtccaaagttgttaacgtgggcgacgtagtggaagtgatggttctggacatcgatgaagaacgtcgtcgtatctccctgggcctgaagcagtgcaaatccaacccatggcagcagttcgcagaaacccacaacaagggcgaccgcgttgaaggtaaaatcaagtctatcactgacttcggtatcttcatcggcctggacggcggcatcgacggcctggttcacctgtctgacatctcctggaacgttgcaggcgaagaagcagttcgtgaatacaagaaaggcgacgaaatcgcagcggttgttctgcaagttgacgcagagcgcgagcgtatctccctgggcgtgaagcagctggctgaagatccgttcaataactacctgtctatgaacaagaaaggtgctattgttactggtaaagtcactgcagttgacgccaaaggtgctacagttgaattggcaggcggcgtagaaggttacctgcgtgcatctgaagcctctcgcgaccgcattgaagatgcaactctggttctgaacgtaggtgacgaagttgaagccaaattcaccggcgttgaccgtaagaaccgcgttgtaagcctgtccgtacgtgctaaggacgaagctgacgagaaagacgccatcgcaactgttaacaacaaacaggaagaaggcaacttctctaacgcaatggctgaagctttcaaagcggctaaaggcgagtaa

SEQ ID NO: 422441 - DNA, 285 bp, Serratia marcescens
atgaccaagtctgaacttattgaaagacttgctggccagcaatctcatattccggcgaaggccgttgaggatgcagtgaaagagatgcttgagcacatggccgcaacgctggccgagggcgaacgcattgagatccgcggattcggcagtttttctcttcactaccgtgccccgcgtgtaggccgcaacccgaaaaccggcgacaaagtcgagctggacggcaagtacgttcctcacttcaaaccaggcaaagagttgcgtgaccgcgccaatatctatggctag

SEQ ID NO: 422442 - DNA, 2178 bp, Serratia marcescens
atgctgctggtcgccggtttactgctgcgcacccgttggccgttctgccgttatttggcctgcctgggattgggattcatatgggcagttttcaacgccggaagcctgctcgggcaaatggatcgcttaagccgcgcgccggaagtgacggcggtggtgcagataagcagcgtcgcactggagcctgccgtcagtaagcagaccctgatgcgcatcgagcgggtcgacggccattggctggcgcctgcgctggcgtttaccacgacatgggctccgaaagagcaacggctgtgtgccgggcagcgttggcaattgaaactgcgcatgcggccggtgcatggcaagctcaatgaaggaggcttcgacagccaacgttgggcgatcgcacagcgccagccgttgaccgctcaggtcaggcaggcgcgcttgctggcggggaactgcggcctgcgccagcgcattatcagccatgctgaagccaacattggtgaattgcgttacaaggcggtgttgctggcgttggcgtttggggaaagaaccgcgctcgaacaggctttgcgcacgctgatgttgaaaaccggtatcgctcatctgatggccatatcggggttacatgttgcgatggtcgccattttgttctgggcagtgctgcgcgcgctgcagtttttcctccccgcccatctgattggttatcgttttccgttgatcgcgggctgggtggcgacgctgatctatgtttggttggtgggcgcccagccgccggcggtgcgtaccgcgttggcgatgacgctgtggatgctgctgcgtttgcgcggcgtgcattgctcttcatggcaagtgtggctgtggtgcatcgggcttattttgctctgcgatccgttggcggtcttgtcagacagtttctggttgtcggtactggcggtggggtgcctgattttttggttcgagtgggcaccgctcggcgagcgatttcgttcggcgtggtattgggctccggtgcgctggctgcatattcagctaggcatgacgttgctgctggtgccgatgcaggccgcgctgtttctgggcctgacgttgacctcgctgccggccaatctctgggcggtgcccatcgtctcattggtgacggtgccgttgattttgctggcgttgatttgcggcatcttcccctcgctaagttacgggctttggtggttggcggatttcacgttgggatgggtgtttgtgccgttaaattatctgcagcgcggctgggtggatttgggggccgcctctttgcttgccagcgcgtcgggatggcttctcgttatctgttggcgctttcattggtggtggcgctatgcgcctggactggcagcgatagccatatgctgcgtgttatggcgaggtaaagcaccggattaccattggcgcgtcgacatgctcgatgtcgggcacggcctggcggtggtgatcgagcaaaacggcaaggggatactgtacgacaccggcgatcgttgggcgacaggcagtgccgcagaacggcatatattgccgatgctgaactggcggggcattgagctggagcagatcattatcagccatattcatctcgatcatatcggcgggctcccgacgatgcggcgagcgttcccgcaagctaccgtgcgcagcccgatacgcggggaagggcatttaccctgcatcgccggcgagcgttggcgctggcagtcgttgcaattcgaggtgctgtggccgccgaaaatgctcaaaaggccggttaatgacgactcttgcgtgatccgtatcgacgacgggaaatacagtctgctgctcaccggcgatgcggaaaagagggcggaggcgcagctgctccgattgcggcgcgaccgcttaatggccacggtattgcaggtggggcaccatggcagcaaaacttcctcaacaccgccttttttgcgcgcggttaatcccgaagctgcgctggcgtccgcatctcgttacggtaaatggcgtttgccggcgcgtaaagtggtcgcccgatatcgggcaaatggcattacatggcacgatacgacgcgctccggccagttgtcggtgctttttttcgacaacgattggcaaattaaaggctttcgcgaacaattaatgccccgttggtaccatcagcggtttggcgtagagggcgataatgagtaa

SEQ ID NO: 422443 - DNA, 1749 bp, Serratia marcescens
atgatgaatgataaagatctctcgacctggcagacgttccgtcgactctggccgatgatcactccttttaagaccgggctgattgtggccgccattgcgttgattatgaacgcagcgggggacacgctgatgctgtctctgcttaaaccgttattggacgatgggtttggaaaaaccgacagcagcgtgctggtgtggatgccgctggcggtgattgcgctgatgctgatgcgcggcgtgaccagctttgtttcaagctactgcatttcctgggtttccggcatggtggtgatgcagatgcgccgccgcctgtttggccacatgatgagaatgccggtggccttcttcgatcagcaatccaccgggacgttgctgtcgcgcattacctatgattccgagcaggtggcgtcttcttcttccagcgcgctggtgaccgtggtgcgcgaaggggcctcgatcattggcctgttcatcatgatgttctactacagctggcagctgtcggtgatcctgatcgtgctggcgccgatcgtctccatcgccattcgcctggtgtccaagcgttttcgcaacatcagcaagaacatgcagaacaccatggggcaggtgaccaccagcgccgaacagatgctgaaaggccataaagaagtgctgatcttcggtggccagcaggtggaaaccgagcgctttaactcggtgagcaaccgcatgcgtcaacagggcatgaaactggtctctgcgtcttccatttccgatccgatcattcagctgatcgcttcgctggccctggcgttcgtgctgtttgccgccagcttcccaagcgtgatggaaaccctgaccgccggcaccattaccgtggtgttctcgtcaatgatcgcgctgatgcgtccgctgaagtcgctgaccaacgtcaatgcccagttccagcgtgggatggcggcctgccagacgctgttctccatcttggatatggaacaggaaaaagacaccggcacccgcgaagtgaagcgcgcgaaaggcgacatcgaattccgcaacgtcaccttctactatccggctaaagaaacgccggcgctgcgtgatatcaacctgaaaatcgccgaaggcaagactgtggcgttggtgggccgctcgggttcgggtaaatccaccatcgccaacctgctgacgcgcttctacgatattcaggaaggcgaaatcctgatggatggccacgatctgcgtgaatataccctggcctcactgcgtaatcaggtggcgctggtctcgcaaaacgtgcacctgttcaacgataccatcgccaacaacatcgcctatgcgcgcgagagcgaatacagccgcgagcagattgagaaagcggccgaaatggcgtacgcgatggacttcatcaacaagatggaaaacggcctggatacggtgatcggtgaaaacggcgtgatgctgtccggcggccaacgtcagcgcatcgccatcgcgcgtgctttgctgcgcgattgcccgatcctgatcctggatgaggcgacttctgcgctggataccgaatccgagcgtgccattcaggccgcactggacgagctgcagaaagaccgtacttcgctggtgatcgcacaccgtctgtcgacgattgagaaggcggacgagatcctggtggtggaggacggtcgcatcgtcgaacgcggcgagcacgccgagttgcttgaacggcagggcgcctatgcgcaactgcaccgcatgcagtttggtcaataa

SEQ ID NO: 422444 - DNA, 981 bp, Serratia marcescens
atgattgagcgcatttggtccggcggttcgctgctttatctggcgctgctgccgctctcctggctgtatggcctgttcagctggctgatccgcctcagctaccgctgtggcctgcgcaaaagctggcgcgcgccggtgccggtggtggtggtgggcaacctcaccgccggcggcaacggcaaaacgccgatggtgatctggctggtggaacacctgcagcagcggggctatcgcgttggcgtggtttcgcgtggttacggcggtaagtcggcggtctatcccctggtgctcaatcagaatacctcgacccgcgaggcgggcgatgagccggtgctgatttatcagcggaccggtgcgcccgtggcgattgcgcccaagcgagcagaggcggtgcaggccttgctgcaacaacagccgctggatgcgatcgtcaccgacgatggcttgcagcactatgctttacagcgtgacttcgagctggtggtcatcgacggcgtgcgtcgcttcggcaacggctggtggttgccggccgggccgatgcgcgagcgtgctgcgcggcttggcagtgtcaatgcgcgcgtcgccaatggcggcgtggcgcaggccggggaaattgccatgcgcctgcaggcgcgtgatgcggtgaacctgctgagcggtgaacgtcgcccggtggccgagctgccgcgcgtggtagcgatggcgggcatcggccatccgccgcgtttcttcgcgacgttggaaaaactgaacgtcgaggtggtgcaggaagtggcgtttgccgatcatcaggaatatcagcaggcgcagctggcggcgctggttgctgccgatcaaacgctgttgatgacggagaaggacgcggtgaaatgtcgcgcctttgcccagcccaattggtggtatttgccggttgatgcggtgctaccgtccgctcaggctgagcaactgctgcaggatatcgaatctctgctgaccaagtaa

SEQ ID NO: 422445 - DNA, 1407 bp, Serratia marcescens
atgaccgcccagcagttcgtttcacctaatgaaatccgcgccagattctctcacgcgatgtcggacatgtatcaaaaggaggtgccgctgtacggcgatctgctggagctggtggcggaaaccaaccgacaggttctgcgcgaagatgccgcactggctcatcaactgcaaattaccggcgagatagaacgcctggcgatggagcgccacggcgccatccgggtcggcaccgcggacgagctggccaccctgcgccgcctgttccgggtgatgggcatggcgccggtcggttactatgacctgtcggtggcgggcgttccggtgcactccaccgcttttcgcgccgtacacgaagacgcgctgcagatcagccctttccgcgtgttcacctccctgctgcgcctggaactgatagaagatcccgcgctgcgtgcgctggccgagcgcttgctggcgcgccgccgcatctttaccgatcgcgcgctggagctgatcgcgctgcaggaagcgcaaggcgggctgaatgaagtgcaggcgcaagaatttgtcgaacaagcgctggaaaccttccgctggcacaaccaggcgacggtcagcgccgaagaataccggcagctgcacgatcagcatcgcctgatcgccgacgtggtggcgtttaaagggccgcatatcaaccatctgacaccgcgcacgctggatatcgatcgcgttcagcaggcgatgcccggccgcggcattacgcccaaggcggtcatcgagggcccgccgcgccgtcgtcgcgcgatcctgctgcgccaaaccagcttcaaggcgttggaagaacgcgtcgatttcgttgagcatgacggccgtgccgtcgccggccaccataccgcgcgcttcggcgagatcgaacagcgcggtgtggcgctgacgacgaaaggaagagaactctacgaccgtctgctgcaggccaccaacgatgcgctgcaagcgccgccgagcgagaagaatgccgagcgctactatcaactgctggaggaaaacttccgggcgtttccggatgattacgccacgctgcgcgagcaacagctggcctggttccgctatttcccgaccgaatgcggcctggcggccaaagagtcgctggataagcacagcactctggagcaactgatcgagaaagaacacgttcgcttccagccgctggtgtatgaagattttctgccggtcagcgccgcggggattttccagtcgaatctgggggacagccgccacgcgcagtacaacgccgcttccagccgggcagcgtttgaacaagcgttgggcagtgaggtgatcgacgagctggcgctatatcagcaaacccagcagcgttcgctggaagcctgcgcgcaagccctggggcttgccacgctgacatcctga

SEQ ID NO: 422446 - DNA, 210 bp, Serratia marcescens
atgtctaagaagactggtcaggttaagtggttcaacgaaagcaaaggttttggtttcattgagcagaacgacggcggcaaagatgtattcgtacacttctccgcaatcatgaccgacggtttcaagaccctggctgaaggccagcgcgtcgagtacaccatccaggacagcccgcgcgggccggctgccgccaacgtagttgctctgtaa

SEQ ID NO: 422447 - DNA, 222 bp, Serratia marcescens
atgtttaaaaatactgtgttaaaaatgggtcgcgtgaaatggtttaatcaggccgaaggctatggttttatttcaccggtagatggcagcgacgaaatctatgtcaatcgcaacgctatcgccaacaccaaaaataagtcgttgaacgaaggtcagaacgtcgagttctcgatctatcgcagctcacatgggctgtccgcggcagacgttatcgcgttctga

SEQ ID NO: 422448 - DNA, 1227 bp, Serratia marcescens
atgaccaccccgataatttcccttaccgccgctcgcgcgctgcaccttgccgcccaggggctgctttctccgcttaaacgccaggctcggcccgacgacgtcgtaaacgcgatccagcgcatggggctgttacaaatcgataccattagcgtcgtcgcccgcagcccgtatctggtgctgttcagccgtttgggggcctatcaaccggaatggctggagcaggcgctcgccggccgcaagctgttcgagtattgggcgcacgaagcctgtttcctgccgatcgaggattttggtctgctgcggcatcgcatgctggcgccgcatgatatgggctggaaatattccgccgactgggtgcagcagcaccaggcggcgatggacaacctgctgcggcacatcgaacagcaggggccggtgcgctccgccgatttcagcgccgagaagaaaggcaacagcggatggtgggactggaaaccggagaaacggcatctggagatcctgtttaccgccggcaagctgatggtggccgagcgtcgcaacttccaccgggtttacgatctgaccgaaaggctgctgccggcctgggacgatgcgcgtcatgcgctgcctgcggagcgggcgcgccggcaaatgttgcatcgcacctgccgctatctgggcattttccgcgccgaatggttggcggattactatcggctgaaacgcgtggcgccaaaaactttgctggcagagctgcaggatcagggggagatttcgccggtgcgggtagaggggctggaagggcagttctatgtgcatggctcactgacggaattgctgccgctggcggaacagggcaagctgaaatcgacggtcaccagcctgctgtcgccgtttgatccggtggtttgggatcgccgccgggcgctcgagctgttcaactttgactatcggctggagtgctatacgccgaaagaaaaacgccgctatggctacttcaccttgccggtgctgcatcggggtgaactggtggggcgcattgacgccaaggcgcaccgccgccagggggtgttcgagatcatcagctttcatgcggagccgcgggtgcgcttcggcaaacggcgggcccaagatattcggcaggccatcgcgcgtatggccaaatggcacggcgcgcaacgcgtcgcgctgggcgacattccggcggcgttggccgctgaatggggtgccggctgggaagtgggataa

SEQ ID NO: 422449 - DNA, 183 bp, Serratia marcescens
atggaccaccgtttactcgaaatcgttgcctgcccggtatgcaatggcaaactctatttcaataaagaaaaccaggaactggtgtgcaaagcggacgggttggcttacccgctgcgcgacggcattccggtgctgttggaaaatgaagcgcgtgcgctgtcgctggatgagaagcacgcatga

SEQ ID NO: 422450 - DNA, 750 bp, Serratia marcescens
atgagttttatcgctattattcccgcccgctacgcctcaacccgtttgccgggcaaaccgctggccgatattcacggcaagccgatggtggtgcacgtgatggagcgcgcccgcgagtccggcgccagccgcgtcatcgtggcgaccgatcaccctgaagtcgccaaagcggtggaagccgccggcggcgaagtgtgcatgaccagcccggatcaccattccggcaccgagcgtctggcggaagtgatcgcgcactacggctttgccgacgatcagatcatcgttaacgtgcagggcgacgaaccgctgatcccgccggtgatcgtgcgtcaggtggctgataatctggcaggcagccaggccggcatggcgacgctggcagtgccgatcgagagcgccgaagaggctttcaaccccaacgcggtgaaggtcgtgatggacgcgcagggctacgcgctctatttctctcgcgccaccattccgtgggatcgcgagcgtttcgccgcgtcgaaagagagcatcggcgacagcctgctgcgtcatatcggcatctacgcctatcgcgccggcttcgtgcgccgctacgtcagctgggcgccgagccaactggagcagatcgagctgttggaacagctgcgggtgctgtggtacggtgaaaaaatccacgtggcggtcgcgaaagcgatcccgagcgtgggggtcgatacgccggaagatctccagcgcgtgcgcgacagcattcaaccttga

SEQ ID NO: 422451 - DNA, 897 bp, Serratia marcescens
atggagcagttacgcgccgaactgagcattgtgctgggtgagtccatcagccggctggagcgggtgagcgagcagccttatgcgcatatgtattcgctgtacgatcggcagggcaacgcgatcccgctgatggcgaaaagctttatctgtcagggtatcgcccagcaggaggcgtacaagctgtcaatgctggcgcgcgacggggatattcgcctgcctacggtgtacggcgtggtgtgtacccaccaggcgccgtacaaggaaatcctgctgatcgagcgcctgcgcggcgtgtcggctgaagcgccgacgcgttcgccggatcgctggaatatgctgatggagcagatcgttgacgggatattggcctggcaccgcatcgacagccacggcagcgtcggcagcgttgacagcacgcaggagaacgactggttttgctggtatcaacagcgggtcgaagtgctgtgggcgacggtggtcaatctcaccaccccgcagctgaccatggcggatcgccgtttgctgtaccgcacgcgcgaagcgctgacccattttttcgtcggcttcgacgatccttgcgttctggtgcacggcaacctgtcgctgcgcagcatgctgaaagatcccaaaagcgatcaactgctggcgatgctcaatcccggcgtggtgctgtgggcgccacgcgaatacgatcttttccgcctgtgcgaggcgggtatgcccagccaactgctgttcagctatctgcggcgcgcgccggtcgccgacgcttttctggcgcggcgctggctgtacgtggtgtgggaagcggtggggcgtttgatccataccggcaagctggagcggcggccgttcgattatgcgtcgcaacagctgctgccctggctggccggttga

SEQ ID NO: 422452 - DNA, 774 bp, Serratia marcescens
atgctgttcaacctgaaaaagttctttggcgccatgctgatgccgctgccgctgttgatgctgctgatggggctggcgctgctgctgctgtggttcacccgctggcaaaaaagcggtaagacgattttcacgctgagctggctgtttttactgcttttcagcttgcaaccggtggccgaccggctgctgcggccgatcgaagccgaataccagacttatcgcggcaacgatccggtcagctacatcgtggtattgggcgggggctatacctacaatcccgattgggcgcccagctcgaacctgctcggcaacagtctgccgcgcgtgacggaaggcgtgcggctttatcttgcgcatcccggcgccaggatggtgtttaccggcgcgtccgccggacgcatgcaaagcaacgccgccacggcggcgctggtggccgaaagcctgggcgtgccacacagtgatatggtgatcctgggggaaccgcgcgataccgagcaagaggccgctcaggtcgccaagttggtcggcgagcaacccttcattctggtcacctccgccaaccatctgccgcgcgccatgcgtttcttcaaggccaagggcctgcacccgatcccggcgccggccaaccagttggcgatcgactcgccgctgaatatctgggatcgcgccacgccgtcgtcaatgttcctcggccataccgagcgcgcctggtatgaaacgctgggcagcctgtggcaatggctgaaaggcgcggaccgcgccggcgccgagtaa

SEQ ID NO: 422453 - DNA, 786 bp, Serratia marcescens
atgcaggatcgcaattttgacgatattgctgaaaaatttgcgcgtaatatttacggcaccacgaaaggaaaaatccgccaggcggtggtttggcaggatctgaccgggctgctggcgcagttgccgcagcggccgctgcgcatcctcgacgccgggggcggtgaaggccatatggcctgccaactggcagaattaggacatcaggtgttgttgtgcgatctttctggtgagatgatccagcgcgccgcgcagctggcggagcagaaaggtgtgagccagaacatgcaattcgtacaaagttctgcgcaggatatcgctcaacatttggaacagccggttgatctgatattgtttcatgcagtgcttgaatggattgccgagcccgaagcggcgctgcgggcgttgtatgactgcctgacgccgggcggcgcgctgtcgctgatgtttttcaacgccaacggcctcttgatgcgcaacgtggtgttgggtaatttccaactggtggatcccgaggtcaggcggcgccgcaagcgttcgctgtcgccgcaatatccgcacgatccgctattggtctacggttggctggaacagctgggcatgcgcatcagcggcaaaaccggggtgcgggtgttccacgactatctgcagagcagacagctgcaaacacaaaaatttgaagagttactggcgcttgaacagcactattgccggcaggagccgtacgtgagtttggggcgctatattcacgtcatggcgcataaaccaaacctgaaggacgaactatga

SEQ ID NO: 422454 - DNA, 1323 bp, Serratia marcescens
atgagtgaattttcccagacagtacccgaactggtcgcctgggcacggaaaaatgatttctctatttcgctccctactgagcgtctcgcatttttgctcgccatcgccaccctgaacggcgaacggctggacggcgagatgagcgaaggtgagctggttgatgcatttcgccatgtcagcaagggttttgaacagacgcatgaaacggtggcgatgcgcgccaacaatgcgatcaacgacatggtgcgccagcgcctgttgaaccgctttaccagcgaactggcggacggtaacgcgatttaccgcctcacgccgctgggcatcggcattaccgattactatattcgccaacgcgaattctccacgctgcgtctgtcgatgcagctgtcgatcgtggcgcaggagctcaagcgcgccgccgacgccgccgacgagggcggcgacgatttccattggcaccgcaacgtgttcgcgccgttgaaatattcggtggcggaaatcttcgacagcatcgacatgacccaacgcgtgatggacgagcagcagcagagcgtgaaaaatgacatcgcggcgctgctgagcaaagactggcgggcggcgatctccagctgtgaaatgctgctgtcggaaacctcgggcaccctgcgcgagctgcaggatacgctggatgcggcgggcgacaagctgcaggccaacctgctgcgcatccaggacgccaccctcggcaacgtggagctgggcttcgtcgacaagctggtgttcgatctgcaaagcaagctggatcgcatcatcagctggggccagcaggcgattgacctgtggatcggctacgatcgccacgtgcataaatttatccgtaccgctatcgatatggataaaaaccgcgtgttcgcccaacgcctgcgccagtcggtgcaaacctatttcgaccacccgtgggcgctgacccatgccaatgccgatcgtctgctggatatgcgcgacgaagaactggcgttgcgcagcgaggaagtgaccggggaactgccgccggatctggagttcgaagagttcagcgaaattcgcgaacagctggcggcgatgatcgaagaggcactgaaggtgtatcaggaacagcagatgccgctcaaccttgcagcggtgatgcgcgattatctggcgcaatatccgcgtgcgcgtcatttcgacgtggcacgtttagtggtcgaccaggcagtgcgcctcggtgtggctgaagcagatttctcagggttgccggcggaatggcaggcaatcaatgattacggagccaaggtccaggcccatgtcatcgacaaatattga

SEQ ID NO: 422455 - DNA, 729 bp, Serratia marcescens
atgtcatcgacaaatattgaacaagtaatgccagtcaagctggccaaggcactgtccaactcgctgttcccggcgctggacagccaactgcgcgcgggtcgtcacatcggtatcgatgagctggacaaccatgcctttttaatggatttccaggatgagctggaagaattttacacccgttacagcgtcgagctgattcgggcgccggaaggtttcttctatttgcgcccgcgctctaccacgctgatcccgcgctcggtgctgtccgagctggatatgatggtgggtaagatcttgtgctacctgtacctcagccccgagcgcctggcgcacgaaggcattttcagccatcaggagctgtacgacgagctgctgagcctggccgatgagaacaagctgctgaagttcgttaatcagcgctccaccggttcggatctcgatcggcagaagctgcacgaaaaggtgcgcacctcgctgaaccgcctgcgccgccttggcatggtctacttcatgggcaatgacagcagcaagttccgcattaccgaggcggtgttccgcttcggcgccgacgtgcgcagcggcgacgatccgcgtgaagcgcagctgcgcatgattcgcgacggcgaggcgatgccggttgaaaccagcctgtcgctgaacgatgagaatgaggctgaggatcagcaggttgataacgctcctgacggtgcagaggatgaacaggaatga

SEQ ID NO: 422456 - DNA, 4449 bp, Serratia marcescens
atgattgaacgcggtaaatttcgctcgctgacgctggttaactggaacggcttctttgcccgcacctttgatctggatgagctggtgaccacgctgtccggcggtaacggggcagggaaatccaccaccatggcggctttcgtcaccgcactgatccccgatctgacgctgctgcacttccgtaacaccaccgaagcgggcgccaccagcggttcgcgcgataaaggcctgcacggcaagctgcgcgccggcgtgtgctactccaccctcgacgtcgtcaactcgcgccaccagcgcgtggtggtcggcgtgcgtctgcagcaggtggcggggcgcgatcgcaaggtcgacatcaaaccgttcaccatccagggcctgccgactgcggtacagccgaccgagctactgacccagaccgtgggtgagcgccaggcgcgcgtgctgtcgctgcaggaactgaaggatcgcgtggaagagatggagggcgtgcagttcaagcagtttaactccatcaccgattaccactcgctgatgttcgatctgggcgtgatcccgaaacgcctgcgttcgtccgccgatcgcagcaaattctaccgtctgattgaagcgtcgctgtacggcggtatctcaagcgccatcacccgctcgctgcgcgattacctgctgccggaaaacagcggcgtgcgcaaggcgttccaggatatggaagcggcgctgcgcgaaaaccgcatgacgctggaagcgatccgcgtcacccagtcggatcgcgatctgttcaagcatttgatctccgaggccacttcctatgtggcggcggactatatgcgccacgccaacgaacgccgcatccatctggacggcgcgctggcgctgcgcagcgatctgttgggcagccgcaagcagctggccgccgaacagtatcgccatgtggaaatggcgcgcgagctgagcgaacagagcggtgccgaatccgatctggaaaccgattaccaggccgccagcgaccacctgaatctggtgcagacggcgatgcgtcagcaggagaagatcgagcgctatgaagccgatctggaagagctgacctaccgtctggaagagcagaacgaagtggtggccgaggcgagcgagcaacaggccgaaaatgaagcgcgcgccgaagcggccgagctggaagtggatgagctgaagagccagctggccgactaccagcaggcgctcgacgtgcagcagacccgcgccattcagtatcagcaggcgctgcaggcgctggagcgcgcacgcgcgctgtgccaactgccggatctgaccgccgataacgccgaacagtggctggataccttccaggcccgcgagcaggaggcgaccgaagcgctgctgatgctggaacagaagctgagcgtggccgacgccgcgcacagccagttcgaacaggcctatcagctggtggggaaaatcgccggccaggtcagccgcagcgaagcctggcagtgcgcgcgcgaattgctgcgcgactggccttcgcagcagcacctcgccgagcgcgttcagccgttgcgcctgcgcctaagcgaactggaacagcgcctgcgctcgcagcaggacgccgagcgcctgttgcaagagttttgcaaacgccatggccaagagtaccagccggacgatcttgacatgctgcagcaggagctggaagagcgcctggaagcgctgtcgcagaacgtcagcgaagccggcgaacgccgcatggagatgcgccaggagctggagcagatccagcagcgcatccgtgagctgacggcgcgcgcgccggtgtggctggcggcgcaggacgctctgagccagctcagcgatcagagcggagagccgctggaaaacagccagcaggtgaccgaatacatgcagcagctgctggagcgcgagcgtgaaaccaccgtcgagcgcgacgaagtggcggcccgcaaacgtgaagtggaagcgcagatcgaacgtctcagccagccgggcggcgcggaagatcaacgcctggtcacgctggccgaacgtttcggcggcgtgttgctgtcggaaatctacgatgacgtcaccatcgacgacgcgccttacttctcggcgctgtacggcccttcgcgccacgccatcgtggtgccggatctgtcgctggtgcgcgagatgctggaagggctggaagattgcccggaagatctttacctgatcgaaggggatccgcagtcgttcgatgacagcgtattcgccgtcgaagagcaggaaaaagcggtggtggtgaaaatcgccgatcgccagtggcgttattcccgctacccggaagtgccgttgttcggccgcgcggcgcgcgaaaatcgcctggaagtgctgcatgccgagcgtgaaacgctggcggagcgctacgccacgctgtcgttcgacgtgcagaaaacccagcgctcgcaccaggctttcagccgctttatcggcacccatctggcggtggcgttcgacgccgacccggaagcggagatccgcggcctgaacgcccgccgtggcgaaatcgaacgcgcgctgaacaatcacgaagcgcagaaccagcagcagcgtcagcagtacgatcaggccaaagagggcatttccgcgctcaaccgcctgatgccgctggtgtcgttgctgaacgatgaaacgttgcaggaccgcgtcgacgagatgcgcgaagagctggaagaagcgcaggacgccgcgcgtcatattcagcagcacggcgtgtcgctggccaagctggagccgctgctgtcggtgctgcagagcgatccgcagcagcatgaacagctgcagcaggattacgcgcaggcgcaaagcgtgcagcgtcaggcgaaacagcaggcgttcgcgctcactgaagtggtgcagcgtcgcgcgcacttcagctataccgactccgccggcatgcagaacgccaacaacgatctcaacgacaagctgcgccagcgtctggagcaggcggaagccgaacgcgcccgcgcccgtgagcagctgcgtcagtatcaaacccagttcacccagtacagtcaggtgctggcttcgctgaaaagctcgtacgacgccaagcgcgacatgctgaaagagctgagccaggagctggtggacatcggcgtgcaggccgacgccaatgccgaagcgcgcgcccgcgcgcgtcgcgacgaactgcatgcggcgctgagcaacaaccgcgctcgccgcaatcagctggagaaacagctgaccttctgcgaagccgaaatggacggcctgcagaagaaactgcgcaagctggaacgcgattatcatcagctgcgcgagcaggtggtgaccgccaaggcgggctggtgcgcggtgatgcgcctggtgaaagacaacggcgtggaacgccgcctgcaccgccgcgagctggcgtatatggatggcgacgagctgcgctcgatgtcggataaggcgctcggcgcgctgcgtctggcggtggcggataacgaacacctgcgcgacgtgctgcgcctgtcggaagatccgaagcggccggagcgtaagattcagttctatatcgcggtgtaccagcacctgcgcgagcgcatccgtcaggacatcatccgcaccgacgatccggtcgaggccatcgaacagatggaaatcgagctgggccgtctgaccgaagagctgaccgcgcgcgagcagaagctggcgatcagttcgaaaagcgtggccaacatcattcgcaaaaccattcagcgcgaacagaaccgcattcgcatgctgaaccaggggctgcaggccgtttccttcggccaggtgaaaagcgtgcggctgaacgtcaatgtgcgcgaagcgcacgccactctgctggacgtgctctccgagcagcaggaacagcatcaggatctgttcaacagcaaccgcctgaccttctccgaagcgttggccaaactgtatcaacgcctgaatccgcagatcgacatggggcagcgcacgccgcagaccatcggcgaggagttgctggactaccgcaactacctggagatggaagtggaggtataccgtggctccgacggctggctgcgtgcggaaagcggcgcgttgtctaccggtgaagccatcggtaccgggatgtcaatcctggtgatggtggtgcagagctgggaagaagaatcccgtcgcctgcgcggcaaagacatctcgccgtgccgcctgctgttcctcgatgaagcggcgcgtctggatgccaagtcgatcgctacgctgtttgagctgtgcgaccgtctggagatgcagctgatcatcgcggcgccggaaaacatcagcccggagaagggcaccacctataaactggtgcgtaaggtgttccagaaccacgagcatgtgcacgtggtggggctacgcggtttcgccggcgagccaccggcgctgggcactgcgccggttgaaacgccgtaa

SEQ ID NO: 422457 - DNA, 1809 bp, Serratia marcescens
atgttgcttaaaaagggaaactctctacgacgtttggcgctgagtggcgctatcgcctgtagtcttgtgtcgtcgttttccgcatcggccaccgtcccggcgttgccggtggcatcagcaggcatgtccgttgcgcagagccgttctgaactgctggccgcgttgccgcgcggcatggatttgcactacctgtccacgctggcgccgctgtatgcggcgaatcacatgcagccgatgtggcaggatcgcgaagccgttcagcaatttcagcagcagctggccgagctggcgatgtccggcgtgcagccgcagttcacccaatgggtgaagatgttgaccgatccggcgctcagtgaagcgggccgcgatgcggtgctgtccgatgcgatgctgggctatttgcagttcgtctccgccatcggtgccaacggcaacaactggctgtacagcaatattccctacaagcttggcttgccgcccaccgcggtgatcaaccaatggcagctggcggtgcgccaggcgcgtactctgagctacgtgaattcgctcgcgccgcagcatccgcaatacgccaagatgcatcaggcgctgcgcgacatgctggcggataatcgtccctggccgcaggtgggcagcggcccgagcctgcgtccaggccagatgagcaatgatattccggcgctgcgtgagatcctgacgcgcaccggtatgctcgccgccgcggcgccggaagcggagccggaaccggcggtggtttcggcgaagatcaatgagcccgacgacggcgggctgacggtagacgaagagaaaagccgcgtgacggtcagcccatcggcagcgccggtgacggagctgaccgcggaacagacgccgccgcagattggcagcgtggtgagcgataacctctataccgacgaactggtggagggcgtcaagcgcttccagaaatggcaagggctgacggcggatggcgtgatcggcgtgcgcacccgcgagtggctcaacgtgtcaccgaaaacccgcgccgcgctgctggcgctgaatatccagcgcctgcggatcctgccggggcatgtcggcaccggcatcatggtgaacattcccaactactcgctgacctactaccagaacggcaatgaggtgctgtcttcccgcgttatcgtcgggcggccgagccgcaagacgccgctgatgagcagcgcgttgaacaacgtggtggtcaacccgccgtggaacgtgccgactaccctggtgcgtgaggacatcgtgccgaaggcgatgcgtgacggtaactacttccagaaacacggctataccgtgctgtcgggctggagcaacgatgcggaagtgatcaacccggcgatgatcgactggagcatggtctctgcgcgcaacttcccgtatcgcgtgcgtcaggcgccgggcgcgaccaactcgctggggcgcttcaagttcaatatgccgagctcggacgccatctacctgcacgataccccgaaccacagcctgttccagaaagacatccgcgcgctcagctccggctgcgtgcgggtgaacaaggcttccgatttggcgaatatgctgctgcaggacgccggctggaacaacagccgcgtgtcttccacgctgaaagaagggaataccacttatgtgaatattcgccagcgtattcccgtaaaactgtattatctgaccgcctgggtttcggatgacggccaaccgcaattccgtacagatatttacaattatgataatacggtgcgatcgggcgcacaaattttggctcaggccaaaaaattaatgcagtaa

SEQ ID NO: 422458 - DNA, 495 bp, Serratia marcescens
atgggcatagcgctgcttccagggcaggcgtttgccagtatttccaccgctcgaccgcgtattttagtgttgaataacctgaataccggtgaatctattaaagccgagttctttgacggcaaaggttacaataaagaagagttggtgcggctaaatcatctgttccgcgattatcgcgccaacaaggttaaatcgatcgatccccgcttgtttgatcacctctatcgtctgcaggggctgctgggcaccagcaagccggtgcagctgatctctggataccgttccgtagacaccaacaacgaactgcgtgcgcatagccgcggcgtggccaagcacagctaccacaccaaaggccaggcgatggatttccacatcgaaggtatccaattgagcaatatccgcaaagcggcgttaaaaatgcgcgccggtggtgtaggatattacccacgtagcaacttcgtacacatcgataccggcccggttcggacctggtaa

SEQ ID NO: 422459 - DNA, 648 bp, Serratia marcescens
atgaaataccatcttattcccgttaccgcctttagccagaactgcagtctgatttggtgtgaaaacacgcagcaggcggcgttggtcgatcccggcggtgaagcggaaaaaatcaaagcggaagtcgcgcggcagggggtgacggtcacccagattttgctgacgcacggccatttggatcatgtcggcgcggcggcggagctggcggaccattatcaggtgccaatctatggcccggataaagaagacgcgttttggctggacggtttgccggcgcagagccggatgtttgggctggaagagtgcgcgccgctgacgccgacccgctggctgtcggaaggcgatgagatgcaggtgggcgagatgacgctcaaggtgttgcattgccctgggcacacgccgggccacatcgtctttatcaatgagcaggcgcgtttggcgctggtgggcgacgtgctgtttaacggcggcgtggggcgcagcgacttcccgcgcggtgaccatcaggcgctgatcgcctctattcgcaccaaactgctgccgttgggcgacgacatgcgctttattcccggccacggcccgatgtcgaccttcggccacgagcgccagaccaacccgttcctgcgcgaagagccggcggtgtggtaa

SEQ ID NO: 422460 - DNA, 1191 bp, Serratia marcescens
atgtttgaaaaaatcaccgccgcacccgccgacccgatcctgggcctgaccgacattttccgcgccgacgcccgcccgaataaaatcaatttagggattggcgtttataaagacgaaactggcaaaacgccggtgctgaccagcgtaaaaaaagctgaacagtatctgctggaaaacgagaccaccaaaaactatctcggcattgaaggcatcccggcgttcgccagctgcacgcaagagctgctgttcggcaaagagagcccgatcgttaccgcgcggcgcgcgcgtaccgcacagacgcccggcggcaccggcggcctgcgcgtggcggcagactttatcgccaaccagaccagcgccaagcgcatctggatcagcaacccaagctggccaaaccacaagaacgtctttagcgccgtgggcctggaagtgctggagtacgcctactacgacgccgccaaccacgcgttggactttgacggcctgctgaacagcctgaaacaggcgcaggccggtgatgtggtgctgttccacggctgctgccataacccgaccggtatcgatccaacggcggaacagtgggcacagctggctgagctttccgtcgccaatggctggctgccgctgttcgatttcgcctaccagggcttcgccaacggtctggaagaagatgcgcagggcctgcgtattttcgccgccaaacatcaagagctgatcgttgccagctcctactcgaaaaacttcggcctgtacaatgagcgcgtcggcgcttgcacccttgtggctgccgatgccgaaaccgccgatcgcgccttcagccaggtgaaagcggccattcgcgccaactactccaacccgccgtcacacggcgcggcggttgtcgccaccattctgggcaacgatgcgctgcgcgcgatgtgggagcaggaactgaccgacatgcgccagcgtattcaccgcatgcgtcagctgttcgtgaacaccctgcaggagaaaggcgcgcagcaggacttcagcttcatcatccaacagaacggcatgttctcgttcagcggcctgaccaaagaacaggtgctgcgtctgcgcgaagagttcggcgtctacgccgtgaactcgggccgggtgaacgtggccggcatgacgccggacaacatggcgccgctgtgtgaagccatcgtcgccgtgctctaa

SEQ ID NO: 422461 - DNA, 1128 bp, Serratia marcescens
atgatgaagcgcaacattcttgcagtggttatcccggctctgttggctgctggtgcagcaaacgcagctgaaatctacaacaaagacggcaacaagctggatctgtacggcaaagttgacggtctgcactacttctccgacgacaaaggcaatgacggcgatcagacctatgttcgtttcggcttcaaaggtgaaacccagattactgaccaactgaccggttacggccagtgggaatacaacgttcagtccaaccacgccgaatctcagggcaccgaaggcaccaaaacccgtctgggcttcgccggtctgaaattcgctgactacggctccttcgactacggccgtaactacggcgtactgtacgacgtggaaggctggaccgatatgctgccagagttcggtggcgatacttacacctactccgacaacttcatgaccggccgtaccaacggcgttgcgacctatcgtaacaacaacttcttcggtctggttgacggtctgaacttcgctctgcaataccagggcaaaaaccagaacgacggtcgtaacgttaagaaacaaaacggcgacggctggggtatctcctctacttatgacatcggcgaaggcgtaagcttcggcgctgcatacgcttcttccaaccgtaccgacgaccagaaactgcgttccaacgagcgtggcgacaaggctgacgcatggaccgtgggcgcgaaatacgatgccaacaacgtttacctggcggcgatgtacgcagaaacccgtaacatgactccgttcggcggcggtaacttcggtgcaggctgtgcagctaccgatgacaagtgcggtggcttcgcgagcaaaactcagaacttcgaagtcactgctcagtaccagttcgacttcggtctgcgtccagaagtgtcttacctgcagtctaaaggcaagaacctgaacgtcccaggcgtaagctctgaccaggatctggttaaatatgtttctgttggtaccacttactacttcaacaaaaacatgtccacctacgttgattacaaaatcaacctgctggatgacaacgagttcaccaaagcaaccggcaccgctaccgacgatatcgtagccgttggtctggtgtaccagttctaa

SEQ ID NO: 422462 - DNA, 1401 bp, Serratia marcescens
atgagcgtagtgcctgtagtcgacgtactgcaaggtcgtgctgcggttgacagtgaagtcaccgtacgcggctgggtacgtacccggagagattcaaaagctggtatctccttcctggccgtctatgacggttcctgctttgatccgttacaggccgtcgttaataattctctgccgaattatcaggatgaagtgctgcacctgaccaccggttgctcagttgaagttaccggcaaggtcgtcgcctcaccgggcgaaggccagagcttcgagctgcaggccaccgcgatcaacgtggtcggctgggtcgacgatccggatacttacccaatggcggccaaacgccacagcatcgaatacctgcgcgaagtggcccacctgcgcccgcgcaccaatctgatcggcgccgtggcgcgcgtgcgtcataccctggcgcaggcgatccaccgcttcttccatgaaaatggttatttctgggtgtccactccgctgatcaccgcctccgacaccgaaggcgccggcgaaatgttccgcgtgtccacgctggatctggaaaacctgccgcgcaccgacaagggcgccgtcgatttcagccaggacttcttcggtaaggaagccttcctcaccgtttccggccagctgaacggcgaaacttacgcctgtgcgctgtccaaggtatacaccttcggcccaaccttccgtgccgaaaactccaacaccagccgccacctggcggagttctggatgatcgagccggaagtggccttcgcgacgctggacgatgtcgccggcctggccgaaagcatgctgaagtatgtgttccaggcggtgctggatgaacgagcagacgatctgaaattcttcgccgagcgcgtggataaagacgcaatctctcgtctggagcgcttcgtctcttccgatttcgcccaggtggactacaccgacgccattgagatcctgctggcctctggccaaaccttcgaaaacccggtttcctggggcatcgatctctcttccgaacatgagcgttatctggcggagaaacacttccaggcgccggtggtggtgaagaactacccgaaagacatcaaagcgttctatatgcgcatgaacgaagacggtaaaaccgtcgcggccatggacgtgctggcgccgggcatcggtgaaatcatcggcggttcgcagcgtgaagaacgcctcgacatgctcgatcaacgtctggaagagatgggcctgaataaagaagactactggtggtatcgcgatctgcgtcgttacggcaccgtgccgcattccggtttcggcctgggttttgaacgtttaatcgcctatgtcaccggcgtgcaaaacgtgcgcgatgtgatcccgttcccacgcacaccacgtaacgcaagcttctaa

SEQ ID NO: 422463 - DNA, 1206 bp, Serratia marcescens
atgactcaatacgcttccccgattttgacatcactgcttgataccgatgcttataagcttcatatgcagcaagcagtgttccatcgctatcccgcgatcagcgtggcggcggaattccgctgccgcggcgacgaactgctgggcgaatatgccgacgagatccgcgcgcaggtggcgttgatgagccggctggcgctgaccgatgccgaattcgcttatctttcgggcctgcccttcttccgtcaggattacctgaactggctgcgaacgttccgctacgatccgcagcaggtcaccatagacaaccgcgacggcaagctgcaaatccgcatcgccggcccctggcgtgaagtgatcatgtgggaagtgccgttgctggcggtgatcagcgaagtggtgcaccgtcggcgctctccgctggcgacgccggaacaggcggtggcgcatctgcaaaccaagctggctcagttcaagacgctggcgggcgatctggatctttcgcgcttcaagctgatggacttcggcacccgtcgccgtttctctcaaggcgtgcaacaggccatcgtcagcaccttgcaggccgaattcccgtacctgtcgggcaccagcaattacgatctggcgcatcagctcggcctggcgccggtcggcactcaagcgcatgagtggttccaggcgcatcaacaaataagcccggtgctggccaacagccagcgcgccgccttgcaagcctggttggatgaatacccggatcagcttggcatcgcgctcaccgactgtatcaccatggatgccttcctgcgcgacttcggcccgcagttcgccgaacgttatcaggggctgcgccacgattcgggcgatcccgtcgagtggggtgaaaaggccattgcccattatcaaaagctgggcatcgatccgatgagcaaaacgctggtgttctcggacaacctggatctggaaaaagcgctggcgctctatcgccatttctaccagcgcatcaatctcggcttcggcatcggcacgcgcctgacctgcgatattcccggcgtcaaaccgctgaatatcgtgatcaagctggtcgagtgcaaaggcaagccggtggccaagctctccgacagccccggcaaaaccatttgccaggatcaggcgttcgtcagggctctgcgcaaggccttcgatctgccgctggtgaagaaagccagctga

SEQ ID NO: 422464 - DNA, 1701 bp, Serratia marcescens
atgaaaattaaatacgcaatctatttttttaccctgtgcctgatgacttccttctctctgttcatcgtcgatgagctgctcgaagcccataccgactaccgcgataaccaactcaatctgtacaaaattgatcgcgccaaagaaatctccgaagcctttcaggctgccttgcaggcgcaccgcctcaaacgcttgagcctgatcgatccgcaaatcacccgagcgcaatgtttggccgccgattgggcggcgcgcgaaagaattacccgcatccgcgaacatctggacgatgaggtcgccagacagctcggggttcggcaaaaaatcgccgcgctgtcgatgatcagcctgatggaacagctgctggataatgacaacctgcagctttcgcaggtcaataacaccaacgccaatctgttcaacatcaacagcgcctattacatctcgcaaaccagtaagagctattaccgctacacctacgatacccggatggtggataccgactcttttatgtttctcgaggccatccgccttaataaccggctgaatatgtcactgacggaattgagcgatcagattatcgacgtcaacgtcagaccgctcgttcgcaaagacgcctacctgaagtccattcagctgaccggcgtgctgaacgcgctgagcacccgattgatcttcatgaagatcaactacgacgatggacaaatcaccaacatcgtcaatgcattgctcgcccaggtttccgctgagcgcctccaacagattacccatgggctgtacaccgctatcgatacccatcagccctaccccaccgcgcttatttcgcgctatgtcgacgatgtgagcgggctgtcgcaggcgctgtatcaacgcagcttcgaactggaaaccctcgcgtcgcgccacaagatttacgacagccagacgaccatttacggcatgattgcactcgccgggctggtggtgttgctgttcattttgccggcgctggtgttctgcaccagcatcaaccgctggctgaccaagacccacaacaatatcgtgcggctgtcgcgcggcgagataaatatcgatcgcaacgacgccttctacagccaggaattgatcgccatcagcgacgccattcagcagctcaggcaataccagttggacaaggtctcgctggaaagcgagaaacaactgctgattaaagagctcgaggcctcttctttcctcgatccgcttaccaatatttacaaccgccgtaaattcttccttgaatgtcagctgctgggcgacggcagctacccgcaggccttttgcctgatcgacatcgacaacttcaaacagctcaacgacagctatggccacgacgtgggcgaccgggcgctggtggcattcggccacctgctgcaacgcgcgttccgcgccagcgacatcttctgccgctacggcggcgaagagttcgcggtgctgctgggcaactgttcgttggacaacgcgcgggacatcatggagcaattgcgcgcccgcactcatcgcctgacgctaaatctggccgatggacggcaagtgcgttttaccaccagctgcggcattgcgccggtcaacgcattcaccgcgctgcaggcggcgatcaaacaggcggacgaagcgctctatttttgcaaaaagaacggcaaggatcgggtcagcgtgcatacccaggccggctatatctga

SEQ ID NO: 422465 - DNA, 2619 bp, Serratia marcescens
atgacacaacagccacaggcaaaataccgccacgattatcgcgcgcccgattacaccacgaccgatatcgatttggacttcagtctggacgcggaaactacgcgcgtgaccgccgtcagtaaaatcaaacgtcagggcgcggccggcgcaccgctggtgctggatggcgaagatctgacgctggtgagcattcaggtggacggccaaccgtggagcgcctaccgccagcaggataaccagctgatcatcgaagcgttgccggcacaattcactcttaccatcgtcaacgacattcacccggcgaaaaacaccgcgctggaagggctgtacctgtccggcgatgcgctgtgcacgcaatgcgaagccgaaggtttccaccacattacctattatcaggatcgcccggacgtgctggcgcgctttaccacccgcatcgaggccgacaaggcgcgctatccgttcctgctgtcgaacggcaaccgcatcggccagggcgaattggccgatggccgccactgggtgcaatggcaggatccgttcccgaaaccttgctacctgttcgcgctggtggcgggagacttcgacgtgctgcgcgacagcttcaccacccgttccggccgtaaggtcgcgctggagctgttcgtcgatcgcggcaacctggatcgcgccgactgggcgatgacgtcgctgaagaactcgatgaagtgggacgagacccgcttcggcctggaatacgatctcgacatttatatgattgtggcggtcgatttcttcaatatgggcgcgatggagaacaaagggttaaacatctttaactccaaatacgtgctggcgaaggcggaaaccgccaccgacaaggattacctgaacattgaagcggtgatcggccacgaatacttccacaactggaccggtaaccgcgtaacctgccgcgactggttccagctcagcctgaaagaggggctgacggtgttccgcgaccaggagttcagttccgatctgggatcgcgttcggtcaaccgcatcgacaacgtgcgcgtgatgcgcggcgcgcagttcgccgaagacgccagcccgatggcacacgccatccgcccggacaaagtgatcgagatgaacaacttctacaccctgacggtgtatgaaaagggttccgaagtgatccgcatgatgcacaccttgctgggggaggagaacttccagaaagggatgcagctctatttcgaacgccacgacggcagcgccgccacctgcgacgatttcgtgcaggcgatggaggacgcgtccaacgtcgatctgtcgcgtttccgccgttggtatagccagtccggcacgccgctgttgacggtgcgcgacgattacgacgcggaaacccagcagtatcgtctgcatgtcagccagcaaaccgcgccgaccgccgatcagccggagaaattgccgctgcatatcccgctggatatcgaactgtacgacagcgaaggcaacgtcattccactgcaaaagggcggcctgccggtcaataacgtgctgaacgttaccgaagcggagcaaaccttcgtgttcgacggcgtggcgcataagccggtgccgtcgctgctgcgcgaattctccgcgccggtgaagctggactatccgtacagcgatcagcagctgaccttcctgatgcagcacgcgcgcaatgaatttgcgcgttgggatgcggcgcagagcctgctggcgacctatatcaagctgaacgtggcgcggcaccagcagaagcagccgctgtcgctgccgctgcacgtggccgatgcgttccgcgcagtgctgttggacgaaaaactggatccggcgctggcggcgcagatcctgacgttgccgtcggagaacgaaatcgccgagctgttcgccaccatcgatccggaagcgatcgccgcggtgcatgaagcgatcgttcgctgcctggcgcgggagctggccgatgagtggctggcggtatatcacgccaacaagaccgacggctaccgcgtggagcacgccgagatcgccaagcgcgccttgcgtaatgtgtgcctgggctatctggcgttcggcgaagatgtggcgctggcggatcagctggtgagcgaacagtatcgccaggcggacaacatgaccgactcgctggcggcgctgtctgctgcggtcgcggcccagctgccgtgccgcgatgcgctgctggcggcgttcgacgaacgctggcatcaggatggcctggtgatggataaatggttcgtgctgcagggcagcagcccggcggcagacgtgctgagcaaggtgcgcgcgctgctgcaacaccgttcgttcagcctgagcaacccgaaccgcacccgttcgctgatcggcggcttcgcttccggcaacccggcggcgttccatgccgcggacggcagcggctatcagttcctggcggagatcctcagcgatctcaaccagcgcaacccgcagatcgccgcgcgcctgattgaaccgctgattcgcctgaagcgttacgacgcgggccgccaggcgctgatgcgcaaggcgctggaacagctgaaaggattggaaaacctgtccggcgatctgtacgagaagatcagcaaggcgctcgacgcctga

SEQ ID NO: 422466 - DNA, 774 bp, Serratia marcescens
atgacccttcccgctcgccttgcgcaaggcacgccggtgacgctggagtccatcggcaaaggttacggcaaccgcaccgtgctggacaatattcagctgcgcatttccgccgggcagttcgtggcggtggtcggccgcagcggctgcggcaagagcaccctgcttcgcctgttggccggcctggaacaacccagcagcggcgcgctgctcagcggcaacgcgccgcttgccgccgctaaagaggatacccggctgatgtttcaggatgcgcgcctgctgccgtggaaaacggtgatcgacaacgtgggcctggggctgcgcggccagtggcgcgatgcggcgctgcaggcgctggacgcggtcggcttggcggatcgcgcccgcgactggccggcggcgctgtccggcgggcaaaagcagcgggtcgccctggcgcgcgcgctgatccaccgccctcgcctgctgctgctggacgaaccgctcggggcgttggatgccctgacgcgcatcgagatgcaggggctgatagaaacgctgtggcaacagcacggttttaccatactgctggtcacgcacgacgtcagcgaagccatcgcgctggcggatcgggtgatcctgattgaagagggccgcatcgggctggatctgactctcgatctgccgcggccgcgccgcaaaggctcggcccggctagcggaactggaggccgaagtgctggagcgggtgttatcaccgccggccacagcggccagcggccgtcgggcggcgaattga

SEQ ID NO: 422467 - DNA, 795 bp, Serratia marcescens
atggcaaagaacgcgcaacgcatcctgtatcggctggccccctgggcgctgccgctggcgctggtgatcctctggcagatcgccgtagaaaccggctggctgtccaaccgcattttgccggcgccgagcgcggtgctggccgccttctggagcctgagccaaagcggcgaactgtggcagcacctgagcatcagcagccagcgcgcgctgatcggctttgccatcggcggcagcatcgggctgatcctcggctttattaccgggctgtcgcgctggggcgaacgcctgctggacagctcggtgcaaatgatccgcaacgtgccgcacctggcgctgatcccgctggtgatcctgtggttcggcatcgatgaatccgccaagatctttctggtggcgctcggtacgctattcccgatttatctcaatacctatcacggcatcaagaacatcgatcgcggcctgttggagatggcccgcagctacggcctgagcggtttccgcctgtttacgcaggtggtgctgccgggcgcgctgccgtcgattatggtcggcgtgcgtttcgctctcggcttcatgtggctgacgctgatcgtcgccgaaaccatttcggccaattcgggcatcggctacctggcgatgaacgcgcgtgaattcctgcaaaccgacgtggtggtggtggcgatcgtgctgtacgccctgctcggcaagctggcggacgtgggcgcacagctgctggagcgcgtctggttgcgctggcatccggcctatcaactgaaacagggagaagcgctatga

SEQ ID NO: 422468 - DNA, 1149 bp, Serratia marcescens
atgagcctgaacgttttctggtttttacccacccacggcgatggccactatctcggcagcgcacagggggcgcgcagcgtcgatcacggttacttgcagcagatcgcccaggcggcggatcggctgggattcggcggcgtattgatccccaccggccgctcgtgcgaagactcctggctggtggccgcctcgctgatcccggtcacccagcggctgaagtttttggtcgcgctgcggccgggcatcatctcccctacgctggcggcgcgccaggcggcgacgctggatcgcctgtccaacgggcgcgcgctgttcaatctggtcaccggcggcgatccggaagagctggcggcggaggggttgcatctcaatcatgaagagcgctacgaagcctcaaccgagttcacccacatctggcgccgggtgctggaaggcgaaaccgtcgatttcgacggcaagcacattcaggtgaaaggcgccaaactgctgttcccgccggtgcagcagccgcgcccgccgctctatttcggcggatcctccgccgccgcgcaggatctggccgccgaacaggtagaaatgtatctcacctggggagagccgccggcgcaggttaaagagaaaatcgaagaggtgcgcgccaaagcggcggcgaaaggccgccaggtacgcttcggtatccgcctgcatgtcatcgtgcgggaaaccaccgaagaggcctggcgcgccgccgatcggctgatcgctcacctcgatgaggaaaccatcgccgacgcgcagcaggcctttgcgcgcttcgattccgtcggccaacggcgcatggcggcgctgcacggcggcaagaaggacaacctggagatcagcccgaacctgtgggccggcatcggcctggtgcgcggcggcgccggcaccgcgctggtgggcgatggcccgacggtcgcggcgcgcatgcaggaatatgccgatctgggcatcgacacctttattctctccggctatccgcatctggaagaggcctaccgcgtcggcgaactgctgttcccgcacctcgatctggcgcaggaggaaacgcccgtgcgccttcagccggtgcgcccgcagggcgaagtggtggccaacatttatgttccgcaaaaagtgtcgcagagctga

SEQ ID NO: 422469 - DNA, 966 bp, Serratia marcescens
atgaaaaaacacatcgttttacggcgctggctgagcgccgctaccctcaccggcctgctgtcgttggtttgggccactgccgccgccgcgcaggatccggcgcagttccgcatcggctaccaaaaaggatcggtcagcctggtgctggcgaagagccaccggctgctggaggaacgtttccccgctacccgcatcagctggatcgagtttcccgccggcccgcaaatgctcgaggccttgaacgtcggcagcatcgatctgggcagcaccggcgatattccgccgatcttcgcgcaggccgccggcgcggacctgctgtatgtcggcgttgagccgcccaaaccgaaggcggaggtgatcctggtgccggaaaatagcccgatcaaaaccgtcgccgatctgaaaggccataaggtcgctttccagaaaggatccagctcgcacaacctgctgctgcgatcgctgcaaaaggccggcctgaaatttacggatatccagcccgcctatctgacccccgccgatgcgcgcgccgccttccagcagggcaacgtcgatgcctgggccatctgggatccttattattccgccgcgctgctgcagggcggcgtacgggtgctcggcgacggcaccgatctgaaccagaccggttccttctatctggcggcgcgcccctacgccgaagccaacggcagctttatcagccaggttctgaccgtgctgacccaggccgatgcgctcacccgcagcgaccgggcgcaaagcgtgaccctgctggccaacgccatggggctgccggagccggtgatcgccagctatctggatcaccgcccgccgaccgccatcacaccgctcgatgcgcagacgatcgccgcgcagcagcaaaccgccgacctgttttacgccaaccggctggtgccggtgaaggtcgacatctcacaacgcatctggcgcccaagcgcgcaataa

SEQ ID NO: 422470 - DNA, 579 bp, Serratia marcescens
atgcgcgttatatcactggccggcagcccacgcatcccatcacgttccgccgcgctgctcgcgctgagtcagaactggctgcggcagcaaggggtggaagtgacggcttataccctgcacgacttcgatgccgaagacctgctgtacgccaacttcaacagcccggcgatcaaggcgtttgccgagcagctggcgcaggccgacggcctgctgatttccacgccggtttataaagcgtcgttctccggcgcgctgaaaaccctgctggatctgctgccggaacgcgcgctggatcataaggtggtgctgccgctggcgaccggcggttcgatcggccacatgctggcggtggactacgcgctgaaaccggtgctggcggcgctgaaagcgcaagaggtgctgcacggcgtgttcgccgacgacagccagatccaactggccggcgaaggcgccacgctcaccgacgccgtcgccgcccggctggaagaggcgctggccagtttctatctggcgcttggccgccgcaaaccgcccgcgctgcgcgtcgcctcgccgctggcggcgcgacagactgcctga

SEQ ID NO: 422471 - DNA, 1011 bp, Serratia marcescens
atgtactaccccctcatcaggaaagcgttgttccagctcgatcccgagcgcgcgcacgaagtgaccttccgtcagctcagccgtattgccggcaccccattagcgtttcttgtccgtcagtccgtgccgaccaaaccggtcagctgcatggggctgtcgttcaaaaacccgctgggattggccgccggtctggataaaaacggcgaatgcatcgatgcgttcggcgcgatgggcttcggccatgtggaagtcggcaccgtgacgccacgcccgcaaccgggcaacgacaagccgcgcttgttccgcgtggttgaggcggaaggcctgatcaaccgcatggggttcaataaccatggcgtggacaatctggttgaaaacgttaagaaatcccatttcggcggcatccttgggatcaatatcggcaagaataaagataccccggtcgaacagggtaaagacgattatttgatctgcatggataaagtttatccgtatgccggttatatcgcgattaacatctcttcgccgaatacgccggggttacgatccttacagtatggcgaagcgctggacgatcttttggctgcgattaaaaataagcagcaggaattacatgcgcgccatcacaaatatgtgccggtggcggtaaagatcgcgccggatctttcagaagaagaattgatccaaattgccgatagcttggtgcggcataatatcgatggcgtgatcgccaccaataccactttggatcgaaaattgatccaggggttaaattactgcgaacaagcgggcgggttaagtgggcgtccgttgcaatcacgcagcacggaagtgatccgtcgtctttccaccgaactgcaagggcgcctgccgattatcggcgtgggcggcatcgattcgctgacggcggcgcgcgaaaaaatggaggccggcgcgagcctgctgcaaatttattccggatttatctatcacggcccgcgtttgattaaagatatcgttacccatatctaa

SEQ ID NO: 422472 - DNA, 549 bp, Serratia marcescens
atgaagataaaacctgacgataattggcgttggtattttgatgccgaacacgatcggctaatgctggatttagctaatggtatgatcttccgttcacgtttcccggccaaaatgttaacgccggatgccttcgatgaatgcgctttttgcgtggatgacgccgccctttatttcacctatgaagaacagtgcaagcagatcaaactcagccatgagcagcgcgccgagctggtgttgaatgcgctggtcgcctaccgcttcctgaaaccgctgatgccgaagagctggcatttctcgcagcagcattacccgctgcagccgaaaaacggcgagctggcggcggtgaaggtgatggaaagcggcgtggaagcgcgcttgctggtggtagaggccggggataacgccagcctgtgcctgctggcgcaaaatcaactgactgtcgccggccgcaccatggtattgggcgacgccatcaaggtgatgcacgatcggctgaaaccctgcgcgcaggatgaaagcgccgccccggcttacgacagggcggtatag

SEQ ID NO: 422473 - DNA, 1104 bp, Serratia marcescens
gtgatcacgctttccagactctacgtccatccggttaaatcactgcgcggtctgcagctttcttacgcccaggtcggcagcagcggtctggccttcgaccgcaactttatgatcaccgagccggatggcacctttattaccgcgcgccaatacccgcagatggtgctgttcacgccggcgctgctgccggacgggctgttcctgagcgcgccggacggcgaaagcgccgccattcgcttcagcgacttcaccgccgcgccgcagccgaccgaggtgtggggcaaccatttcaccgcactgatcgcgccggatgagatcaaccgctggctgagcggctatttccagcgcgacgttcagctgcgctggctggggccggagttgacccgccgggtgaagaagcaccccgaaatcccgctgacctttgccgatggctatccttatctgctgattaaccaggcttcgttcaacgatctgcagcggcgttgccccggcagcatcaagctggagcagttccgccccaatctggtggtgagcggcgcagccgcctgggccgaggacggttggcaggttatccgcgtcggcgatgtgatgttcgatctggtgaaaccctgcagccgctgcgtgctcaccaccgtcagcaccgagcgcggccgcaagcacccgagcggcgaaccgctgagtacgctgcaaaaattccgctccgccgacaacggcgatatcgatttcggccagaacatgatcgcgcgcagcagcggcatcatccgcgtgggcgatacggtggaagtgctgtcgaccaagccgccgcgcccttatggcgccggcaaagtggtggagagcgtgcaagcgccgcaagacagcgagcacagcgtcactatcgaatacgaaggaaaggtgtttaccggcaacaaccagcagatcctgctcgaacagctggaacagcaaggcattcgcgtgccttactcctgccgcgccgggatttgcggcagctgccgcattacgttgttgagcggtgaagtcgcgccgctgaagaaaagcgcgctgggcgacaacggcaccatcctgtgctgcagctgtatcccgaaaagtgatttgaccctggcgtaa

SEQ ID NO: 422474 - DNA, 2163 bp, Serratia marcescens
atgcgcaacaattttctttttggtgataagcacgatatgaactctctgtttgccagcacggcgcgtggattggaagaactgttaaaaagcgagctggaagcgcttggcgctcacgactgcaaagtggtgcagggtggggtacattttcagggtgacgatcgtcttctgtaccaaagcctgctgtggagccgcctggcttcgcgcattctgttgccgctgaacgaattccgcgtgcacagcgatctggatctgtacctcggggtacaagcgatcgactggccgagcatttttggcgtggataaaacctttgccgtgcatttcagcggcgtgaacgaagagatccgcaacagccagtatggcgcgctgaaggtgaaagacgccatcgtcgacagcttcacccgcaaactcgaccaacgcccgacggttgccaagcagcagccggatattcgcgttaacgtcttcctgcagcgcgatatggccagcgtggccctcgatctgagcggtgaaggcctgcatcagcgcggctaccgcgatctcaccggccaggcgccgctgaaggaaaacctggcggccgccatcgtgctgcgttccggctggcagccgggcacgccgatgctcgatccgatgtgcggctccggcacgctgttgatcgaagcggcgatgatcgccgccgatcgcgcgcctggcctgcaccgccagcactggggcttcagcgcctggaatggccacaacgccgaactgtggcgtgaagtcaccgccgaagcgcaggtgcgcgcgcgccggggcctgcaggaaaccgcctctcgcttcttcggttccgatatcgatcgccgggtgattgagatggcgcgcggcaacgcccgccgcgccggcgtcgccgagctgatcaccttcaacgtcggcgacgtggcgcggttgaccaatccgctgccggaaggcccgctcggcaccgtgatcagcaatccgccgtacggtgagcgtctggaaagcgaaccggcgctgatcgcgctgcacaacatgctgggccgcgtgatgaaaagcgccttcggcggctggcagctttcgctgttcagcgcctcgccggagctgttgagctgcctgcagctgcgcgccgagcgccagttcaaggcgaagaacggcccgctggagtgcgtgcagaaaaactatcagctggcggcgaacccggccggcgccactaccggcggcgtgcaggtggcggaagacttcgccaaccgtctgcgcaaaaacttgaagaagctcgacaagtgggcgaaacagcagggcattgaatgctaccgcctgtacgatgccgatctgccagaatacaacgtcgcggtggatcgttacggcagcaaggtggtggtgcaggagtatgcgccgccgaaaaccgtcgatgcgcagaaagcgcgtcaacgcctgttcgatgtgatcaacgcgacgctggcggtgctggaattgccatcgaatcagctgatcctgaaaactcgcgagcggcagaagggcaagaatcagtacgagaagctggcgcagaagggcgagttcctgctggtggaagagtataacgccaagctgtgggttaacctgaccgactatctcgataccggcctgttcctcgatcaccgtattgcgcgccgcatgctgggcgagatgagcggcggcaaggacttcctcaacctgtttgcctataccggcaccgccagcgtgcacgccgggctgggcggcgcgcgcagcaccaccacggtggacatgtcgcgcacctacctggaatgggcggagaagaacctgcgcgccaacggcctgaccggccgtcagcatcggctgatccaggccgactgcctgtcgtggctgagcaacgccaacgaacagttcgacgtgatcttcatcgatccgccgacgttctccaactccaagcggatggagaacacttttgacgtgcagcgcgatcatctggcgctgatgaaagatttgaaacggttgctgcgccgcaacggaaccatcatgttctcgaacaacaagcgcggtttccaaatggatatggcagggctgagcgcgctgggcctggaggcgaaagagatcaccgccaagacgctgtcgcaggactttgcccgtaaccgtcagatccacaactgctggctggtgactcacgccggcgaaggaaaataa

SEQ ID NO: 422475 - DNA, 1905 bp, Serratia marcescens
atgtcgttaatcagcatgtccggcgcctggctctctttcagcgatgcgccgcttttagacaacaccgaaattcatatcgaagacaacgagcgcgtgtgtctggtcgggcgcaacggcgccggcaaatccacgctgctgaagatcctcggcaaagagatcccgctggacgacggccgggtgatctacgagcaggatctgatcgtggcgcgcctgcaacaggatccgccgcgcaatatcggcggcagcgtgttcgacttcgtggccgaaggcgtcgcggagcaggcggaacacctgaaggcgtaccatgcgatttcccatctggtggagagcgaccctagcgagaaaaatctggcgcgcatggcgcaaatcatggagatcctcgatcaccaggggctgtggcagctcgacagccgcatcagcgaagtgctgctgcagctggggctgaacggcgacgccgagctttcctcgctgtcgggcggctggctgcgtaaagcggctctgggccgcgcgctggtgagctcgccgcgcgtgctgttgctcgacgaaccgaccaaccacctggatatcgaaaccatcgactggctggaaggcttcctgaaagagttcgacggcagcatcgtcttcatctcgcacgaccgttcgtttatccgcaacatggcgacgcgcatcgtcgatctggatcgcggcaagctggtttcctggccgggcaattacgatctgtatctgcagagcaaagaagaagcgctgcgggtggaagagctgcaaaacgccgagttcgatcgcaagctggcgcaggaagaggtctggatccgtcagggcatcaaggcgcgccgtacccgtaacgaaggccgcgtgcgtgcgctgaaggcgctgcgcgtcgagcgttcgcagcgccgcgaagtgatgggcaccgccaagatgcaggtggaagaggcgacccgctccggcaaaatcgtgttcgagctggaaaacgtcaattatcaggtgggcgaaaaagtgctggtgcgcgatttttccgcccaggtacagcgcggcgacaagattgcgttggtggggccgaacggctgcggcaaaaccacgctgctgaaactgatgctcggtcagctgaaagccgacagcggtcgcgtgcactgcggcaccaagctggaagtggcctatttcgatcagcaccgcgcggatctcgatccggagcgcacggtgatggacaacctggcggaaggcaaacaggaagtgatggtcaacggtcgccctcgccacgtattgggctacctgcaggacttcctgttccacccgaaacgcgcgatgacgccggtgaaggcgctgtcgggcggtgagcgtaaccgcctgctgttggctaagctgtttctgaaaccgagcaatctgctgatcctcgatgaaccaaccaacgatctcgacgtcgaaacgctggagctgctggaagagctgatcgacggctatcagggcaccgtgctgctggtcagccacgatcgtcagttcgtcgacaactcggtgaccgagtgttggatcttcgaaggcaacggcgtgatcaacgccttcgtcggcggttactacgatgcgcatcatcagcgcgccacggcgaaaccgattcgtcaggcggcgccgagcgcgagcaaaccggcggcggagaaaaaggccgaacagccgaagaaagcggcggccaagctgagttacaacctgctgcgcgaactggaacagttgccgcagcggctcgaacagctggaggcggagatcgaagcgctgcaggcgcagatgagcgacgccgacttcttcacgcggccgcacagcgaaacgcaacaagtgctgacggcgctggctaacgccgagcaggcgctcgagcaggccttcgcccgctgggaagagctggaagcgatgaaaaacggctga

SEQ ID NO: 422476 - DNA, 1317 bp, Serratia marcescens
atggtgtgttcccacaacaatcatcagcagcatagtcattccgcaccttcggcggagcaccaggataacctgatgctgtgcccgcagtgcgacatgctggtggcgctgccgccgctggcctatggcagcaaagcggtctgcccgcgctgcaaaaccacgctcagcgcccgctgggacgaaccgcgcaagcggccgatcggttacgccctcagtgccctgttcatgctggtgctggccaacattttcccgtttatcaacatgcgcgtcgccggcatcggcaatgaaatccggctgattcaaattccggaagtcatggtggcggaagactacgccagcatggccacgttgtttatggtgttcgtgcagctgatcccggcattttgcatggtggcgatcattctgctgtgcgccaaagtgcgtttgccgctggggctgaaagagtggatggcccgggtgctgttccagttcaagacctggtgcatggtggaaattttcctcgccggggtgctggtcagcttcgtcaagctgatggcctacggcgatatcggcatcggcagcagcttcgtgccttattgcctgttctgcctgctgcaggtgcgcgccttccagtgcgtggatcggcgctggctgtggcaggacatcgaaccggcgccgcgcctcgatcgcccgctgacggtggggcgcaccggcatgcggcagggcgtgcgctcttgcgcctgctgcacggcgatcctgccggccaatcaggtgcgctgcccgcgctgccacaccaacggctacttgcgtcgccgccacagcctgcagtggacgctggcgctgctggtgacctccgtcatgctgtacattccggccaaccttatgccgatcatggtgaccgaggcgctgggcaacaaaatgaactccaccatcatggcgggggtgatcctgctgtggggcgacggctcttatccggtggcgctggtgattttcatcgccagtatcatggtgccgtcgctgaaaatgctggcgatcggctggctgtgctgggatgccaacggcaggaagaaaccgcgcgccgacagcgagcgcatgcatctgatttatgaagtggtcgaattcgttggccgctggtcaatgatcgacgtgtttgtgatcgccgtattgtcggcgctggtgcgaatggggcagttgatgagcatttaccccgcgacgggcgccgtgctgttcgcgctggtggtgatcctcaccatgttcgccgccatgacatttgatccccggctgacctgggatcgcgcaagtgaaacaatcaacaaggagccgcaaggtgacggaaaataa

SEQ ID NO: 422477 - DNA, 1647 bp, Serratia marcescens
gtgacggaaaataatcatagcgtcgcggacgtcgagaagatcaagcgctggtcgccggtgtggatcattcccatcgtgaccgcgctgatcggcgcctggatcctgttttaccacttcagccatcaggggccggtagtgacgctggtcaccacgacggcggaagggctggaagcgggtaaaaccaaaatcaaaagccgcagcgtggacgtcggcgtggtggaaactgtcacgctgagcgaggatctgagcaaggtgatggtgcaggcgcgccttaattccggcatggagaaattgctgcgccaggactccgccttctgggtggtgaagccgcagatcggccgtgaaggcgtctccgggctgggcacgctgctctccggcgcctatatcgaactgcagccgggcaacaagggcaaagacggcaaagacaactatcagctgctcgacgcgccgccgctggcctctccggatgccaaagggctgcgcatcgtgctggacagcgaaagatcgggccagctcaacgccggcgatccggtgctgttccgtggctaccgcgtcggctcggtggaaaccagctatttcgatcctaaaacgcgcgccatgcgctatcagctgttcattaccgcgccttacgatcagctggttaccaccaacgtgcgcttctggaaagacagcggcgtggcgttcgacatgtcggcgcagggcatgcgggtggagatggggtcgctgaccaccctgttcagcggcggcgtcagttttgacgtgccggagggctgggatcgcggcgaacaggcgaaagagaaggcggagtaccagctgttcgacaaccagcgcagcacgcaggattcgctgtataccgtgcataaggactacctgctgttcttctccgactcggtgcgcggcctgcagccgggcgccccggtcgagttccgcggcattcgtctgggcacggtggcgcaggtgccgttctacaaagaggggatggcgcagcgcctggacaacgattaccgcattccggtgttgatccgcatcgagccggatcgcttccagaaagagctgggcggcaatttcgatatcgaagggcatttgaaagacgccgagtcccgcggcatgcgcgcctcgatgaagtccgccaacctgctgaccggttcgctgtacatcgatctcgacttctatccgcaggagaaaccgtggaaagggccgcgcgagctgttcggttatccgctgatgccgaccaccagcggcggtctggcgcagatccagcagaaactgatgcagacgttggataagattaattcgatgccgatcaatccgatgatcaacgaagcgaccaaaacgctggcggaaagtcagaaaaccatgaaatcgacgcagcagaccatgaagtcgctgaacgacatcatcgccagcaaagagatgcaggcgctgccgcaggacatgcagaaaaccctgctggagctgaaccgcagcatgaaagggttccagcctggttcgccggcttacaacaagatggtgggcgatatgcagcgcctcgaccaggtgttgcgtgagctgcaaccggtgctgcgcaccctgaatgagaagagcaacgcgctggtgtttgaagccgccggcagcactgaccctcagccgaagaaggccacgaaatga

SEQ ID NO: 422478 - DNA, 561 bp, Serratia marcescens
atgatgaaatggatcccggtagccctggcgctgttgctcagcgcctgcagcagttcgccacagaagacctactatcagttgccggcgctgggtgcgccggccgcggccagcagcagcggcgcctccacgcgccagctgtggctggagcacgtgagcgtggcggattatctggcgcagagcggcgtggtgtatcagaccaacgacgtgcagtatgtgatagcgcagaacaatctgtgggccagcccgctcgaccagcagctgcagcaaacgctggtcaccaacctgagcagtgcgctgccgggctgggtggtctcttcgcagccgatgagcagcgatcaggatgtgctcaacgtcaccgtcagcggcttccacggccgttttgacggcaaggcgatcgttcgcggcgagtgggtgctgaaccgccaggggcgcttgatcaaacggcctttcagcctggaattgaaacagggcgaggacggctatgatgccctggtgcgcaccctggcgcagggctggcagcaggaagctcaggctatcgcagcacagatgggcggcatttag

SEQ ID NO: 422479 - DNA, 1278 bp, Serratia marcescens
atgagcaatcgtcgtatcgttattaccggcatgggcgccgtttcaccgttagggtgcggcgtggagaccatctggcaacgtttattaaaaggagagtccggcattcgggctttgcctgacgagatcgttgcagatttgccggtcaaggtcggggggcaagtccccgaactggcgcaagatgccgaggcgggattcaacccagacgcgtccgtcgcccccaaggaccaaaagaaaatggatcgctttattctgtttgccatggcggcggcggatgaagccgttcgtcaggccggctggatagccgatacggaggaaaaacaagagcgaaccgccaccgtcatcgcctcgggcattggcggcttcccggccattgcccaggcagtgcgcactacggacagccgcggcgccaagcgcctgtcgccattcaccatcccctctttcctggtcaatctggcggccggtcacgtttccatcaagcatcacttcaaaggcccgattggcgcaccggtcaccgcctgtgcggccggcgtgcaggccattggcgacgcggtgcgtatgatccgcaatgatgaggccgatatcgccctgtgcggcggtaccgaagccgctatcgacaccgttagcctgggcggattcgccgccgcgcgcgccatgtccactgcaccggccgagttggcgcgacaggcctcccggcctttcgacagcgcccgggacggttttgtcatgggggaaggcgccggcatgctggtgattgaaacgctggagcatgcgcgggcgcgcggcgctacgccgctcgcggaaatcgtcggctatggcaccagcgccgacgcctaccacatgacctccggcgctgaagacggcaacggcgcctatcgggcgatgaaaatcgcgttgaagcaggcgaatatcgccccggaagaggttcagcatttaaacgcgcacgcgacttcgacacccgtaggcgatttaggcgaaatcaatgccatcaagcacctgtttggcactgccgggactgtcgccgtgacctcgacgaaatcagcgaccgggcacctgctcggcgccgccggcgggctggaaaccatctttaccgccctggctctgcgcgatcagatagctcctgcaacgctgaatctggacaatcccgatccggcggcggcaggcttgcatctggtcgcgaaacgggctgaatcgatggacatgacctacgccttatcaaacggcttcggctttggcggcgtgaatgcgagtattttactgaaacgctggcaggacgaataa

SEQ ID NO: 422480 - DNA, 528 bp, Serratia marcescens
atgcaaaaaacccgctttagcgatacaccttgccccgtcgcacgttcgttagatcgcgtcggagaatggtggagcatcctgatcctgcgtgatgcctttcaggggttgtccaagttcgacgaattccaacaaagtctggggatttcacccactctcctggcccgacgcctgaaggatttagtggcccacggcattctgcataagcaacgttatcaaacgcggccggttcgctatcaatatctgctcaccgaacgcggcaacgactttcttcccgtactggccgctctctcacaatggggcaatcgccatttgatcgacggtgacattagcgccttgttagtcgacggccgcaccgatcggccgatccaggtccagttgatcaacgtcgagacccaacagcaggtgccgccgcagtttattacgttggcaccggggcctgcggcaaatgacggcatacgtcaacgcgccgaactgatgcggcagcggcgcctcgccgatttatccgaactcaccaaggagcagtcatga

SEQ ID NO: 422481 - DNA, 519 bp, Serratia marcescens
atggtagataaacgcgattcctatacgaaagaagacctcgaagcatccggccgtggcgagctgttcggcgccggtggcccaccgttgccggcaggtaacatgttgatgatggaccgcgtggtcaagatgaccgaagacggcggaactcacaacaaaggttatgtggaagcggagctggatattaatccggacctatggttcttcggttgccactttatcggcgatccggtcatgccaggctgcctgggcctggatgcgatgtggcagctggtcggtttctacctcggttggctgggtggcgaaggcaaaggccgcgcgctgggcgtcggtgaagtcaagtttaccggccaggtgctgccaaccgcgaagaaagtgacctaccgcattaacttcaaacgcgtcatcacccgcaagctgatcatgggcgtcgccgatggcgaagtgctggttgacggcgaagtgatctataccgccaccgatctgaaagtgggcctgttcaaggacaccacagcgttctga

SEQ ID NO: 422482 - DNA, 1581 bp, Serratia marcescens
atgctgttgaaggcgcaagaaacacgagagtatctggaactgatcgctcacgccgtcacgccactgctgccgaaaaacacggcatgccgcggcagccactatgtcattcaggatggcaaagtcagcgtagagccggccagccgtggcgatgaaccttttgccgccggcggcgcttgcctgttccaggagtgggttgagccggagcaactgcttggctgcgtacggatccacaatggcgacatcaccctgcagccgggtctggtgcaccaggccaacggcggcattttgattctgtcggcccgtgccctgttggctcagccgttgctatggctgcggctgaagcaaatgatcggccaacgtcagttccattgggtttcgccagacgaaacccgcccgctgccggtagccattccgccaatgccgctggagctgcggctgattgtggtcggcgatcgccacggcctggccgattttcacgatatcgagccggaactgagtgaacaagcggtctacggtgaattcgaagacgatctgcagctgactgaagttgatgatatggcgcagtggtgcggctacgtcaatggcgtgattgccgaccagcagttgccgatgctggcgagcgacgcctgggcgccgctgatcgttcaggccgtgcgttacagtggcgaccagggcatcctgccactctcgccggtttggcttggccagcagctgtccgaagccgcactgtatgccgaagaagatcgcattacggccaaagcgttcgaagcggcgttaaatgcccgcgaatggcgtgaaagctatctggccgaacgtatgcaggatgaaatcgagctgggccagattctgattgagaccgagggtgaagtgatcgggcaaatcaacggcctgtcagtcctggattatcccggccatccacgcagttttggcgaaccgtcgcgcatcagttgcgttgtgcacctcggcgacggcgagttcaccgacgtcgagcgcaaagccgaactgggtggcaacctgcacgctaaaggcatgatgatcatgcaggcgtttttgatcgccgagctggatctggatcagcagttacccttctccgcttccatcgtctttgagcaatcttacggtgaagtagacggcgacagcgcctcgctggctgaactgtgcgcgttgatcagcgccctgtcacagcaaccgatcacccagcagatcgccgtcaccggctccgtcgaccaattcggcaacgtacagccgataggtggcgttaacgaaaagatcgaaggtttcttcgaggtttgtttgcgccgcggcctgacgggcaaacagggcgtcgtattgcccgcgaccaacgtgcgccacctgtgcctgcgccaggatgtcgtcgacgcggtacgcgaagggcaattccatctgtgggcggtagagagcgcggcggaagccttgcctttgctcacaggttgcctctactctgacgaacaacagccgaacttgttggcggccattcaggaacggattgcgcaggtgagcctgcaggaacgccgtcgtccgtggccgctgcgctggctcaactggttcaaccacggctga

SEQ ID NO: 422483 - DNA, 459 bp, Serratia marcescens
atgaaatatcagcaactggaaaatctggagagcggttggaaatggaagtacctggtgaagaaacatcgggaaggggaactcattacccgctacattgaaaacagcgctgctcaggaggcggttaacgagctgctgaagctggaaaatgagccggtaaaggtacttgcatggattgccgctcacatgaatccggaactggataaccggatgaaacaaacgatccgcgcccgccgtaaacgtcattttaacgcagaacatcagcatacgcgtaaaaaatctatcgatctggagtttttggtttggcaacgattggctgccctggcgcgccgacgtggcgttacgctgtcggaaaccgtcgtgcagcttatcgaagacgctgaacgcaaagaaaagtatgcgaaccagatgtcgtcgttgaaagaagacttgaaggcgattcttggcaaagatcccaagtaa

SEQ ID NO: 422484 - DNA, 1080 bp, Serratia marcescens
atgaaaaagacagctatcgcattagcagtggcactggcaggtttcgctaccgtagcgcaagccgctccaaaagataacacttggtacaccggtgctaaactgggctggtcccagtaccatgacgttggcttctacggcaacggttaccagaacggtatcggcaacggtcctacccacaaagatcagctgggtgccggcgcgttcctgggctaccaggcaaaccaatacctgggcttcgaactgggctatgactggctcggccgcatgccttacaaaggcagcgtgaacaacggtgctttcaaagcgcagggcgttcaactggccgctaaactgagctacccaattgctgacgatctggacatctacactcgtctgggtggtatggtatggcgtgcagattccaaagctaactacggccgtactggtcagcgtctgagcgaccacgacaccggcgtttctccgctggctgctgttggtgttgaatacgcactgaccaaaaactgggctactcgcctggattaccagttcgtaagcaacatcggtgacgcaggtaccgttggcgcacgtccagacaacaccatgctgagcctgggcgtttcttaccgcttcggtcaggatgacgtagttgctccagcaccagctccggctccagctccagttgttgaaaccaagcgtttcactctgaagtctgacgtgctgttcaacttcaacaagtctactctgaaagcagaaggccaacaggctctggatcagctgtacagccagctgagctccatggatcctaaagacggttccgtagttgttctgggttacaccgacgccgttggttctgaccagtacaaccagaaactgtccgaacaacgtgcacagagcgttgttgactacctggtctccaaaggcatcccgtcagacaaaatctctgcacgtggtatgggtgaagcagatgcagttactggcaacacctgtggctacaaatctggccgcgctaccaaagctcagatcgcttgcctggcaccagatcgtcgcgtagagatcgaagttaaaggtatcaaagacgttgtaactcagcctcagggctaa

SEQ ID NO: 422485 - DNA, 507 bp, Serratia marcescens
atgcgtactcaatcactctaccaacctcatttcagccaaggctcttttacagcgcgcaatgctgagaagaacacggatgtcggcaaagagaatggcttgatcagtgaacttgtttacaacgagcgccagcccgcagtggctcaattgctgttgcccctgctgctgcaactgggcaagcagtctcgctggcttctgtggctgacaccgcagcaaaaattaagcaagcaatggctgcagcaatccggcctgcctgtagataagatggtgcaattgagccaaatcagcccggtgaatacggtcgaggctatggaaaaagcgctgcaaacgggaaattacagcgtggttcttggctggttgcccgagctaacggaggaggatcgtctaaaattaagacgtgcggcagaattgggtaatgcctatgggtttatcatgcgccctcaacgtgacattaacccgactcacggacactgttccaccctaaaaattcactcttctttgtatcattaa

SEQ ID NO: 422486 - DNA, 657 bp, Serratia marcescens
atgaaaaggatgtcgatacgaaggatcgcacaggctaaaaattgcttcgcggcgctgggcgccatcaccacgcggtcacagtttggcggctacggcctgctggccgagggggtaatgtttgcagtgatagcggaaggagagttgtacctgcgggctacggcgagcatggaaccggcttttcgcgccagagggatggtcaatatggtctattccaagcgtggagtgcccatcactttgcgttattactgggttgacgagtcgctgtggcgggaacgcaacgagctggtggggctggcctggcaggccgtcagggaagcgcgtcgagagcagcggcttaaggccggcgatcacggtcgattgaaggcgttgccgaatatcgatgtcaacatggagcgcttgctatggcgagcgggtatccgcaacgcctatgacctgcggctgcaaggcgctaaacgcagctatctccgcctgctgcaacagcagaccaatctggggctgcgtgtgctgctgtcgctgggcggcgcgatagccggttatcatcaggcggcgttgccggccgaattgcgcaacgaactggtgcgctggttcgatcatacgatggcgatgcgccgccatgggcatgagccagtggttcagggcccatcgagcgagccctga

SEQ ID NO: 422487 - DNA, 2136 bp, Serratia marcescens
gtgcgctcttttgcacccgcagtacgtcgttacacctataacagcaatctgctgtatcacctgcgcatccttattgcgctgatcggcaccaccgccgttccctggtggctgggcattcccaagctgaccatcccgctgacgctgggcgtggtggcagcggccctgaccgacttggatgaccgcctggccggcaggttacgcaacctgctgatcacgctggtgtgcttctttgtcgcctcagcttcaatcgagctgctgttcccctatccctggttgttcgcccttggcttaaccacgtcgacctgcggttttatccttctgggcgccttggggcaacgttacgccaccatcgccttcggcgcactgctgatcgcggtttacaccatgctcggcaccgccatgtacgatgcctggtatcagcaaccgctgctgctggtgatcggtgcgctgtggtacaacctgctgacgctggcgggccacctgctgttccctatccggccactgcaagagaacctggcgcgctgctacgatcaactggccaactatctggatgccaaagccaacctgttcgatcccgacgccgaacgcgacgccgacctgccatggatggatgttgcgatggccaacagcgcgttggtcgcgttgcttaaccagaccaaagcctcgctgctgacgcgcctgaaaggcgatcgcggccagcgcggcacccgccgtaccttgcactactattttgtcgcgcaggatatccacgaacgcgccagctcttcccacgttcagtatcacgcgctcagccggcaattccgccacagcgatattttattccgcttccagcgtttgctgagcatgcaggcgcgcgcctgccgccaactggcacaatcgatcctgctgcggcaaaaataccagcacaacccgcgttttgagccggccttcagccgcattcaggaggccttggcgcgcatcgccgaaacccagggcaattcagaacaaaccaaggcgctggcgcacctgctgaaaaacctgcatgcgatcgatgcgcagctggccaatattgagtcagagcagacgctggcaagcgggcaagcggaagagaacagcctggccgacgatcgcttaaccggctggagcgacatccgcctgcgcatcagccgccatttgacgccgcaatcggccctgttccgccacgcgatccgcatgtcggtggtgctgtgcgtgggttacgctttcatccagttcaccggcatgcagcacggttactggatcctgttgaccagcctgttcgtctgtcaaccgaactacaacgctacccgccgacgcctggcgctgcgcatcatcggcaccctggccggtatcctgatcggcctgccgatcctctatttcgtgccttcactggaaggacagctggtgttgatcgtcatcaccggcgttctatttttcgctttccgcaccgtccagtatgcccacgccaccatgttcatcacgctactggtcttgttatgctttaacctgttgggtgaaggattcgaagtagccgccccgcgcgtttacgacaccttgttgggctgcgccatcgcctgggcggcggtcagctttatctggccggactggaaattccgccaactgccggcggtggtggataaaaccctgaatgccaactgccgttatctggacgccattctggtgcaataccaccagggtaaggataacggcctcgcctaccgcattgcgcggcgagatgcccacaacagcgatgccgaactggcttcggtcatctccaacatgtccgccgatcccaaggccgacaaggaattgcaggaagccgccttccgcctgctttgcctcaaccacactctcctgagttatatctcggcgttgggggcacaccgcgagcggctgaatacccctgtcaccctcgatctgctcaatgatgccgtgtgttacgtggacggcgccttgcatcaggaagaacggaacagccagcgcattgcgcaagcgctggaacagctggcggagcgcattcgcagagccgttccggaacctgaaagcaaagagcagttggtgttgcaacaggtggggttgatgctcgaactgctgccggagctcaccgcactccacgcccaaatcaataaggcaatctaa

SEQ ID NO: 422488 - DNA, 453 bp, Serratia marcescens
atgcgtactgtactgaatattcttaattttgtgttgggcggtttcttcaccacgctgggttggctcatcgccacggtgttcagcgtgctgctggtcatcacgctgccgctcacccgctcctgctgggaaatcaccaagctgtcgctggtgccgttcggcaatgaggcaatccacgtcgatgagctctacccggaaaaaagcaatgcgctgctctccgccggcggctcactgctcaacgttatctggctggtgctgttcggctggtggctgtgcctgtcacacatcgccgccggtatcgtgcagtgcgtttcgatcatcggcattccggtcggcatcgccaatttcaaaattgccgccatcgcgctgtggccggtggggcgccgcgtcgtctcggtagaaatggctcagcaagcgcgtattgagaatgctcgccgccactatcatcagcgttaa

SEQ ID NO: 422489 - DNA, 2055 bp, Serratia marcescens
atggaacttaaagcgacatcgctggggaaacacctggctcagcacccttataaccgcgtgcggttgctgcacgccggcgttgaggtgagcggggaaaaacatgaatacctgatccccttcaatcaactgattcaggtcaggtgcaagcgcggcatcgtctggggcgagctggaatttgaattgccggacgaaaaagtggtgcgactgcacggcaccgagtggcaggaaacgcagcgtttttatcactatctgcagcaggcgtggcagcagtggagcgccgaaatgagtgaggtcagtgccggcgtgttgcaacagcaggtggcacagattcagcgcattgagcagcaagataaatggttcaaaaagtctgagctgggcaaactgcagcagcaaatccgtgaagccttctccgcgctgccaatgccggtggcgcgcctggaggaattcgataactgccgggccgattaccatctgtgtctgcaatggctgcagcaggggcaacgcagtgtcgaccaacgcaaccggcagtggaccgatcgcatgttggagcaacatcacgacttcttccagaccgtcgagagctcaccgctcaatgactctcagagccgtgcggtggtcaacggcgaggattccgtcctggtattggcgggggccggcagcggcaagacgtcggtgctggtggcgcgcgccggctggctgctgcgccgtcaggaggcggagccgggccaaatcttgctgttggcgttcggccgtcaggctgcgagtgagatgaatgatcgcatcaaagaacgtttgggcgatgtcggtattcaggccaaaacattccatgcattggcgctgcagatcattcaacaaggcagccgcaaagccccggccatcagccggttggaaaccgatgccagcgcgcgcaaagcgttgttgattgcccattggcgcgagcaatgtgcagagaaaaaagcccaggcgaaggggtggcgtcaatggttgaccgaggagctggaatgggacgtgccggaaggcgacttctggcaggataaacgcctggcggaccggctggcgggccggttggaacgctggctggggctgatgcgcatgcacggcggcagccaggcggaaatgattgagcaggcggatgaagaaatccgcgatctgttttcgaaacgcattcggctgatggcgccactgttgaaagcctggaaaagcgccttaaaagaggaaggagcggtggacttctccggccttattcatcaggcggtcaacattctcgacaaggggcgcttcgtcagcccgtggaaacatattctggtcgatgagtttcaggatatctcgccgcagcgtgcgctgttgctggcggcgctgcgtcggcagaacaagcagacttgcctgtttgcggtgggggatgactggcaggcgatttatcgcttcagcggcgcagagttgacgttaaccacggcttttgccacccacttcggcgaaggggcgcagtgcgcgctggacaccacttatcgtttcaacgaacgtatcggcgaggtggccaaccggttcgtgcagcagaacccgcaccagctgaaaaaaccgctcaacagcctgagcaagggcaataaaaagtcggtggcgatcctgccgcacgagcagttggagcccttgctggataaactgagcggctacgccaagccggatgagcgcatcctggtgctggcgcgctaccatcatctgaaaccggaagcgctggcgaaggcggccacccgctggcccaagctggatctggaatttatgaccatccacgccagcaaggggcagcaggcggaatacgtcatcatcgccggtttgcatgatgggcgtgacggcttccccgccgtggcgcgcgagtcggtgttggaagaggtgctgctgccgcagccggaggatttcccggatgccgaagagcgccgtctgctgtatgtcgcgttgacgcgcgctaaacatcaggtgtggctgttgcaggatcgtgaacgtccttcggtgttcgttgaacacctgcaagatcttggcgtaccggtgcagaaaaaaccgtaa

SEQ ID NO: 422490 - DNA, 459 bp, Serratia marcescens
atggaattgaccacccgcactatcgccgcgcgcaaacacattgcgctggtggcgcacgatcaccgcaaacaggccctgctggagtgggtagaaagccacaagaccattctggcgcagcaccagctgtacgccaccggcactaccggtaatctgatccagcgcgccagcggcattcccgtcaccagcatgctgagtggcccgatgggcggcgatcagcaggttggcgcactgattgcggaaggcaagatagacatgctgatcttcttctgggatccgctgaacgcggtgccgcacgatccggacgtgaaggcgctgctgcggctggcgaccgtatggaatattccggtggccaccaaccgctcgaccgccgactttctgatcgactctccgctgttcaaaagcgaggtggagatcgccatccccgactatcagcgctacctgcaagaccgcctgaaatag

SEQ ID NO: 422491 - DNA, 666 bp, Serratia marcescens
atgaaatttggtctggtggttgcggcgttgctcagcatcagcatgcctgccgcggctacgaccctgaaactctccccggacatcgacctgctggtggtcgacggcaagaaaatgacaggttcgttgttaaaaggcgccgacagccttgaactggatggcgggcagcaccagttgctgtttaaagtgaccaaaaccgtacgttccggccagcatacgcaggcctatgcttccttgccgctggttgccaccttcaatacgcaaaagatcagccaggtggcgatcgaactgccacgcatcgagaacgatcgtgatgcgcaacgctttgacagaacgttgaattatctggtggtcgataaagacggcaacgccctgccgttccggcatgatgtgctgcatcccgacagcgtcaccttcaataccgatttggaaaaggtgatgaccgattacaaccgccagaaccgcccggcctccgttccgagctttgttcaggcgaacgcgggcaatgcctcagccctcacgttggccggcgcgccgataaacgccccgacggtgacgttgaaaggtgaaaacgtgtcggaacaaatgctgcaatactggtttcaacaggccgacaaggaaacacagaagcgttttctgcgctgggccaataaacaaccgattcgctga

SEQ ID NO: 422492 - DNA, 414 bp, Serratia marcescens
atgcaagatcaagagattgttgagctgttgcaacaggtgaaaactatcgcgctggtcggtgccagcgataacccatcgcggcccagctatggggtgatggcgtatctgttggcgcaagggtatcaggtgatcccggtcagcccaaaactggcggggcagacgctgctggggcagcaggtttaccctacgctggccgctatcccgcagccggtggatatggttgacgtgtttcgcaattcagaagcggcttacggcgtggcgcaagaggcgatagcgatcggcgccagggcgctctggctgcagataggggtgattaacgagcaggcggcagcgctggcgcaacaggctgggttgcgtgtggtgatggatcgctgtccgaaaatcgaaatcccgcgcttagggttggagcgctaa

SEQ ID NO: 422493 - DNA, 318 bp, Serratia marcescens
atgattgccagcaaattcggtatcggacaacaggttaggcataaactgctggggtatttaggtgtcgtgatcgatatcgacccggaatactctttggaacaacccaaagctgacgaaatagcggcgaacgatgaactgcgttcagccccttggtaccacgtggtgatggaagacgaggaaggccaaccggtacacacctatctggcggaagcgcagctggatagcgaagcccaggaggcacaccccgagcaaccatcgctggatgaactggcggaatccatccgtcaccagctacaggcgccacgcttgcgcaattga

SEQ ID NO: 422494 - DNA, 1185 bp, Serratia marcescens
atgcgcttacatctcgccaaaggacgtgaaaagtccttactccgtcgccacccttgggtgttctccggcgccgttcaacgcgttgagggcaaagcccactccggtgaaaccattgatatcctcgacagccagggtaagtggctggcacgcggcgcctattcgcccgagtcgcagatccgcgcacgcgtctggaccttccagcaagatgaagagattaacatcgatttcttcattcgccgcctgcagcaagcgcaaagctggcgcgattgggtcgcacagcgcgacggtctggacggataccgcctgatcgccggcgagtccgacggcctgccgggcatcactatcgatcgcttccagaatttcctggtgctgcagctgctgtccgccggtgccgaataccagcgcccggccctgctttccgccctgcagcattgctacccggaatgttcgatctacgatcgctccgacgttgcggtgcgtaaaaaagaaggcctgccgctggcgcagggctcggtatttggcgatctgccgccggaactgctgccgatcaccgaacacggcatgaagctgctggtggacattcagcaggggcacaaaactggtttctacctcgaccagcgcgacagccgcctggcggcgcgcaattactccgccggccgtcgggtgctgaactgcttctcctacaccggcgccttcgccgtttccgctttgatgggcggttgcgcgcaggtgatcagcgtggatacctcgcaggcggcgctggatatcgccaaacagaacgtcgagctcaataagctggatctgaacaaagcggagttcgttcgcgatgacgtgttccagctgctgcgcaactaccgcactcaaggcgaaaaattcgatctgatcatcatggatccgccgaaattcgtcgagaacaagaatcagttggccagcgcctgccgcggctacaaagacatcaacatgctggcgctgcagctgctgaatccgggcggcattctgctcagcttctcctgctccggcctgatgccgaccgacctgttccagaaaattttggccgacgccgctgtagatgccggacgtgatgtacaatttatagagcagttccgacaggctgccgatcacccggtgatcgccacataccctgaggggctgtatctgaaaggattcgcttgtcgggtgatgtaa

SEQ ID NO: 422495 - DNA, 963 bp, Serratia marcescens
atgtctaaagaaagaagcttgtcgtttgattttttgaaagggttgcttatcttgctcgtcatcgtgggacatttattgccaggcagcgctgatgtcggtttgcgtggggcaatatattatttccatatgccgctttttctaggggtgacgggctactttgttcggcgttattttcttgatggcggtgtgattagcgtgctgaaaaagtatcagtggcgcatgataattccttatatgttggcgttcgttgtttacagcgtttattctctttactcctcagaagaagtcggtttaaagcagttcatcggtctatttctttacccctactatcatctttggtatatcccagcagtgatcatattcgtgctatatactatggtcatttacaagagtaatttcttaattggtttctttctgttcacttccgcggtgttatctattgtctggtactgttacgccgacacgctggaaaaccaatatgcctggctgaaattcattggtgataagcgtttctattattactactccttctttttattaggtttcctgatcggggataagaattttcacggtaacccgctggcgttgttcgctatcgcgtcggtcgtaggcatattagggtactatgaaccgaacggggcactgctggatgccgcctcatggtttgcatttaatgctgcgctgttgctgttgatggtgagtttgtgtaaacgcctgaagctgagaattgagggctttgtggtcaaaatggggcaggtatctctacctatttatctttggcatgtgttacccattttgcttgtcggagcaatggtcgataaggatacgttaggtttttatctcagcgtaacggccattattttcgctctggtcatcatatttatccgcttgcgtggcaaaagcagatttatcgactctttcttttacggagaaagggccaactggctacccgccgaaaaatag

SEQ ID NO: 422496 - DNA, 279 bp, Serratia marcescens
atgacacaagtttgcattgctgcgtatgtgtatggcgtggtgcagggggttgggtttcgctattccacccagcggcaggccgaggcgttgggggtgacaggctatgcgcgcaatctcgatgacggcagtgttcaggtggtggcctgcggcacacaggcgcaggtggacaagctgctggagtggttgaaacagggcggcccgcgcagcgcgcgcgtcgaacgtgtgctggtggagccgcagggcctggctgattatagcgggtttggcattcgttattaa

SEQ ID NO: 422497 - DNA, 330 bp, Serratia marcescens
atgttggagtttgaaggtcaggttatcgacactgacgcgcagggttatctgaaaaacagcgccgactggcatgaagggctggcgccgctgctggccgcgcaggaagagatcgtgctcaccgaagcacactgggaagtggtgcgtttcgtgcgcgacttctatcaggaatttaatacctcaccggctatccgcatgctggtcaaagcgatggcgcagaaatacggcgaagaaaaaggcaacagccgctatctgtatcgcctgttcccgaaagggccggccaaacaagccaccaaaatcgccggattgccgaaaccggtaaaatgcatttga

SEQ ID NO: 422498 - DNA, 660 bp, Serratia marcescens
atggaccgcattgtcgtctcatcttcttcgcgcgactcgctgctcagcacgcataaagtcctgcgcaacacctatttcctgttatccctgacgctggctttctcggcgttgaccgcgaccgccagcacgatgctggggctgccggcaccgggcttgctgctgatgctggttggtttctacggcctgatgttcctgacccataaactggccaacagcccggcaggcattctggcggcgttcgcgctgaccggtttcatggggtatgccctcggccccattctcagctcgttcctgaacgccggcgcgggcgatctgatcatgctggcgctgggcggcaccgcagcggtgttcttctgctgctcggcgtatgtgctgaccacccgtaaagacatgtcattcctgtccggcatgatgatggcaggttttgtggtactgctggtggcggtgatcgccaacctgttcctgcagatccctgccctgcacctggccatcagcgcgctgttcatcctgttctccgccggcgcgatcctgtgggaaaccagcaacatcattcacggcggcgagaccaactacattcgcgccaccgttagcctgtacgtgtcgctctacaacatgttcatcagcctgttgagcattctgggcttcgcccgcagcaactga

SEQ ID NO: 422499 - DNA, 216 bp, Serratia marcescens
atgaactggtatcaagtcgccctatggaccatgatctttctgaagtccggcgctttcctggtattcgtgtggtggtggatgttcaaacgcgcaaccaaaccttatgtgcgcccgcaagacgtcgtggtggacgatacgccgtatgatgagaacctcaccatggaagaggtgatgaaaaaccatggcatcgtccgtacggatatgtcggtaaaatag

SEQ ID NO: 422500 - DNA, 483 bp, Serratia marcescens
atggccgcattgctcaaccccaaaatgctgactatcggatttttggcagtgattctcttcattgtcctgtttcgcgttttaacccccgccgcgcctgtgcatatgaattgccaggccgatacgatcactaaaaaacgattagcttcaggcgatgacctggaattaaaagtgacgggcagtttattcatctatgacgaacatcatgccatgattgtgcagcgtggggacatcaccgtgagaggcaaaacctacagcctggataggaaaataaactttgatataaagaggttagatgacgggttttacatgaccacccaccgagaaatcagtaaaacgcccgacgacaacgcgccggatgagctgacccaggaaatccccatgatctctctcggcattaagaacggcgttttttcgatgcgtaaagctcggcaggatgcgtacatcgttcatggcgtgcttttcccggtaacgctatgccgttaa

SEQ ID NO: 422501 - DNA, 798 bp, Serratia marcescens
atgaaatatattatcgacctctgcgtaatctatgacgcaaatgcgtgtcgtctccaactcattgataacgatgagtcatcgatacggatatccaatccggcctcgcgcctgttaattgaaatgctgactcatccgaatatcccattgaaacgtgaggtattgataaaaaaggtatgggaagagtatggtttttcaggctcatcgatcagcctcaatgtggccgtcagtgaaataaggaaagcgttcaaactgctggggagagaaacctcgccgataaagaccctggcgaaagtcggtttttgctttaccgccatgattgatatttacccatcaccgcaggcaaccgttaatgaaacgcccccttctgccgcctcagtaccgctttcgtctttcccgtcggttgccgaatcacataacacgccgccgcagaaacaggtaaatattcgcgctattgccgctatctgcggcgcatttattccgctgttgttcgtcgcggcgctctatcctgttgaaccgcctgatcaacccagagaaaatttaatctcgctagggaaaaaagaccgctgcaccttgtattctctggatgcggacaagcatattgatgacgaactggaaaagcgcatggtcaaccaggcgctagaagagagcggtgtggattgtatagccagtaaagcggacatctatttttcctccgtaaaacacacgttgacttataacaccttcctcggtgtgtgttatctcggctcacaagatcgatatacccagtgtgttacctacaaaattctcaacggaaaataa

SEQ ID NO: 422502 - DNA, 612 bp, Serratia marcescens
atgctcagtatcggtatcgtatctgaaaacatctttttcagagaggcgataaaaaggatattggcgccaaggatttttcataaggatcacgttattgcttactacgacgatctgcctttggtcatggggcgaaattgccaggatattctgatcgtcgatgatgcgatcaaaagcctgttgcgtttcagcatggcggcagcgttattgtctgctattcatggcgtgaaaatttttttgacgacagaagagaagcgtcgtctgttatttcgttctgtcacgcgtgatgtggtggtgctcgataaaagagtgcgagttcccgacatgaataaggaattgtctttgctgctggctaatattgcgcagcattctgcattagatggaaacgttgagggtggggcggcccgcaatacgaaaatttgcctgactgaaagtgaagtggaaacgcttcatttgctttctttcggctatacggtgacccaggtatcccgaatgcttgataaaagcgtaaaaacggtcagcacgcagaaatgcagtgcattacgcaaaatgggattgaagaatcgggtgcacaatttattggacatttcatccggtttctcggcggttatctag

SEQ ID NO: 422503 - DNA, 585 bp, Serratia marcescens
atgatgaagaaaatgctttctgttgcaatcatggcggccgcggtcgctgcgccggtggcttttgctgaagacaattccgccggtggcgtgattaactttaccggcgccattaccgacaccacctgtacgattaacggcggcaagagcgcggatttcaccgtagcactgagcccgatctcggtgaccgacgcgggtaacaccgtcgggccaatcaccaagaacaagaagtccttctcgttgaccttctccggctgttcgccggcggccggtaccgcaggcaccccgctgaaaatctacttctcctccgcggataacatctccaccgacggcaaatatttgctgaacaactcggtcaacgagaacgacgcttccgtcgcgaagaacgtaggcttctctctggcggaaaccggttcttccaccccgatccagctgaacgtgccttatgtcaccgacatcatgggcgacaaagaggcgccggattcagaaaccctgacgctggacgcgtactactacaaaaccaacgccgaagcggcaaaagtgggcgctctgagctccaacgtgacttacaccatttcttacctgtaa

SEQ ID NO: 422504 - DNA, 696 bp, Serratia marcescens
atgaaaaaatacatgatgatagcggcgctgttgctgggttccgttggcgcgcaggccaatgtggtggttaacggcacgcgggtgatctacccggcaaacaacaaggacgtgattgtccaattgctgaataacggtaccgacccctcgctggttcaggcctggatcgacgacggcgatatcaattccaccccggaaaccgccaatgtgccgtttttgctgtcgccgccggtggtgaaagtgaacggcaacagcgggcagcagctgcgtattcagaaagtcggcgccgcgttggcggcggatcgtgaatcggtgttctacctcaacgtgctggatatcccgccgacgccggaaaacctgcagggcaccaatacgctgcagctggcgatcaagtcgcgcatcaaactgttctaccgcccgcaggcgttaacccgcggcgtggaaaatgcgttggaagaactgacgctgcaagccaatggcaaaggcttcaacgtcatcaataaaagcgcgtatttcattacggtagcgaatataggccagggtgcggacaagcatctgctggttgattcgctgatggtcgcgccgttttccacccagtttgccgccagcaaacgagcggtcagcaaaaacgcccgttatgacctgatgtatatcgacgatctgggggcttacaagtctaaagccatcaccgcacactaa

SEQ ID NO: 422505 - DNA, 2493 bp, Serratia marcescens
atgaagctgaataaaaaagtcctctcgctgctgaccgcctcttcattcttgttgccggatacggcctgggcggtgacgttcgatacgtcgctgttggccggcgaatcgcgcgattccgatctctcgcgtttttacctcaataatgacatgcctgccggccggcaggagatcgatgtgtatgtcaaccatgactggaaagggcgctatgcgctgctgtttggcacccaacgcgacgatatccaaatcgactaccaggatgcgcagcggctgggcatcgatctgagtcaattgccggcgcctcaggcgccccagacgacgctgtcgatcgccacgctggtgcagggcggtcggttcgatatggacgtcggcgcgctgagcctgcggctgacggtgccgcaggcgcgggtcaaccgatcggaggcgggatacgtggatccggccttctggaatcgcggcatctccgcattgacgctggcctacaacgcgacgtactaccacgccgaggcgcgcggcgacggcaatcgcagcaacaacgacgatttttataccgggctggaatccgggatcaatctggccggttggcaatttcgcgacagcagcagctttcgccacggcagcgggcgggggagccactggcagaacaacacgcgctatctgcagcgcggcttcgctgacatcaaatccaacctgaccgccggcgatttttattcgccgggggatctgttcgactcggtgcgcatccgcggggtggcgctggcgtcggacatcagcatgcgccccaactcgcagcagggcttttcaccgatcgtgcggggcgtggcgcaaaccaacgccctggtgaaagtggtgcagaacggcaacgtgatctaccaggaaaacgtgccgccgggtgcctttaccctcgacagtattcagccgaccggctcggcgggcgatctgtgggtgacggtcaaagaggcggatgggcgtgaacagtcgttcagcgtgccgttttccgccgtacccaacatgttgaaacagggcgtcagccaatacagcgtgctggccggcaaggtgaacgaaagcaataccgattacgatcccggctttgtgcagggcaccctgcagtacggtttcaacaacctggtaaccggctatgccggcagcattttgagcgacgactatcaggcctggctgctcggcagcggctggaacctgccgataggggcggtgtccatcgacctgacgcatgccgatacccgtctgaaaaaccgccgtgaaagcgggcagagcttccgtatcgcctacagtaaatttctcgatgccaccgcgaccaacttcacgctggcggcctaccgttactccacccgcggttactacagctttaccgacgccatttactctaatgacggttaccgccagctggaacggcagtttgaccgctggcgcgacgaggagggtttgtccgaactggatatgaacacctgggatgcgctgcggtccgcccggccgaaaaatacctttacgcttaacctgaaccagcgtcttaacgaagggtggggcacgctgttcttctccggctcccagcgcgattactggacggccaacgcgaaaagccgcgaataccagttgggatactccaacaatctggggcgcgtcagctactccgtttccgccagccgggtgcgcaacagccagcgtgaggaagagacgcgttattacctgtcgttcagcctgccgctgtcggtgttcgacaacaacgcctacctcagcaccggcctgtcggcgacggactctcactatcagcaaagcacggtcagcctgagcggcaacgcgctggagtccaaccgtctgagctactcgctgaacggcagcaatcgcagcggcggcgacaacatggccggcgtcaatgcggcctaccgtacccgtgtctcgacgcttggcgtctcctacagcgaaggcaacgattatcgccagagcggcctcagcgcgcgcggcagcctggtggcgatcccctggcatgtgctggcgtcgaacgaaatcggcaacaccatgacggtggtcgaggcgccgcaggccgaagggctgatggtcaacggcgacgaaagcatcgtgaccaacgcccagggcctggcgctggtgccctatgccacgccataccggcaaaactcggtcacgctgtcggataccggccacagcagcggggcggaaatcagcggcaacgtcgccaaccacgtgccttactacggcgcggtcagctacctgaaattcgaaaccgatcaacgtcagccattccagctgcgggcgcagcgcgccgatggcgcaccgctgccgttcggcgccgaagttctggatgaaaacggccggtcgataggctttgtcggccaggccagcgtgctgtacctgcgcgtcgaacagccgccaacggcgttgacggtgcaactgcgcgacggccgttgccgcatcgccaaaccgactctggcgctcgacgcgtcgcccggcgtttgccgctaa

SEQ ID NO: 422506 - DNA, 1071 bp, Serratia marcescens
atgatcaggctgatttttttgctgctgctgtccgggttgttcagcggctatagttatgccacctgttttggcaaagggatctcatttgcaccggctttgaatgtcgatctctccgataagctgaatgccaacaccccggtgtgggaggagcaatacagcacccaatatgtcggcacttttgactgcagttcttcaaagagcaaatttacctatacgctcaagctgtcgcccgataataagaatgcggctatttttggttttaacaacggcacgcagtggatacgcgcgcaaatcgtcaataagattggcgatcgtgaactgtcaaagcgcggcgaacattccgccgccgagttaaatacgccgatgaccgtgcgctactcattagaatcgaagcccaaaaatggccgtgtggtgccgggggatacgttgatgctggatgacgcgctgatggtctcggacattaccggcataaagatatgggaattgccgatttggctgttgcagcaagtcgggaaaatactcagttggctcctgaccggcaactggccttatgacgaacgcgatatgtacggccagccgatgaacatcaaatacgcgcccaaaaccaccacctgccgtttcgaaaacgccggcctgacggtcagattgccgaaaatgggcgtggcgcaggtgctgaataacaaccaacccggctacacgccgttctcgctgaacatcagctgccagaacatgcagcaggaaggcatcgccgatcgcgccgtcgagatgttcttgtccagcaacaacctgctggcctccgacgccagcgtgctgaccaatgccaacgcgggcggcgcgcaaggggtggggctgcgcctggtcaaacgcgatatgccgagctcgccggtggtactgtcgccctccaatgtcgatcgcggcagcgccacctcattgtttcacgtcgccgccggcggcagcctgaacagtcactttatcatcggcatgggcgcttattatcacccttatcagcgcgatggcgtgacgcagggtgaaatcaacacctcggccacgctgaacattatttatccctga

SEQ ID NO: 422507 - DNA, 261 bp, Serratia marcescens
atgaagaacgtcatgttgaaaacgatgctgctaggggcttttgtcttttcaggcgcaacagtcgcggcaacgcaaatcaatagtcaacaggcggacgccctgacgccgcgccaggtgattaccgttagcggtgccgcgaatctgagcgatgcggaaaagatgttggcggacaaaaccgccaaggctggcgcccgttactacaaaatcatcgcgatcgtaggcaataacaagctgcacgccagcgcgatgacttatcaataa

SEQ ID NO: 422508 - DNA, 930 bp, Serratia marcescens
atgcaggatttgaacgatcttcaactgtttgctttggtggtgcgacatggtggtttcgccgcagccgagcgggcgagcggcgaagccaaatcaaaactcagcaaacgggtggctcgtctggaggcgagttacggtgcgcggttaatcgaacgttcgacgcgcagtttccgcgtcacggatattggccgcgatgtgtatcgtcagtgtgaggcgattatcgagcggttggaggcgaccgatgccattgtcgcccgtgcgcgcgacgaagtgagcggctgcctgcgcatcagttcgccgcccggtttgatgcagtattataattcccatctgctgttggggtttatggcgcgttacccggacgtgcgcgtacaactgttgatccatgagcgccatgtggatctgatcaacgaaaagatcgatgtggcgtttcgcattacgagtcatttcgaccaggatcaatcattgattaaacgcgatcttggcgtacggcaacgcattttggtcgccggcgcgcagctggtggagaaagccggcggcttgccgcagtcgttcgaacagctggccagcttgccgacgttgtcgatgggggagtggctggatcgcgatcgatgggaattcgaggataatgcaggcaatcaacgtactttcgtacacgtcccccggctgtgttgcggggattacagcacgttgcatagtgcggcgattgccgggatgggcgtcgcgtttttgccgatccatttgtgtgccaacgaattgcgaacgggtcaactgctgcgtctgctgccgcagtggcgtgcgccgagcagcattgttcatctggtgttcaccagcggcaaaggcctgttgccgccggtgcgggcgtttatcgatcacagcgtcgcggtattcgccgaagccaatcgccgcctctcgatgatgccggttgcctag

SEQ ID NO: 422509 - DNA, 471 bp, Serratia marcescens
atggcaagaaatgaaccgattgacgccaatcggctattgaccgtcggggaagtggcgaaacgcagcggcgtggcgatatccgcgctgcacttctacgagagtaaagggctgattcaggcgacgcgcaacgccggcaatcagcggcgttatccgtcggtggtattgcgctatatcgcggtgatcaagatcgcacagcgcgcgggcattccgctggaagagatccgcgccgcgctgagccgtttccccatcggcagcaagctgacctcagaacaatggggagtgctgtcctccgcctggcgcaaaacgctggatgagcgtattcaacggctgacggtgctgcgcgaccatctcgatagctgcatcggctgcggctgcctgtcgctcgccgactgcccgctgcgcaacccgaacgatatattgggccggcaaggagccggcgcgcatattttcgaacacccggatgggcagtga

SEQ ID NO: 422510 - DNA, 429 bp, Serratia marcescens
atgcaacgctttatcaacaccgctctggacagttattggctttggctgctcgcacgtctgtgcttgatggtgatttttatctcgtcggggctcgccaagctgttcgacatcgaagggagcctggcggagatgcgcgccgccggtttgcatccggcctggctgttcaacctagcgtcggcggcggtgctgctgacaggttcggtattgatcctgctgaaccggtgggtgtggctgggcgccggcatgctgtcggtgtttctgatcctgactatcgcgatcgtccacaccttctggaatatgtccgctcccaatatgcagatttctctctacttcgcgctggaacacatcacggtgatcggcgggctgtgggtgacggccatcgccagccgtttgcgtcaacgtctggccaacacgcgtgaggctgcatga

SEQ ID NO: 422511 - DNA, 1083 bp, Serratia marcescens
atgaaacgatatctcattatcgcggcgctgctggcggtactcgtcgtcgctgcggtagcgatgcgttccaccgcgcgtcaaagcgaaggcgcaccggcctatccgccggtgaaagtggcgctggcgcccgcactgcgtgaacaggcggcgcgcagctacgccggcgtgggcgagctggaggcggccagccaggtggaggtggcggcggaaaccagcggccgcatcacgcgtatcctgttcgaatccggccaaacggtgcggcaggggcagttgctggtgcagctcaacgatgcggtcgaacaggctgagctggtgcgtctgcaggcgcaattgcgcaacgccgatctgctgctggggcgcatgcgaaaactgatgaacctcaacgccactgcgcggcaacagttggacgatgcgctggccgagcgggatatggcgcttggcgcggtgcgggaaactcaggccaaaattgcgcagaaggcgatccgcgcgccgttttccggcgtcatcggcattcgccgcgtgcatgaagggcaatatcttaacgccgccgaggcggtggcgaacctggtggacgccgatacgctgcgcgtcaacttttcgctggacgaacaaagcagcgccgggttggcgccaggccaggcggtgtcggtgcaggttggggcgtatcccgatcgcgctttccccgccgtcattaccgctatcgacccgatgatcggcaaatcccgcaccgtgcaggtgcaggcgacgttgaccaaccgtgagggattgctgaaggccggcatgtacgccggcattcgcgtcacgcagcagcagcgcgtggcggtgctgacggtgccggaaacggcgctgacttataccgcgtacggcgataccgtgtttctggcccagcagggtgaaaagggcatgacggtcaagcgcgtttcggtcaccgtgggtgagcgcaacgacgggcgcgtcgagatcgtcaatggcctgcaggaaggcgatcgggtggtgacttcgggccagctcaagctgagcgacggcatggcggccgagccggtggcgcaggataccctgaacgccgcccaggccggttcctga

SEQ ID NO: 422512 - DNA, 3081 bp, Serratia marcescens
atgacatttaccgatctgttcgtgcgccggccggtgctggcgctggtggtcagcaccctgatcctgctgttcggcgcgctggcgctcagcaagttgccgatccgccaataccccctgctggaaaactcgaccatcaccatcagcactgaatatcccggcgcgtcgtccgagctgatgcagcgctttgtcacgcagccgatcgcccaggcggtgtcctccgtcgagggcgttgactacctttcttcctcttcggtgcaggggcgcagcgtggtgacggtgcgcatggcgctgaaccgcgactccacccaggcgctgaccgaagtgatggccaaggtcaatcaggtgcgctacaagctgccggagcaggcttacgatccggtgattgaacgttccgccggtgaggccaccgccgtggcctatgtcggcttttccagtaaaacgctgtccgcgccggcgctgagcgaatacctgacgcgggtggtggagccgatgttcaccaccatcgacggcgtcgccaaggtggaagtgttcggcgggcaaaaaatggcgatgcgcctgtggctggacagcgatcggctggccggccgcggcctgaccgccgccgacgtggccgacgcggtgcggcgcaacaactaccaggcggcgccgggcaaggtgaaagggcagtatgtggttgccaacgtgcgggtgaataccgatctcaccagcgttgaggaatttcgcaatctggtggtgcgcaacgacggcaatggcctggtgcgtttaaaagacgtcggcaccgtggagctgggcgccgcggccacggaaaccagcgccctgatggatggcgaaccggcggtgttcctcggcgtcttccctacgccgaccggcaacccgctggtgatcgtcgacggcattcgccacctgatgccggcgatcgacaagatgcagccgccgggcgtgaagatggcgctggcgttcgaaaccgcgcgctttattcaggcctcgatcgatgaagtggtgcataccctgctcgaagcgctggtgatcgtggtggcggtgatctacctgtgtctggggtcgctgcgcaccgtgttgatcccggtggtgaccattccgctgtcgatccttggcgctgccgggctgatgttggccttcggcttcagcgtcaatttgctgacgttgttggcgatggtcctggcgatcggcctggtggtggacgacgccatagtggtggtggagaacgtgcatcgtcatatcgaagaggggaaaacgccgctggcggcggcgatgatcggcgcgcgcgaggtggcggggccggtgatcgccatgaccctgacgctggcggcggtctatgcgccgatcggcctgatgggcgggctgaccggcgcgctgtttcgcgagtttgcgttgacgctggccggggcggtagtggtgtccggcgtggtggcgctgacgctgtcgccggtgatgagctcgctcctgctgccggccaaacagagcgaagggcgcgtggcgcacgccgccgagtggttcttcggcggtctgacgcggcgctatgcgcgcgcgctggatttttcgctgcgccaccgttggttgaccggcgcgctggcgttgctggtgatgatcagcctgccgctattgtacctgatgccgcagcgcgagctggcgccgaccgaggatcaggccatcgtactgaccgccatcaaggcgccgcagcacgccaacctgaactatgtcgaacgctttgcctacaagctggacgaggtttacaaccgcatgccggaaaccgaaagccgctggatcatcaacggcagcgacggcactgcgtccggcatcggcggcatcaacctgacgctgtggcaggcgcgccagcgctcggcgtcggcggtgcaggccgatctgcagcgggcggtgaacgacgtcgaaggcaccagcattttcgccttccagctgcccgctttaccgggctccaccggcgggctgccggtgcagatggtgctgcgcacgccgcaggactacccgcagctgtatcgcaccctggaagaggtgaagcagaacgccagaaacagcggcctgtttatggtggtggacagcgatctggactacaacaacccgctggcggaggtgcatatcgatcgcgccaaggccaacagtctggggatccgcatgagcgacatcggcgaatcgctggcggtgctggtgggggaaaactacctcaaccgcttcggcatggacggccgcgcctatgacgtgatcccgcagagcctgcgcgaacagcggctgacgccgcaggcgctggcgcgacagtacgtccgcacgcaggacaatacgctggtgccgctctccaccgtggtgtcggtggccgttaaggtcgagccaaacaagctgacccagttcaaccagcagaacgccgccaccctgcaggccattcccgcgcccggcgtttcgatgggcgaagcggtggccttcctcgaacggcaggccaatgcgctgccggccgagtttagccacgactggcagggggattcgcgccaatatacccaggaaggcagcgcgctggcattcgcgttcctggcggcgttggtgatcatctatctggtgctggcggcgcagtacgagagcctgaaagatccgctgatcatcctcatcaccgtgccgctgtcgatctgcggcgccttgctgccgctggcgctgggctacgccacgatgaacatctatacccaggtcgggctggtgaccctgatcgggctgatcagcaagcacggcattttgatggtggagttcgccaacgagttgcagatgcatcaggggctgacgcggcacgccgcgattttgcaggcggcgcaaattcgcctgcggccggtgttgatgaccaccggggcgatggtgttcggcttgattccgctgctgttcgccagcggcgccggcgccgccagccgcttcggcctggggctggtgatcgtatccggcatgctggtgggcacgctgttcaccctgtttgtgttgccgacggtgtatacgctgctggcgcgcgatcacgcggtggcgtcgccccggcagcgtgaactggccgcggcgcaaaaggcgctgacggaataa

SEQ ID NO: 422513 - DNA, 801 bp, Serratia marcescens
atgcgttttaacaacaagatgttggccctggccgccctgctgttcgccgcgcaggcgtcggccgacacgctcgaatccatcgacaactgcgcggtcggctgcccgaccggcggcagcagcaacgtatcgatcgtgcgtcacgcttatacgttgaacaacaacagcaccaccaagttcgccagctgggtggcctatcacatcaccaaagacacgccggccagcggcaagacgcgcaactggaaaaccgatccggcgctcaacccggcggacactttggcgcccgccgattacaccggcgccaatgcggcgttgaaggtcgatcgcggtcatcaggcgccgctggcctcgctggcgggcgtttccgactgggagtcgctgaactacctgtccaacatcacgccgcaaaagtccgatctgaaccagggcgcctgggcgcggctggaagatcaggaacgcaagctgatcgatcgcgccgatatatcctcggtctataccgtgaccgggccgctgtatgagcgcgatatgggcaaactgccgggcacccagaaagcgcacaccatccccagcgcctactggaaagtgattttcatcaacaacagcccggcggtgaaccactatgccgctttcctgttcgatcagaatacgccgaagggcgccgatttttgccaattccgcgtgacggtggacgagatcgagaaacgcaccggtctgatcatctgggccggtctgccggacgacgtgcaggcctcgctgaagagcaagcccggcgtcctgccggaattgatgggctgcaaaaactga

SEQ ID NO: 422514 - DNA, 1461 bp, Serratia marcescens
atggtcagaaccaaacagatcctggtcgttattcatctttgcagctttttggtccttctttacagcctttcaatgatcccgcccctgctgatggggctgttgtataaagaaaaaagcgccttctcatttttctataccctggtggtggccgccacgctcggcggattgggctggttcagcacccggcagtcgaaagtgcagctgcgcacccaggacggttttctgatcatcgtgatgttttggctgctgttttccgcgatcagcgccctgccgctgtggctggatgacacgctgaacgtccggctggtcgacgcgatgtttgagggagtctccggcatcaccaccaccggcgcctcggtgctgaatgacgtctcgaacgtgcccaaatcgttcctctattaccgctcccagctcaattttatcggcggcctcggggttatcgtgttggccgtagccgtgctgccgctgctgggcatcggcggcgccaaactttaccagtcggaaatgcccggcccgttcaaggaggaacgcctgacgccacgcctggccgatacctcgaaaaacctgtggttgatctaccttgggctggggttggcctgtaccgtcgcctttcgtctggcgggcatgccgtggttcgatgcgctgtgccacggcatttccaccgtgtcgctcggcggattttccacccgtaacgaaagcctggggtactacgacagttcggcggtggaaatggtcggcggcattttctctattctggcggcggtgaacttcacgctctatttcattgccgtcggccgtcgcagcctgaaaccgctgtaccgcagccccgagctgcgctttttcctgttgattctggccatcgtcgtggcgatcgtgtgtatcgagctgtaccgctcgggcatgtacggcgtcaaagacgccttcgtgcacggctttttcctcaccagttcgatgatgaccgacaacggtctggccatcgccgattacacccggatcccgtcccacaccatcatgctgctgctgacggcgagtttcttcggcggctgcgtcggctccacctgcggcggcattaaagcgctgcgctttctgatcatgtacaaacaaagccggctcgagatcaaccagctggtgcatcccaacgccatgtacaccatcaaggtcggcaatgcgccgatccaggatcggacgctgcgctccgtctggagcttcttcttcctttacgtgctgttcacctgtctgtttatctggctgctgaacttgatgggctatgatctggtcaccgctttcgccaccgtcgccgcctgcatcaataatatggggctggggtacggagaaaccgccgccggtttcggcacgctgaacgacgcggcgaaatggctgatgtgcgccgccatgctgctcggccgcctcgagatctatccgatgttgatcctctgctcacgcgcgttttggcgtttttga

SEQ ID NO: 422515 - DNA, 315 bp, Serratia marcescens
atggatcttattattgaaaatgtagacagcttcaaggctctggctccgcgcgcgcccgagccggctccggccccgccgccgccggttcatcactacgactcgttctgcgagaacatcgcgctgaaagtggtcttgaaggtgctgctgtcttcggtggacaaaatagtcaaagtgcagatcgccaacaaggtcgagcaggagattacccagatcgaacagcaggtggtgcgcgccggcggcggcccggtgtcgccggacgatctggcgcagatgacgcactatgtgcgccgtacggtcaacaacctgctggaataa

SEQ ID NO: 422516 - DNA, 600 bp, Serratia marcescens
atgacgaaagtgttggtgctttattactcaatgtacggccatatcgaaagcctggcgcaggcggtggccgaaggcgcgaatcgggttaacggcgtggacgtgacgattaaacgcgtgccggaaaccatgacgccggaggccttcgccaaagccggaggcaaacaacatcaacaggcgccggtcgccaccccgcaagagctggcggactatgacggcattatcttcggcacgccgacccgcttcggcaatatggccgggcagatgcgcatcttcctcgatcagactggcggtctgtgggcttccggcgcgctgtacggcaaggtaggcagcgtcttctcctccaccggcaccggcggcggccaggaacacaccatcagttccacctggaccacgctggctcaccacggtttcatcatcgtgccgatcggctatgcgacgccagagctgtttgacgtttcgcaggtgcgcggcggcaccccgtatggcgccaccaccatcgccggcgccgacggctcgcggcagccgagcaacgaagagctgaccattgcccgctatcagggcgagcacgtggcaaaaatcaccgccaagctgaaaagttaa

SEQ ID NO: 422517 - DNA, 576 bp, Serratia marcescens
atgagcaatacggcgcataacgcaaaaaccgatccccccaaggtgctgcaatacctgagcagcaatctgcgcggctaccgccaacgggcgggcctgagccagatggcgctggccgagctttccggcgtcagccgccgcatgctggcgggcatcgaggccggcgatcgcaacgtcagcctggcggtgctcgacaagatcgccgccgccctggcgatttcctttaccgatctgatccaggcgccggaggcgcgcggcagccacatggtcggggaattggcctggcaaggcgcgcagccgggcagccaggcgctgttcgccgccagtgtgccggcacggcagcgggccgagctgtgggaatggacgctgatgccgggcgagcgctatgactctgcgccggacgccgaaggctggagcgaaatgatctacgtgattgccggtaccctgacgctggagctggaacaaggcacgctgacgctcagcgccggcgccgcacaaaccttcaacagcgatcaacgctacgcttacgccaaccacggcgacctgcccctgcgctttatccgcaacgtcgccttctga

SEQ ID NO: 422518 - DNA, 924 bp, Serratia marcescens
gtgtcagcagcaaaaaaatcctttatttccgccgtggttccgcaaatcaggttgccggaagcggtgttgattttcatcaccatgatctggggcggcacctttttggcggtgcatcacgcgatgcaggtcagcgggccgttctttttcgtcggcctgcgtttcgccaccgccacgctggcgctgacgctgttttcgctgcgcgtgctgcgcggcctgacccggtatgaactgaaggcgggcgtgctgatcgggctggcgatcatgttcggttacagcatgcaaaccgtcggcctgcagaccatcaccagcagccaatcggcgtttatcaccgccatgtacgtgccgatcgtgcctctgttgcaatggctggtgctggggcgcttccccggcatcatgtcgtggatcggcattctgctggccttcaccggcctgatgctgctggcggcgccgagcagcaccgacatgacgctgagcctcggtgaaattctgacgctggccggcaccctgggcatggcggcagagatcattctgatcggcgccttcgccggcaaggtcaatatccgccgagtgaccattgtgcagctggcgaccgcctcgctggcctcctttttgatgatggcgccgaccggcgagtcgccgccgccgtattcggattacctgctgtacagcgccatagggctggggctggccagcgccttgattcagctgaccatgaactgggcgcagcgcagcgtttcgccgacgcgcgccacggtgatttacgccggcgaaccggtctgggcgggcatcgtcgggcggttggccggcgagcgtttaccgggcgtggcgttattggggggcgcgttgattgtaatcggggtggtggtcagcgagctgcgcgtgcggcgcagggataaagcggcggtggcgacggaagcggattag

SEQ ID NO: 422519 - DNA, 1401 bp, Serratia marcescens
atggtagatcactctaaaatagcgactgacgcgacgcccgcttcagaagatcatctacggcgaaacctcactaaccgacatattcaactgatcgccatcggcggcgccatcggcaccggtctgtttatgggctccggtaaaaccatcagtctggccggcccttcgatcatcttcgtgtacatgatcatcggctttatgctgttcttcgtgatgcgcgccatgggcgagctgctgctgtccaacctggaatacaaatcgttcagcgatttcgccgcggacctgctcggcccgtgggccggtttcttcaccggctggacctactggttctgctgggtggttaccggcatcgccgacgtcgtggcgatcaccgcctacgcccagttctggttccccgaactatcgcagtggatcgcttcgctgctgtgcgtgctgttgctgctcggccttaatctggcgacggtgaaaatgttcggtgaaatggagttctggtttgcgatgatcaaaatcgtcgccatcgtcgggctgatcgtcgccgggctggtgatgatcgccatgcagttccaatcgccgaccggcaccgtggcctcattcacccatttgtggaatgacggcggcatgttcccgaaaggcatcagcggcttcttcgccggcttccagattgcggtattcgccttcgtcggcattgagctggtgggcaccaccgccgcggaaaccaaggatccggagaaatcgctgccgcgcgccatcaactcgattccgatccgcatcatcatgttctacgtgttcgccctgatcgtcatcatgtcggtgacgccgtggagctccgtggtgccggacaagagcccgttcgttgagctgttcgtgctgatcggcctgccggctgcggccagcgtgatcaactttgtggtgctgacctcagccgcctcttccgccaacagcggcgtattctccaccagccgcatgctgttcgggctggcgcaggaaggcgacgcgccgaaatcgttcgccaatctttccaagcgcgcggtgccggccaacggcctcaccttctcctgcatctgcctgctgggcggcgtggtgctgatttacctgatcccgaacgtgatgacggtcttcaccctggtgaccaccgtatcggcgattctgttcatgttcgtctggaccatcatcctgtgctcgtacctggtctaccgtaaacagcgcccggcgctgcaccagaaatcgatctacaagatgccggccggtaagctgatgtgctgggtgtgcatggcgttcttcgtgttcgtgctggtgctgctgtcgctgcgcgaagacacccgccaggcgctgatcgtcaccccgctgtggttcatcgtgctcggcctgtcttacgtgttcctgcgcaagaagaaaaccgcgtga

SEQ ID NO: 422520 - DNA, 504 bp, Serratia marcescens
atggatgaattgacgcacattatcgccaaatacagtccggagccggagatgttgctgctgctgattttcctgtttgcgctgggtaaatccgtgatcttcgtttcctccatcctgccgcccgcttcgatcacgctgctgatgggcatcgttgcgggcaagcacgcgctgcccctcggcgccgtttgggcggccatcgccctcggcgccgcgctgggatcgatcttgtcgttccactgcggcgcgctgctatgccgccgcgatctacgccgccggctgccggcacgctttcacgcgccgctgcgcaaagcccagcgcgccttgcaaaagagagggctgccgctgctgttcgcctcgcgttttctggcggtgatgcgctataccgtaccgctgatggccggcatgctgaaactgccgctggggcgcgtctatgccaccgccgcgctctcggctgccgcctgggcgctgatcttgatgtcggctgcgcatgtattccccgtatcttga

SEQ ID NO: 422521 - DNA, 1314 bp, Serratia marcescens
gtgaatcacgccacctatgccgctccagcgctcaacgccgccatccgcaaaacctggcgcagactggtgcccttgatgttcgccatgtactttgtcgcctttatcgacagggttaacgtcggctttgccaaggacgcgatggccatcgatatcgcgctgtcgcaatccgcctttgccctgggcgccgggatattttttgcagcctatgcgctgttcggcatcccggccaacctgctgatgaaccgctggggcgccaaacgctggctcagcgccaccaccgcgctgtggggggcgctgtcggcctgtaccgggctggtgatcaacgaacagcagtttatcgtcttgcgctttctgctggggatcgccgaagccggcttttaccccggcatcctgctgctcgcgtcgatctattttcccaataaggtgcgcgcctcggtgatcggcattttcgtgcttggcgtgccggcggccctgacgctcggctcgccgctgtcgggagccttgctggagatgcacggcgtgctgggcaaacccggctggttctggatgttcgtgctggaggggctgccggccgtcgccctcggcgtcttcgcctttttctatctcgacgatagcccgcagcaggcccgctttctgaccgaggaagagcgtgcggcgctggtggcacagttggccgccgaacagcagcaaaccgaaaccagcagcgtcaaagcggcgatgagaagcggcaaagtttggcatctggcgctgatctacggcaccctgcaaatcggcgtgtacggcctgatgtttttcctgccgtcgcaggtcgcctcgctgatgggcacccatctcggcttcaaggcctcgctggtggccgccattccctgggcgttctctgcgctgggcgtctatttcctgccgcgctttgccgacagaaacaccgccagaagattaccgatcgccgtcggctgcatgatcgcggcggcgctggggttggtggtctcttcctatgccggccctttgctcgctatcgtcgccctgagctgttgtgcagtcagtttcctggcggtacagccgattttctggacgtttcccgctcaggtgctcaccggcccggcgctggcggccggcatcggcttttgcaccacgctcggcgccgcgttcagctttttagccccgctgatccgcaccgaggcggaacagcgttttcacagcccgcatgccgggccgctggtgctggccgctttctcgctgctgtgcgccgcgctgttgtgggcgctcagaaaccggcgcgccgaggtgagcaagcaagacgcagagattgccggatag

SEQ ID NO: 422522 - DNA, 303 bp, Serratia marcescens
atgctgaaggtcatcgctgaagattttatccacccggaacacattgcaaccgttatgccatggtatcgcgagctggtggagaaaacccggcaggaacctttgtgcatcagttatgagctgtgtatcgaccagcaggatcccgggcattttatttttatcgaaagctggccggatcgcgccgccctggatgcgcattgccagaccgagcatttcacccggttggtgccgcagatcagccagcatcagcgcaagccttgcaccttcctgtttatgcaggtatttcctgaaacaggtgataaatag

SEQ ID NO: 422523 - DNA, 561 bp, Serratia marcescens
atgacgctgctgaataaataccttgggcaataccagttctcggagcggcatgcgatcgccatcgccgcgccacaggcgcggatcctggcggccgtggccgcttacgatcccaagcacgaccgttttttccgcagcatgatagcgctgcgcgaattgcccgcgcggctgatgccacgcaataaacccagcccgccgccgtttggcctgcataacttttgcctgcttgagcaggatgacagcgcgttggtctatggcctgatcggccgcttttggcaggctgaatacggtctggagcaggtcgctgacggggcgggctttctggccttcgttaagcccggcgtcgccaaactggcgctgggttatgtcgtgagccctctgccggacggccgctgccgcctggtgacggaaacacgcatcttctgccccgacgacgccagccggcggcggtttaccccctattggtatgcgattcgcctggtcagcgggctgatacgccgccgtatgttgcgcgccattaaaacagtcagcgaaaagccggcggtgaatcattcaccaggctga

SEQ ID NO: 422524 - DNA, 567 bp, Serratia marcescens
atgcgccatttgcctctgctgacccccagacttcgcctgcgcccgttcaccgccgacgatctgcccgactttaccgcctaccgcagccacccggacgtgactcgctaccaaagctggagcgactacagcgccgccgatgcgcaggcctttttcgcacggcaacggcggctcgaattcaaccgtgacgacagctggtttcaactggcggtcgagcgccgcgagaacggcgcgttgctcggcgatatcgcggtgcatttcttcgatgaggggcgccaggctgaactgggcgtgaccttcgcgcccagccaccagcgtcaagggctggcgcgcgaggcgctgaacgccgtcatcgccctgctgttcgggccgctggcgaagcaccgtattactgcggtggtggacgcgcgtaatcttgccgccgccacgctgttcggcaaactgggttttcggcgcgaggcccattggcggcaaaacgtttttttcaaaggcgcgtggggcgacgaattcggtttcgctctgctgcaaagcgaatggcgggagaatgcaaagcatgacgctgctgaataa

SEQ ID NO: 422525 - DNA, 720 bp, Serratia marcescens
atgagtaaagccctcccggtgctttatgagcgccatggcgagcaggttgcggtcatcaccctcaatcggccggaaaaaaagaacgccatcaacctgcagatggccgagctgatccgcacttacctgcggcaggcggataacgatgactcggtgcgcgcgatcgttctggccggtcaaccggcggtattttccgccggcatggatgtcgacgccttccgtcagggcgaactgcccatcgtcacgccggaggggtttggcgggctgatccatgcgcagatcgccaaggtgatcatcgccgccgttgacggcatcgcgtacggaggcggctttgagctggcgctggcgtgcgatctgatcgtcgccggccagaacgcgcgcttcagtttccccgaaaccgggcttgggttagtcgccgcacaaggcggatgcgcgcgcttgccgacgcgcatttccccctatgtcgcactcgactggctgctaaccggcagaaccgtcggcgcacgggaggcgctgtcacacggcgccatttcccgtatcagcgagggggcggcccgggaagaggcgctgcgcatcgccgaacagatcgccgcaaaagatcttgccgccagccaaacggtgaaggccatcgtgcgccaggggctggcacggcaagaagccccctcattcgcttttcaacaaggcccggtcgagcgcctgcgccaggctgccgcccgccgataa

SEQ ID NO: 422526 - DNA, 1173 bp, Serratia marcescens
atgacgctagcggattataacggccatctggtcacgctctgtctgatggcgaccggcacgttcgccatcggcaccgacgcctttatcgtggccggcgtgctcagtgacatttccgacacctttgccgtcagccctgcgcaagcggggcagttgatatcggtattcgcactggcttatatgctgttcgcgccgctgaccgcctggctgctgggcaacgtcaaccgcaagcatatcctgcagctggcgctggtgctgttcatcgccggcaacctggcctgcgcctgggccaccagctacctgcagatctcgttcggcagagtgctggccgcattgggagcagcctgttacacgccgcaggccgccgccgccgcggtggggctggtggcggaaaaacgccgcggcctggccatttccatcgtctatggcggcatgacgttggctattgcgctcggcattccgttcggtacctttctcgccaaactgatcggctggcgtgaaatcttcctgttcatcgccctgctgggggcgattgcgctgctgggcctgtcgttggcgctgcgcgccatcgcgccgccgggcaagcattcgctgaaagagcggctcgccccgctgcggcaaaaggcggtgctgaccacgctgctgatcacctttttcgccgtttgctcggaacacatcgtctatagctacgtcagcgtattgctgaaaaacacccagttcggcccgcaggcgatcctgcccctcgcgctgctggtgttcggcattggcgcggtgatcggcaactttgcctccggcgcgttaaccgatgccctcggcagcaagttcgtgctgctgttttccgtggcgatccagacgctgtccttgttcctgctggccttttatgtcacttccccctggtgggtgctggccatctttctggtctggggcatcactggctggatgtacctggtgccgatccagcatcacctgttgtcgctgtcgaaacgctttggcgcgctgaccgtgtcgctcaacagctcggtgctgtacgccggcatcgcggcgggcggcatgctgggcggcctgacgctctacgcgctgccggcctattacctgccgctgttttcgctgccgctcggcgccatcgccctgctgctgacactgctgtttttccggggagagaccggcaatgagtaa

SEQ ID NO: 422527 - DNA, 1212 bp, Serratia marcescens
atgagcgtactgaacattcttgaagaaaagctggcggaaaccaaaaaacaggggcgttttcgcgagttcctcaaccttgaacgcggcgtgcaggacaaaccctgggccaccagccacgggcaccacggtgagcgccgcctcaacgtctggtgctcgaacgactatctggcgatgagccaccaccccaaagtgctgctagccaccaccgaagcggttaaccgggtcgggctgggcacctgcggcgcccgcagcatttccggcacctcggtctaccacagtgagctggaaacgctgttggccagcgcctacggcaaagagtcggcgctgctgttcaccaccggtttcggcgccaacgacgccaccttgtccaccctgtgcgacgccattcccgatctgatcgtgttctccgacgagctgaatcacgcctcgatgatttacggtatccgctacagcaaagcggagaaaaagatcttccgccacaacgacgtggcacaccttgccgaactgctgcaggccgccgatccggcgcggccaaagctgatcgccttcgagtcgctgtattccatggacggtgacttcgccccgctggcgcagatcgtggcgctggcggagcaatatcaggcgctgacctatctcgacgagatccactccgccggcgtctatggcgaacgggggctgggctacgccgaacagctgggcctgctggataaaatcaccattattcagggcgggttcggcaaatcttacggcgcggcgggcggttatatcgccgcgccccgctcggtggtggaggcggtgcgcagctgggctccggcattcgtcttcagcacctcgtcgccggcgccggtggtggccgccgcgctggccagttttaaatacaacctcgagcatgacacccagcgcaagcacctgctggcgatcgtcgatcacctgaaaaccggcctgcgcgctgccggcatcccgctggtgtcggccgacagccatatcctgccgctgcgggtcggcgatccgcaccgcaacaaacacatcagcaaagtgctgctcgatgagcatgatatttacgtgcaaccggtcaatgcgccgacggtgcccgcaggcagcgagcggctgcgggtgacgccgacctcggcgcactcccatgccgacgtggagacgttcctggccgcgctggggcgagtctgggcggcgaacgatctgcggagggcgggatga

SEQ ID NO: 422528 - DNA, 1212 bp, Serratia marcescens
atgagcattaacgatgacggcgtttatctgatcgacggcacgcgcacggcgattggcgcctatggcggcagcctggcgcatacccgccccgacgacatggcggcaacgatcatccgcagtctgctgcagcgccatccggcggcggaagcgaagctggacgaagtggtgctgggctgcgccaaccaggccggcgaggacaaccgcaacgtcgcccgcatggcggcgctgctttccgggctggatccgtcggtgccggccatcaccctcaaccgcctttgcgcctctgggttggatgcggtgatctacgccgcggcgaaaatccgcagcggccttagcgaactgattctggccggcggcgtggaaagcatgagccgcgcgccctatgtgctgagcaagggcgacacgccgttcgacaagggggtgaagctgtacgacaccacgctgggatggcgctttgttaacccgcggctggcggagcgctacggcagcgatccgctcggcatcacggcggaaaacgtggctcaacggcagtacatctcgcgcgaggagcaggatctgttcgcgctggcctcgcagcaaaaggcccgccgggcgatcgacagcggccggctggcgcgggaaatcacgcccgtggacgtgccggcggatcgcaagaccacgcgtacattcgcgcaggatgagttcccgcgcctcagcacgctgcagcagctgcaggcgctgaaaccggcgttctccgccggcggttcggtcaccgcgggcaacgcttccggcatcaacgacggcgccgccgcgctgctgctggcttccgggcgctacgtgaaacgccaagggtggcaaccgctggcggagatcggcgacagcgcggccgccggcgttgaaccggcgttgatggggctggggccgatcgcctccaccgagcgcttgctgcagcgcggcgggttcaccttgaacgacttcgacatcatcgagattaacgaagccttcgcctcacaggttctggcggcgctgaaacactggcgcatcgacgcccacgacgcgcgggtcaacccgaacggcggcgccatcgcgctcggtcacccgctggggatgtccggcgcgcgcctggtgctgtcggcggcgctggaactacgcgatcggcaggccggcaacgcattggtgacgatgtgcgtcggcgtcggtcaggggctgtcattaaaccttaaagccgtttaa

SEQ ID NO: 422529 - DNA, 1530 bp, Serratia marcescens
atggcagaaagtaatgcggcaattcaatcggctgcgattatcggtgcgggaacgatgggcagaggcatcgcttatcttttcgcgcaaaaaggcattcgcacggtgctttataatcgcaacggcaataccctcaatcaggctcgcgaatatatcgcgcaagacctgaacaagaaagtcgaacagggcaagatcgcgctgcaggataaaggcgcagtgctggccaatctggtgttcacctcggtgtttgagactatcgccgacagcgatctggtgatagaaaccatcgccgagcaagagcaaaccaaacttgaggtgctggcggccatcgccgcggcggtcaagcccgacacgctgatcgccaccaatacctcctcactgtcgcttaacaagctggcaaccgcggtgacgcacagcgagcggtttatcggtttgcactttttcaatcccgcgccgctgatgaaactgattgaaatcatcccggcctactttaccgcacgcgccaccaccgaacgttgccgtcagctggtggccgcgttggggaaacgcgatgtcgtctgccaggccacgccggggtttatcgtcaaccgcatggcccgcccctactacctggaagggttccgcctgttggaagaacacgtggcgcgcgcgccgcagatcgaccgcgccctcaaggccggcgggcactttcgcatggggccgctcgagctgaccgattttatcggccaggacatcaactatcaggtcagccggcaaatctggcaggacatgcaatacgatccgcgctatacccccggccatctgcagcgttcgctggtcgatgccggtctgttggggaaaaagaacggccgctcctattttgccgccgaagaaaacgccttaccggtaacggccgcctccaatgcagacgtcgagacgctgcgcgtttacggcgaacaccctttttttaccctgttgcaacagcgggccgcgcttcagtggccacggctgcgcgtggagcaacggccggccttaccgggtctggggccggccgtccagatcaatgaggctttcaccgtcagcgtcaccgatggccgcacggcgagccaattggcggagctgacggcggcggatgcctttgtggtcgatgtcgccctgaactacgccgacacggcgtatctggtggcagcgcacaaccgccacgcctctgcggccaataaggcgctgtttttacgcctgctgcacacggcaatcccgcaggttgaatttatcaaggactccccggcgctgatcgtcgcccgcgtcctcagcagcctgatcaacgagtcggtgatcatggtggaaagcggcgtctgcagccgggaagacatcgatgtcgccgccgtcgccggcgttaactacgccgacggcattttcggctggctcgatagcctgggggagaaaaacgtcaggacgacgctgagcaacctggcgcagctgctgcacgcggcacgctatgcgccgcattacacccttctacacgccgcgcaaccggtgctgacgaccacgccttaa

SEQ ID NO: 422530 - DNA, 717 bp, Serratia marcescens
atggatacccgcactcaacggctcatggcggaggtgattggcagcctggccgatcgcgaacgttttctgacgcagctggggccctgcgctgaggcgttggggtttgattatttctcctacatcgtgttttcctgttatccggccagccgccccaagatgctgatcgaagggaatttttcagcgaactatctcgaagattatcggcggcagcgggtgtatttgcaggatccggttattgagcgcgctcaccattccacgctgcagtttcagtgggacgaaagcttttatcacgagcggccgctggtttggcggcatatggcgcagttcggcctgtgcgccggttggtcgcagtcggtcaaggattgctatggccggctggggatcctgacgtttgccggcaaagcgctacccgagcaaacgccgcaagcgcgggcggcaaatgaaaccttcttcctttggctggcgcaaaccgcccataaaacgctgcgtgaagccttgatctcggtgaacgacgacgcgataaaagatgtgctgacgctgcgcgaaaaagacatcctacgctggtgcagcgaagggaaaacggcggaagagatcgcgctgttgatgggggtgagcgagcgcacggtcaatttccatatcggcaactcgattaaaaaactttctgtcgctaataagaccgccgccaccgccaaagcggtttatttgcagctgatttaa

SEQ ID NO: 422531 - DNA, 429 bp, Serratia marcescens
atgtacaagactattttagtgccgatcgatattgaagaggatctgttgaccgagcatgcgctgaagcatgtggaatatttggcgaagctgtccggcgctaaagtgcatttcttccatgcgctgccggatgcctcggcgtttgttactgcctattcgttcggtctcaaggagtttgagaatcaggcggaagtgaaggcggtggataaactgaagaaaatcatgtccgaaatcgatctgccgttggatcgcctcaattataccgtcagcttcggctctgcacgcgatcaggtgttggaactggcggaagagatcgacgccgatctgatcatcatcggttcgcgtcgcccgagcgtgaaaacctatctgctgggatctaacgccgccgctatcgttcgccatgccaatatttcggtaatggtggtcagataa

SEQ ID NO: 422532 - DNA, 681 bp, Serratia marcescens
atgccattagaagtcgatgggattatcagaggcgatcggggcagtgaaccgagccgttggcaacatgcgtcaaccaagccgcttattacgctgacctggcatcacaccattccctggaactgtttgcgtaatgtctggaatggtctggtggcggggcagcattgggacgcgctggacgagtttatgaacctgatcggtgtgccaaaccgcgccgaggtgctcaaacagatcaaaaataaaaatctgcaggatcgcgatggattacacactctggtgacctggcaaggatggaatatcgtcgaggggccaggtaacgaatatcgcgcgcagggggacgatcccggcgaaaacttcgacggttggtcgggtaagggaatgagcactaatcagcaagcgacgctgcagcaggtcaacgtgttgtatcaggtgatggcgccgttgggaagccgggcgctggatgccgccagacaggcgccgcccattaccgctgaggaagcgggcgtcttgcaacggacgattaaacagacccgcccaacgttgcgaggaaaggaaccgatccggtggcaagaagatatgtggcatcaggtgcagccgggtaaagaggcgaaacactttgcccgctgggataccaaaccggtgtggcgcaagcgcctgcacagcgatctggctcaggcaggataa

SEQ ID NO: 422533 - DNA, 1014 bp, Serratia marcescens
atgacatccatgcacgtgctgtcgctggaacaggcttatcaactggcgttgcgtacgctgcgcagcaacggtttcaatccggctcatgccgaggcggtggcgcaaaatgtcacccagggtgaacgcgacggctgcgcttctcacgggctataccggctgttgggctgcgtgcgatcgctgcgggcaggcaaggtctctgccgatgcgatgcccaggttgttcgaccaggcaccggccatcttgcgcgccgacgccggcggcgcgttttccctgctggcctaccgcaccgctctgccggtctttatcgagaaggtgcgcgccaatggcatcgccgcgctggcgatcaaccgctgcgtgcatttctccgcgctgtgggccgacatcgaaccgctgatcgaacaggggttggtggccttggcctgcacgcccagccacgcgtgggtgacgccagccggcggttcgcgaccgctgttcggcaccaaccccatcgccttcggctggccgcgtgcggatcggccgccgtttttgttcgacatggccaccagcgcggcggcgcgcggcgaaatcgaactgcatcgccgcgccggcaccccgctgcctgaaggctggggcattgataaggcgggcaatccgtccaccgatgccgccagcgtgctggagggtgcaatgctgaccttcggcgggcataagggctcggcgctggcagcgatggtggaattgttggccgggccgctgatcggcgatatgaccagcaaggaatcgctggcctatgacgacggcaccggttcgtcgccttacggcggtgagctgatcatcgcgttggatcctgagcgttttctcggtgcggataaggcgaaatatttcgccggagcagaggcgatgtttgccgatatgcaggcgcaaggcgcacgcattcccggcgaacgccgttatcggcagcggcgccagagcgagcaatacggcgtggaaatccccaggacgttgtacgacgaaatcgtggcgctgtgcgattag

SEQ ID NO: 422534 - DNA, 1566 bp, Serratia marcescens
atgacaacccaaggcaaattcaagaagcagcttacgctcaccgatctgacgttcatcggtctgggcgccatcttcggctccggttggctgttcgccgccagccatgtctcctccatcgccggcccggccggcatctattcctggctgatcggcggcctggcggtgctgctgctcggcatcgtctactgcgagctgggcgccgccctgccgcgcgccggcggcatcattcgctatccggtcttctcacacggcgaactgatgggttatctgctgggatttatcacgctgatcgccttctccagcctgatcgccatcgaagtcgtcgccgcccggcagtacgccgccgcctggttcccgttcctcagccagccgggttccggcgacccgaccccggtcggctggctggtgcagttggcgctgctgtgctttttcttcgcgctcaactattacagcgtaaaaaccttcgccaaatccaataacctgattagcgtgctgaagtttctggtgccgctgctggtgatcgtggtgttgttcagctttttcaaaccggaaaacctgcacagccagggctttgcccccttcggttccgccggcgttgaggccgccatttccgccggcggcatcatctttgcctacctcggcctgacgccgatcatttcggtcgccagcgaggtgcaacggccgcagcgcaccattcccatcgcgctgatcctgtcggtggtgctgtccaccatcatctatgtgctgctgcagatagcgtttctcggcagtatccccagcgagatgctgagcggcggctgggccggcatcagccaacagttctccctgccgttccgcgacatcgccatcacgctcggcatgggatggctggcgtttctggtggtcagcgacgcgatcgtttcgccgagcggcaccggcaacatctatatgaacgccacgcctcgcgtgatctacggttgggcacgcgccggtaccttcttcaaactgttcacccgggtggatggcgactccggcatcccccgcccggcgctgtggttgaccttcgctctctcggtattctggacgctgccgttcccgtcgtgggaaaagctgatcggcgtggtgtccgccgccctggtgctgagctacgccatcgccccggtcaccgccgccgggctgcggcgcaatgcgcccgatatgccgcgtccgttccgggtgcgcggtttctgcgtgctcggcccgctgtcgtttatcatttcggcgctgatcgtcttctggtccggctgggacaccgtctcctggctgctcggcttgcagatcctgatgttcttcatctacatcctgttcaagaatcaggtgccgacccatgccgttagcctccggcagcaaatttggtcctcgctgtggctgatcgtcttctatgcgctggtgatcgggctttcctatctcagcagctttggcggcatcggcgctattgcccacccgtgggacaccctcaccatggcggtgattgcgctggcgatttactactggggcgcctatacctgtttaccccaggccaattttatcggcgatgaagaagaatga

SEQ ID NO: 422535 - DNA, 1617 bp, Serratia marcescens
atgcccaacgctcgctatgccgccatcagcggccaacaatttatcggcggccagcgccgcgccgaaggggaagcggcgctgctcagcctgcgcgccgacgacggtcagccgaccggctaccgcttccaccaggccacggcggcagaaaccgccgccgccgccgaagccgccgccgcggcttttgcgccctattcgcagctcagcgcggaactacgcgctaactttctcgacgccatcgccgaggagatagacgcgttggatgatgttttcttcgccttcgccatgcaggaaacggccttgccccaggcgcggttgagcggcgaacgtgccagaaccagcggccagatgcggctgttcgccacgctgctgcggcgcggcgacgtcgagggcgtgcgcatcgactgcgcgctgccgcagcgttcccccctgccgcgccccgatctgcgtcaataccgcacggcgctcggcccggtggcggtcttcggcgccagcaacttcccgctggcgttttccaccgcgggcggcgacaccgccgccgcgctcgccgccggctgcccgatcgtgttcaaggcgcacagcggccatatgatcaccgcggagctgaccgctcaggcgatcgagcgcgcacgggaacgcaccgggatgcccgccggcgtcttcaacatgatcttcggcaaccgcgtgggggccgatttggtacaacatccggcgattcaggcggtgggattcaccggctcgctgcaaggtggccgggcgctcttcgatctggcgacgcaacgccctcaacctatcccggtcttcgccgaaatgtcgagcatcaacccggtagtgatcctgcccaaggcgctggcgcggcgcgagcagcgcatcgcgcaggaactggtctcttccttcacgctcggctgcggtcagttctgcaccaagcccggcgtgatagtcgcgctgcgcggcgccgccttcgatcggctggccgaaacgatgagcgccctagtcaacgccgccgagccgcagccgatgctgaatgccggcacgctggagcactaccgtcacgggctggcggccctcgatgcccacccgggtatgcggcatctggcaggccgcagcgaaacgcccgctcttcgcgcggcagcgcagctttatcaggcggagggggcgctgctgctgcaggccgacccgctgctgcaacaagaggtcttcggcccggtcagcatcctggtggcgatggatgacgaagcgcagctgcatgcggcgctggcggcattgcaaggccagttgaccgccacgctgctggcggacgacgacgatctcgcgatggccgccgggctgacgtccctgttggcgcgcaaagccggtcgggtgctgttcaacgggtatccgaccggggtggaggtgtgcgacgccatggtgcacggcggcccttatccggccaccagcgacgcgcgcggcacctcggtaggcacgctggccatcgagcgtttcctgcggccggtctgtttgcaaaacacccccgcagcgctgttgccgccggcgctgcaggacgccaacccgctcaacctgctacggctggtgaacggcgtttacacccgagatcccctggtttcacctgcccaaaattag

SEQ ID NO: 422536 - DNA, 921 bp, Serratia marcescens
atgagccataaagccataagctggagcggcgtattcccggcggtgacgacccagttccgcaacgatttctctctggatctcgacgccactcatacggtgatcaaaaacctggtgcgcgacggtgtctccggcctggtggtgtgcggcaccgtcggtgaaaatacctcaatgacggtgcaggaaaagctggcggtgatcgaagtggcgagagacgccgccgacggtaaagtgccggtgatcgccggcatcgccgagttcacaaccgccttcgcgcagaatatggcgcgtgaagcgcaaaaggccggcgtcgacgggattatggtgatgccggcgctggtctactccgccaagccgcacgaaaccgccgcgcatttccgcagcgtcgccggcgcgaccgatctgccgatcatggtctacaacaaccctcccatttacaaaaatgacgtcacgcccgacatcctgacctcgctggtcgactgcgagaacatcgtgtgcttcaaagactcgtcgggcgacacccgccgctttatcgatctgcgcaacgaagtcggcgatcgcttcgtgctgttcgccgggttggacgatgtggtgctggaaagcatcgccgtcggcgcgcaaggctggatctccggcatgtccaatgccttcccgcgcgaaggggaaaccctgttccggctggcgaaggaaaaacgctatgaggaagcattggcgctgtaccgctggttcatgccgctgctgcacctcgatgcccgccctgacctggtgcagtgcatcaagctttgcgagcagcgagtcggccgcggcagcgccgtcactcgtccgccgcgcctggcgctgcagggggaaacgctcagcgagatcaacgccatgatcgataaagcgctggccactcgcccggcgctgccgaacgtcggcctgtaa

SEQ ID NO: 422537 - DNA, 855 bp, Serratia marcescens
atgagatccacttcagactatcagcctccggtttctctctcgccgccttcactcgtggggctgccggaacaggaggacgtttttgccgtcgaacatctgtcacgcctgtgcgacgggctggcgcagcagcgcccgaacaacctgcgcgatctgctgaatacgctggcgctgatcgcgccgttgctgaacgcgatccccaacgtggtgttctttatcaaagacgcccaggcccgctacctgctggccaacctcacgctggccaggcgctgcggtttcaaaaccgtcacgccgctgctgggcaaaacctccgccgacgtttttcccgctcagctcggatccgactataccgagcaggatctgcgggtattgcgccacggcgtgctgatccaggatcagctggaaatgcacctgtacaacggccgagaaaccggctggtgcctgacgcaaaagctggcgctgtatgatgcacagggaaaaatcatcggtatggcgggtatttctcacgatctgcaggaggccagggccaatcacccggcctaccaacggctggcggcgatcgacgtgcacatccgccgccactatgcccggccgatcgcgcttgaggagctgacggcactgaccgggttgtcggtggcgcagatcgaacgctactgcaaacgtatcttccacctcaccccgcgccagatgatccataaagtgcggctggaaaaggccactgaactgctggccggcgatctgccgatcaccgacatcgcgctgcagtgcggctacaccgatcacagcgccttcagccgtcagttcaaagcgatgaccggctccacgccgcgcgatttccgcctgacgctttccgcttaa

SEQ ID NO: 422538 - DNA, 948 bp, Serratia marcescens
atggcactttctgcgcatatcaccgctttgcgggcgatcgattctcataccggcggagagccgacccgcctgatcgtggaaggttttcccgatctcggcgcgggcagcatggcggaacggcgggcgcgcttcgcgcaacattatgatgattggcgctgcgcggtgatgctcgaaccgcgcggcaatgacgtgctggtgggggcgttgctgtgccgcccttgctcgccacaggccaccgccggggtgatcttctttaacaacagcggctatctgggcatgtgcgggcacggcactatcgggctgatcgcttcgctggcgcacctggggcgcatccacgccgggcgccatctgatagaaaccccggtcggcccggtaaacgccacgctgcacgaggacggcagcgtcacggtagagaacgtggcggcttatcgttaccgccgccaggtgcggcttgaggtggcgggttacgggccggtgaccggtgacatcgcctggggcggcaactggttcttcctgatcggcgagtcgccgttgtccatcgataaacaaaatctggaggcgttgaccgcgttcacctgggcggtgcggcagacgttggaacaggcgggcattcacggtgaagacggcggagcgatagaccatatcgaactgttcggtgacgatccgcaggccgacagccgcagctttgtgctgtgccccggtaaagcctatgatcgttccccgtgcggcaccggcaccagcgccaaactggcgtgtctggcggcggacggcaaactggcgccggacacgcagtggcggcaggccagcgtgatcggcagcgaattccaggcctattatcgttggaacggcgatcgcatcgccccctttattcgcgggcaggcctacgtgtgcgccgatagccagctgctgctcgacgaacgcgatcccttcgtctggggaatacgctga

SEQ ID NO: 422539 - DNA, 1125 bp, Serratia marcescens
atgggcgccgagcggggagccgatgtcatcgtggtcggcgccggcatcatcggcgccgcctgcgcctggcggttggcgcgggaaggctatcgcgtctcggtggtggacgatcgccgcgccggcgccaccgccgccggcatggggcatctggtgtgcatggacgataatccggccgagctggcgttgagcgcttattcgctgcggttatggcgtgaagtgacggggcgcatgccgcaagcgtgtgcctggcgcggctgcggaacgctatggctggcggataaagcggatgaaatggccatcgccgagcaaaagcgggtgcggctggcggagcagggcgtggccgcggaattgctgacggcggaacagatcgccgccatggagccgatgctgcggcacggcctggccggcggactgcgggtgccgggcgacggcattctgtatgcgccgctcgcggctcgctggctgttggccgacggtggtgcggcaatcgacgtggtgcacggcgaagcggcagcgctggaagagggagccgtgcggctggcggacggcagacgcctggccgcgccggtggtgctcctggcgtgcggccttggggccaatggcctattgccgcagactttgctgtacgccaaaaagggccatctggcgatcaccgatcgctacccgctgcgggtgcggcatcaactggtggagttggggtatggggccagcgcgcatgccagcgacggcacgtcggtggcattcaatgtgcaggcacggcccaccgggcaatggctgatcggttcttctcgccagttcggcgccgtcgattcggtgttggacatgccgctgttggcggcgatgcttgcgcgtgcgcagcatttcttgcccgcactggcgcagatgaacatcattcgctgctggaccgggctgcgcgccgcctccgccgacgggctgccgctgttgggcgcgcatccacggtattcctggctgtggctggcactggggcacgagggattgggcgtcacgaccgccctcggcagcgctgcgctgatcgctgcgcagatcggccggcaaacgccggagattgacgattccccgtatttggcggcgcgggcgtttgccgccgaggagctgcctgtatga

SEQ ID NO: 422540 - DNA, 261 bp, Serratia marcescens
atgaatgaaagacaaaacacgatcgcgttgagcatcgatggcgagcaccggcgggtgccggttggcctcagcgttgctgcggcgctcagcctgtgcggcgacgatcgttgtcggttgtctgtttcacatcaaccgcgcgctcccttttgcggcatgggcgtttgtcaggagtgccgggtgaacattaacggtctgcgtcgcctggcgtgccaaacgctgtgccaagccggcatgcgcattgagaggagcgatgatgagtaa

SEQ ID NO: 422541 - DNA, 1269 bp, Serratia marcescens
atgagtaacttagactgtgaggtgctgatcgtcggtgccgggccggccggcatggcggcggcgctggccgcggcggaaagcggtggccaggtgcgaatgattgatgataatccgcatcccggcgggcaaatttggcgcgatgggccacaggtggttttgcctgaaacggcgaaccgctatcggcaggcggtggcgacgaaggaaaatattgcgctgcagcccggttgcaagctggtggcgcagtgtggcgctaaccgattggcgtatgaagacgccgatggctgcggcgtgattcgctatcaaaagctgattctatgcaatggcgcgcgtgaacttctgctgccgttccccggctggacgctgccgggggtgaccggcgccggtggtctacaggcgcaaatcaagcaagggctggctatccgcggcgaacgagtggcgatagccggcagcgggccgctgctgttggcggtggcgaacagcgtgaaacaggccggaggcgaggtggtgctggtggctgagcaggcgccgctttggcggttggcggcgttcgccggcggcctgtggcgttggccaggcaagctgcgtcaggcgttttctctgatgccgcatcgttaccgtgccggtagccgggtgcaggcggcgttggggcaagaacgtttaaccgcggtgcgcgtcaataacggcgggcgggaaagaacgatcgcctgcgacaggttggcctgcggttttggtctggtggcgaacattgagttggcgatgctgctggggtgtcggatagaacacgacgccgtagcggtggatcattggcagcaaaccagccaggtgcaaatttttgctgccggggaatgtaccggcatcggcggcagtgaattggcgctcaccgaaggcgccatcgccggttatgctgccaccgggcagcgggaaaaggcggatcgcctggcggcgcagcggcggcgatggcggcgttttgccacggcggcggccagagccttcgctctcgatgagcgcttggattcgctggccaaaccacaaacgctgctgtgccgctgtgaagacgtcatgctggaacaggtgcgtcatcagccggattggcacacggccaagctgggcagccgctgtggcatgggggcatgtcagggtaaagtctgtgcgacggcggcgaggcagctttttggctggcctttgccgccgccgcgtgtgcctttaacgccggtcagagcggaaacgttggttgcgctggggctgcttggcgatgacgacgacggctga

SEQ ID NO: 422542 - DNA, 360 bp, Serratia marcescens
atgaagaattgccgttgtttgattgccttgccgttattgatgttgaccgcctgcacccaatgggaaaggcccggcgcggttgagagtacccgaaatgccgaatatgccgaatgccgcagtcgcggctacgaacgttttccgccggacatggtgcgggacgtggagttcagctacgaaaacaaatacattccttgcgagaaaaataagaaagactgtccatcgggataccgctatgacaaggaaccgtcgattaaaacagtgcaaaccgatcgcaatcagtccgcacgagacgccaccatcgaagcctgcatgtacggcaaaggctggcgagagaaaacctactattggccgcaatggtga

SEQ ID NO: 422543 - DNA, 432 bp, Serratia marcescens
atgaagcattacgccgcgttgttatttgcctctgcactgttgacgggatgtgcgacccaagccgtgccgccgcaacaggctgagttgccccccccaagccgtctgatgctctatcagaatatcccggatacgccttacgccacggtggtggtggtgcgcgacagcggaatgctggcgggcagctgccgcaccggcgtctatgtgaatggggagtttgccgcttcgctggaggcgaaagaaaaagcagagtttcgcgtgccgccaggcaatgtttcggtcagtatcgggcaagatatgatcgagaatcacctgtgtatttggcgtgagaccggcggcagtataccgatgacgctgcgcgccggtgaacgccgctatctgcgtatcgccggcgatcggcagcgtggctttgttttgcaggcggggcgaccgtaa

SEQ ID NO: 422544 - DNA, 342 bp, Serratia marcescens
atggctatccttgtcaaagcgctgatcggcgcgctggtcgtggttctgatcggcctgttggccaaaacgcgcaactattatatcgccggtttagtcccgctctttcccactttcgccctgattgcgcattacattgttggcaacgagcgttccattgcggcgctgaaaaccacgctgatttttggcatgtgggcggtgctgccctacctggtgtatttgatctcgctgtatttcctgatcaacagtttgcggctgtcgttggctctgggggcggcggtactgtgctggattgcggctgcgtggctattaattacgctatggggatggtggcaagggcgttaa

SEQ ID NO: 422545 - DNA, 225 bp, Serratia marcescens
atgagcaacgttgatttcactacgtctgcaaacccggaaatcttggcgaccgaggttgcctgcctcaaagctacgctgacgctgatcttgaagtcgatcggccaggccgacgccgggaaagtcatcatcaacatggaacgtttcatcgcccagattgaagatcctacccaggcggaaatctttaagaacagcattcagcaaatcaagcacgcttaccgtcagtaa

SEQ ID NO: 422546 - DNA, 657 bp, Serratia marcescens
ttgattagcgttcttcttgttgatgaccacgaactggtgcgcgcagggatacgacgcattcttgaagatatcaaaggtataaaagttgtcggtgaggctcagtgcggtgaagacgccgtaaaatggtgccgtggcaacgctgtcgatatcgtgctgatggacatgaatatgccgggcattggcgggctggaagccacgcgcaagattgtgcgttatgcacccgacgtcaaagtcatcatgttgaccatccatactgaaaatcctttgcccgcgaaggtgatgcaggcgggtgccgccggttacctgagcaagggcgccgcgccgcaggaagtgattaacgccttgcgttccgtgcatgcggggcagcgctatatcgcgtctgatatcgcccagcagatggccctgagtcagctggagccgcaggctgaaacgccgttcagctgcctgtctgaacgcgagttacagatcatgttgatgatcaccaaaggcaaaaaggtgaatgagatctcggagcaactgagtctcagcccgaaaacggtgaacagctaccgttaccgcatgttcagcaaactgaatatcagcggcgacgtcgaattgactcacctggccatccgacatggattgttcaatgcggagacgttgttaagcagtgaatga

SEQ ID NO: 422547 - DNA, 1833 bp, Serratia marcescens
gtgaatgaccgttttgatgccaaagccttcctgagtaccgtcaccagccagcccggcgtctaccgtatgtacgacgccacgggtacggtgatctacgtcggtaaagccaaagacctgaaaaagcgtctcgccagctattttcggcagcaggtcagcagccgtaaaaccgagacgctggttaaaaatatcgcgcaaatagacgtaacggttacccatactgaaacagaagcgctgctgttggaacataactacattaaattgtaccaaccgcgatataatgttcttttgcgagacgataaatcttacccgctgatttttctcagtgcggatacccatccccgtttggcgatgcatcgcggcgccaaacacgccaagggcgaatatttcgggccttttcccaactcttacgccgtacgcgaaacgctggcgctgctgcagaagctgttcccgatccgccagtgcgaaaacagcgtatatcgcaaccggtcgcgcccgtgcctgcagtatcagatcggccgctgtctggggccttgtgttgccggcctggtgagcgaagaagaataccggcagcaggtggactatgtacggctgtttctttcgggcaaagatcagcaggtattgcaccagctgattgcgcgtatggaagaagccagcaaactgcttaatttcgaagaggcggcgcgcattcgcgatcaaattcaggccgtgcgccgcgtcaccgagcggcagttcgtgtcgggcgacagcgacgatctggacgtgatcggcgtggcgttcgatgccggtatggcgtgcctgcacgtgctgttcatccgtcagggcaaggtgctgggcagccgcagctatttccctaaagtgccgggcggcacggatatgggcgaagtggtgcagacctttgtcggtcagttctatctgcagggcagccaggcgcgcacgctgcccggtgagatcctgctggatttcagcctgccggaaaaagacctgcttgcggagtcgctctccgagttggcggggcgcaagatccaaattcaaagcaaaccgcgcggcgaccgcgcccgttatctgaagctggcgcgtaccaacgcggcaacggcgttgaccaccaagctttcgcaacagtcgactattcatcagcggctggcggaattggccaaggtgctgaacctgactgaaatcaaccgcatggagtgcttcgatatcagccacactatgggcgaacagaccgtggcttcgtgcgtggtgttcgacggtaacggcccggtgcgagcggagtatcggcgctacaatatcagcggcatcactcccggcgatgactacgcggcgatgacgcaggtgctgaagcgccgttacggcaaggcgctggaagagaaaaagatcccggatgtcatctttatcgacggcggtaaagggcagctcggcatggcgatcgacgtcttcaaatcgctgaacgtcacctgggacaagaataagccgctgctgattggcatcgccaaaggcgccgatcgcaaggccggattggaaacgttgttcttcgtgccggaaggcgaggggatttcgctgccgccggattcgccggcgctgcatgtgatccaacacatccgcgacgattcgcacaatcatgcgattaccggccaccggcagagaagggcgaaagtcagaaataccagcgcattggagctgattgaaggcgtagggccgaaacggcgccaggtgctgttgaagtatatgggcggactgcaacctttgttgaacgccagcgtggaggaaattgcaaaagtgccgggtatttcacaagcattggcagaaaagatctacaatgcattgaaacactga

SEQ ID NO: 422548 - DNA, 549 bp, Serratia marcescens
atgcaattgaatataccgacttggcttaccctgtttcgcgtagttctgatcccattctttgtgctggcgttttatctgccgttcaactgggctccgatggtttgcgccgttatctttgtgttcgccgccgtcaccgactggtttgacggctttctggcacgccgctggaaacaaacgacgcgcttcggggcgtttttggatccggtcgcggacaaagtgatggtggcggtggcactggtgctggtggcggagcactaccacagctggtggatcacgctgccggcggccaccatgatcgcccgtgaaatcatcatttcgtcgctgcgcgagtggatggcggaaattggcaagcgcagcagcgtggcggtatcctggatcggcaaagtgaaaaccatggcgcagatgatgtcgctggtgggtttgctgtggcggccggatcgctccgtagagtatgtggcgattggcttgctgtatatcgcggcggtgctgactttctggtcgatgttccaatatttgaaagcggcgcgcaacgatctgctggaaccgtga

SEQ ID NO: 422549 - DNA, 1944 bp, Serratia marcescens; identical to SEQ ID NO: 162953

SEQ ID NO: 422550 - DNA, 642 bp, Serratia marcescens; identical to SEQ ID NO: 162952

SEQ ID NO: 422551 - DNA, 309 bp, Serratia marcescens; identical to SEQ ID NO: 162951

SEQ ID NO: 422552 - DNA, 894 bp, Serratia marcescens; identical to SEQ ID NO: 162950

SEQ ID NO: 422553 - DNA, 597 bp, Serratia marcescens; identical to SEQ ID NO: 162949

SEQ ID NO: 422554 - DNA, 213 bp, Serratia marcescens; identical to SEQ ID NO: 162948

SEQ ID NO: 422555 - DNA, 195 bp, Serratia marcescens; identical to SEQ ID NO: 162947

SEQ ID NO: 422556 - DNA, 228 bp, Serratia marcescens; identical to SEQ ID NO: 162946

SEQ ID NO: 422557 - DNA, 273 bp, Serratia marcescens; identical to SEQ ID NO: 162945

SEQ ID NO: 422558 - DNA, 339 bp, Serratia marcescens; identical to SEQ ID NO: 162944

SEQ ID NO: 422559 - DNA, 480 bp, Serratia marcescens; identical to SEQ ID NO: 162943

SEQ ID NO: 422560 - DNA, 2496 bp, Serratia marcescens; identical to SEQ ID NO: 162942

SEQ ID NO: 422561 - DNA, 357 bp, Serratia marcescens; identical to SEQ ID NO: 162941

SEQ ID NO: 422562 - DNA, 1428 bp, Serratia marcescens; identical to SEQ ID NO: 162940

SEQ ID NO: 422563 - DNA, 399 bp, Serratia marcescens; identical to SEQ ID NO: 162939

SEQ ID NO: 422564 - DNA, 3147 bp, Serratia marcescens; identical to SEQ ID NO: 241721

SEQ ID NO: 422565 - DNA, 1116 bp, Serratia marcescens; identical to SEQ ID NO: 241722

SEQ ID NO: 422566 - DNA, 1329 bp, Serratia marcescens
atgcttcgcaaagacatacgcaagggatggatatgggcggtatccacgctttgggccggcaccgtgctagcccagccagtagccgcccctcacgtcccatccagaccagacagccacatggtcgcccaattgtgggagtcagcttggcagcggcagccagaagccgctggagaaggcgcctggcagcaggccgcccaagcacgccaagagacggccggcagttgggtggcaggtccgatggcgctggaagcctccaccaaaactgatcggttcaacaaccgcaacggacagcgcgaatatgaagtcggggtggctattcccctttggatgcctggtgagcgcgcctcgtcggcacgctgggcggacgcggaaagcctcgcgctatccagccggatgctggccgccaagctacgcacggccggacaggttcgccaggcatggtgggcatggcagcgtgcccaggccgaattggtggcggcgcaggatcgcacccgcagcgcggacgagttggcgcaagatgtggctcgccgagttcgcgcgggcgacctggcgcaagccgacagaaaccaggccgatggcgccttggcgtcggctcgtagtgccctggccattgctcaggccgaagaaatcacgcagcgcgaggcgttgttggcactgaccggcatcgagagtatcccgtcgcaggccgattccgcgcagccggagcagtcaggtgtccgagttcaaccggcatcggcacagccgtccggcgcgttgttgggtaaccaccctgcgctgctggaactgcagcacaaggcgctggcggcccgccgctctgcggaactggtgtcccatcagaagtacgccaaccccgaactgaccctggcgaccacgcgggatcggggcggctacggcgaacgctacaaccagacgatcacggtgggtgtgcgcattcccttcggtacgggtagccgtcataccgagcaattgtccagcgccaatgcgcaggcactggaggctgagtcggcactcgcggcccagcgcacccggctactctcggaaattcgaactgcccaatcgcgcgaactggcaaccagcacccagatgcaggccgcttcggagcgccagcgactagcccaacaaacgcgcaccttctaccaaaagtcgttcgcgatgggcgagacggacatgccgacacgccttcgcatcgagcaggaggccaccgaggccgagcgcgcggcgctgctcgccaaggtggagcatgccgcggccatctcgtccctgttgcaggcacaaggcacgctgccgcagccgaccgagactttcactgacatctccggcacgcgctga

SEQ ID NO: 422567 - DNA, 258 bp, Serratia marcescens; identical to SEQ ID NO: 241725

SEQ ID NO: 422568 - DNA, 1311 bp, Serratia marcescens; identical to SEQ ID NO: 162933

SEQ ID NO: 422569 - DNA, 1023 bp, Serratia marcescens; identical to SEQ ID NO: 162932

SEQ ID NO: 422570 - DNA, 378 bp, Serratia marcescens; identical to SEQ ID NO: 162931

SEQ ID NO: 422571 - DNA, 570 bp, Serratia marcescens
atgtccaagaaaattcgctttgctgttctgctttccgcactttttgctgctggagtaaacgctcaaccgttcgccgcagatatgacacggcaacaggtccaggaggatctggctgcttggaggcaatctgggttggaagcgttgtctcgcggcgaaagcggcccggatacgttcagccctcaataccaggctgcctttcagcgctacttgcaattgacccaaggtgatatgtatcaggcgccctcagcaggaaagactcgtgctgaagtgatggctgatttggaactgtggaaaatctccggcatgcacgcgttcacctcgcgcggaatcaccaccgcttcgcacacccaagcctaccaacaagcctacgagagctatctccagctcaagctggttgcggcttacaaggctccggtggcattgactcgtgctcaagtaaagagtgatttggcagattggcaggttgcgggaatggctggattctgggctggtgagcagacgcctgatacctatagtgatgcctaccgcaccgcatttgaaacctaccagatgctgcgcaacaaaaaatga

SEQ ID NO: 422572 - DNA, 2715 bp, Serratia marcescens; identical to SEQ ID NO: 162929

SEQ ID NO: 422573 - DNA, 1308 bp, Serratia marcescens
atgcgtaaaaaaatcagaatcattgtggtggcaggcgtcatcgcagccgtcggggggatagcgatcgctgcccgcgacgccaaggacgagggcaaggccgcggcgcccccggcgggcgcgccgatggcgccgcaggtgcccgtggccgaggtcattacccgcacggtcgcgccatcggccgagtacaccggcttcctggccgcgcccaagaccgtcgagctgcgctcgcgggtcggcggcgccgtcgatgcggtgagcgttcccgaaggtagcctcgtgcgcaagggccaactgctgttccagatcgacccgaggccgttccaggttgcgctcgacacggccgtggcgcaactgcgtcaggccgaggtgctggccagccaggcccaggccgactttgaccgcgccgagcgcctggtggcgaccggcgccgtcgcgcgcaagacctatgacgatgccgcctccgcacgcaacgcgcgccaggctcaggtgcaggcggctaaggccgccgttgctgcggctcagctggacctgtcctacgcccgcgtcactgcgcccatcgccgggcgcgtcgaccgcgtgctcgtgaccgagggcaacttggtcagcggtggcggcgccggcgcggccacgctgctgaccacgatcgtatccatcgacccgttgcacgtgtacttcgacattgatgaggccacctatctcaacgtcgtcagccgctcgcggcccgctgcgggcgccggtagcaaggcttcgctgcccgtgcaggtcgggctgaccacggacaagggtttcccgcacaggggcgcgctcgacttcgtgggcaacaccattgaccgaagcaccggcacgatccgcgcgcgcgccgttgtgcccaacccggatgggcgcatggcacccggcatgttcgcccgggccaagctgtccaccggcgcggcgcgcgaggccgtcctgatcgacgatcaggccgtgggcaccgaccaagggcgcaactacgtgctggtcgtgggcgagaacaaccaggcccagtaccggcccatcgaactggggccggtggtggacgggctgcgcgtcatcaacggcggcctgcaggccggtgagaagatcatcatcaagggcctcgtgcgccccggcatggcggtcacgccgcgcatggtgcccatgcaggcgcccgcggcaccggccgccggcgcgaccggcgcgaccaaggctgcggcaaacgctccggctcccgctgcggcgcctgccaaggccggtggcgcggaccccgccaaggctgacggcgcggccggctcggcggaggcccgcaaatga

SEQ ID NO: 422574 - DNA, 3177 bp, Serratia marcescens; identical to SEQ ID NO: 162926

SEQ ID NO: 422575 - DNA, 1506 bp, Serratia marcescens; identical to SEQ ID NO: 162925

SEQ ID NO: 422576 - DNA, 387 bp, Serratia marcescens; identical to SEQ ID NO: 162924

SEQ ID NO: 422577 - DNA, 1131 bp, Serratia marcescens
atgaccgaccagagcatcacgcgccgaaacatcggcgttctcaccgccgcgcaggcgctcggcggcgccagcgcgcccatcgtgatgtcgctgggtgggctggtcggccagcagcttgccaagaattcggcctggatcaccttgcccgtgagtctgttcggcctgggtcttgccatcggcaccttgcctgccgccttcatcatgcggcaccatggccgccgcaacggatacgtggtgggggtcggcttcggcgtggcctcgggcctgatcgccgcgttgggcatcatgctggcctcgttctggatcttctgcgccggcaccttcctggcgggcttctacggcgcgtatgtgcagagctaccgcttcgcagccgccgacaccgccgaggacgcgcttaaggccaaggccatttcctgggtcatggtgggcggtctcgcgggcgccatcatcgggccgcagttggtgatcttcacgcgcgatgcggtagcgggcacgccctacgttggcagcttcctcagccaggcgctgctgccgctgatcgccttgccgatcctgctgatgctgcgcacgccgagccagacccaggccgaagcagtcgccgatagcggtcggacggtgctgcagctcttggcgatgccgcgctatctgctggccgtggctgcgggcgtggtgtcctatggggtgatggcgttcgtgatgacggccgcgccggtggcgatggtcaaccacgggcattcggtggacaacgccgccctaggaatacagtggcacctgctggcgatgttcgggccgagcttcttcaccgggcgactgatggtgcgctacggcaaggagcgcgtgaccgccgtcggcatggtgctgctcgccgcctccggggtggtggccctgggcgggctcggcctgtcccacttctggggctcgctggcgctgttgggcatcggctggaatttgagtttcatcggcgccacggcgatggtcaccgactgccacaccccggccgagcggggcaaggcgcagggcatgaacgacttcttcgtcttcgccgccacggcggccgtggtggaaaatcgcatgtcgcgcgcaacgaagcacaggccgtcggcaattttaaagaatattaactgtttttag

SEQ ID NO: 422578 - DNA, 3441 bp, Serratia marcescens
atgtcagatattattcccggatattgcacactttgccgttcgcggtgtgggacgctgagtgaagtagcaaatgaccacctgatcaaggtacgggctaaccctgaacaccctaatggtaaggccatgtgtatgaaggggaaagcggcacctgagctggtggacagcgcaaatagaattctgtacccgatgaagagaactcatcctaaaggtgcagaggatccgggctggcaacgtataagttgggaagaggctatgtcaacgatagccggacaactggaaaaatttaaacgagaggatggagctgaatctgtcgctttcggctttacgagcccaagcggtacccccctcagtgatgcaattgaatggttagagcgatttgttcgtatctatggcagcccaaataccagctatggaactgagatatgtaactggcataaagacgttgcacatcgatggacctttggctgcggcattcctgttgctgattattcccatgccgatcttattcttctttgggggcataaccccgcgaatacttggcttgcccaggctagtgcgattggtactggtcgaaataacggcgcaaaactgattgtcgtggatcctcgcccgacacccttagcgaaagaagcaaatgcctggcttgatgtcaatcctggaactgacggtgcattagctttggggttaagccatctcctggtagaacgaaacctgtttaatcatgagtttgttcgaaactggactaatggtcctttgttggttcgaaatgataatggttattttcttcgggaaaaagatattaacccacttgccatcagtaatcgctatacagtttgggacgaacacaaccagcaagtcacatttatcgattccgagactcgaactgaagaaacgctgatgcctacagctgcacttgagggcaatgttgaagtcgcaatagctgatggtgcaaaaatttcctgccaaacggcgttttcatcttttaaagatatgttggctaattatgacccagaaaacgtaagccgtatcaccggggtatctgttgcgtcaattgaagccgctgcgagtttgattgccggggccaagaaaatcgcctaccacagttggtctggagtggctcaacacactaatgccacccaaacagaacgtgcgattgcgacactgtatgctttaaccggttgtttcgatcaggaaggatgtaatcgaatctatgccagccacccggtaaatgtggttaattcaccgacattgatgcctaaatcacaatgggataaagcattaggccttgaagaaaggcctatcgggccgccttcacaaggttgggttcattctcaggatatctggcattcagtattagaaggtacaccctataaaattcgcgggttaattggctttggtgccaacatattactttcacaaagtgatacttctctcggacaacaggcgcttgaggcgcttgagttttatgcccatgtagatttgtttgaaacgcctacatcaaagtatgctgatatccttctgccagttaacactgcctgggagcgcgaaggcctaagaaccgggtttgaaagtagtgctgctgctcaggaccacattcagttgagaaaaaaaatggtctctccgcgcggtgaaagccgttccgaccttgagattgttttcgatcttgcatgccggttaggaatgaatgaagcgttcttcgacggcaatattgaggcagcctggaattatcaactagaaccattaggtttgactgttgagatgctcagaaataagccagaaggttacgatatcccgcttgagcataaagtcagaaaatatgctttcagagacccaaatagtggatatctggcaggtttcaatacagaaacaaaacgtgcagagttttactctgagatccttcatcactatggttacaatcctttacctgagtatgtacagccgcaagaataccagcgcaacgatcctgattatccattaatgctgacatccgttaaaagcggattcttctgtcatagccaacatcgaagcctgactagcctacgaaaaaaagcaccttatccaacggtagacatttcggcaactctggctgacgaagaaggtatcaagacgggggattgggtagaaattgaaacgagagcaggtcttgctcgatttagagcaaaagtggaagccaaactctctcatgaaactgtaattgctgagtttgggtggtggcaggcttgtcctgattttggcaaaccttcatacccggttaaaggtgagtacagtagcaattacaatagtttaatcagcggtgatagctatgatccagtcagcggtgctttacctttgcgttcattccgctgccgcattcgccgcttgaatgattttgagctgataaggcgcccctgggaaggtcgtaaaacattcaaagtcattgaactgaaaaaagaagcagataatgttacgacaattaccttccaatcgaacagtgaaggctacttacctgattatgaaccgggccagcatatcactgttagctgttgtccgatgagcgattctgaagagatcgttacccgggcgtattcgctgacaggccctgcgtttgttcatgaccgtaaaacctattccatttctgtccgtcatcagaaagcgactgatgagaaaggtgagtatgttgaaggaataatgtcatcctacataaacacgcatttgcagataggcaaggatgttgaacttacccctcctggggggaatttcattgtcccgctcaatgccgtccagcctgtcgtaatctttgctggcggtattggaattactccattcatttcctatctggagtctattaacccccaagcggaaggtccggagatctggcttttctatgctaatcaaaatagtaggctacatgcgtttaagaaaagaattgcggagctaaatgcgtctattgacaggcttaaagtaattaatatctacaatcagcccctcgactgtgatattccaggattggattatgatagagctggttacgttggtgcgggagatgtcgaggcatatcttattgagaataatgctcgttattacatgtgtggtccgcagcctatgatggatgcgatatcgcgagggcttcaggagagaggtgtacctgcatttgctattttctacgagatatttcgttctccagcaaaaataaataatgatccctcattacgtcataaagtcatttttgcaaaatcaggaagaacagagatttggaccacggataaaggtactctacttaattttggggaaaagcttgggattcaaatgcctagtggttgtcgtgttggacaatgtgaaagctgttcaactagggtgattgcagggaacgtacagcatctgaatggtgtggagccctctgatgagggggcatgtttgacatgtcagtgcattcctgccggtgatatcacgattgatgcttga

SEQ ID NO: 422579 - DNA, 516 bp, Serratia marcescens
atgcatacagccgacgactttaaacaattagcaaagcaaacctccaacgggcaactgcgaacccgctatctagctttgtatcatttcaagaatggggaaacacgaacccagatagcaacttaccttggggttgccagaggcagtgttaatacctgggtatccaactatctggcgcacggacttgaaggtctgcaatccaaacctagtccgggtagaccctgtcagctctccgtctcccagcgagaacagatcgcacattttatcaaagaaaatgcggttaaaaaggagggggggcgtttgattgcacaggatgtacgacaatacattagcgacaccttccaaatcgattatcagttgcgaaacgtataccgcatcatggatgcgctcggtttcagttggataaccagtcgctctaaacaccctaaacaatcacaacaaacccaggacacttttaaaaaatttcctgctggaaacgatccttcacactcccggtcatcttcctctggatcgcgttga

SEQ ID NO: 422580 - DNA, 1236 bp, Serratia marcescens
atgatgaaaatgaaagttgggatattgctgatggcagttgcagtgacagccaatacagaagtggtacttgcaaatgatgatgcaagcgaaacgcaaaaaaaaactgcaaatgcgcctgcaggtccacaggtacccgtggctgttgccgtatcacggaatattataccttctgctgaatttaccggttctttagcggctattaaaacagtggagctacgccccagggtaggaggggcaatcgaatctgttacggtgccggagggaagtctggttcagaaaggacagatgttatttcaaatcgatccgcggccctaccaggttgtgcttgatagtgcacaagcgcaattacgacaggcagaagctcaggcgttccaggcaagccgcaattacgagcgtattagccgtctggtaaacggaggtgctgtttcgcgtaaagactatgatgatgcatcttctgagaaaaatgcccgcgttgcacaggttcaggtatcgaaggctgcagtcgaagcagcaaagctggatttgtcatactcgcgtgtgactgcgccaattgatggccgtatcgatcggattttagtaactgaaggtaacttggttagcagcagccaggggggggccgcgactctattgacaacaatcgtttcgtccgaccctttatatgtttattttgatattgatgaagcgacatatctcaatactgtcagtaaggctcggcctgatgttgtcggacgtagcaacgaaaaattacccgtacatataggtctggcaaatgagaaggggtatccgcacgggggggcgcttgattttgttggcaaccaaattgatcgtaataccggcactgttcgtgtccgggctattatcccgaatgctgatggtcttcttactcctggagcatttgccagagttcagttaggcactggtagtgagcaaaaagtaattttggtaaacgatcaagccgtaggcacagatcagggcaataagtatgtccttgttgttgatgccaataataaggcgcagtatcgcccgatagtgttggggccaatggtcgatggattacgtgttatcagcgacggtctgaaggccggggaaaaaattatcataaaagggctcgtacgaccggggatggccgttacgccagacatcgtatcgatgcaaacgctgttgagcgtacctgagaggcagcctgaaggtgcatctaaaaaatcgaatggcaaaaatgagggaggtagtaaatga

SEQ ID NO: 422581 - DNA, 1776 bp, Serratia marcescens
atgaaatttcctcatttcttcatccagcgccccatatttgcaattgtcttatcagtttttatgctgatagcgggttctttagcgttttttcaacttcctctcagtgaatatccgtccgtaacaccgccaaccgttcaggtaacggcaagctaccccggagcaaaccccaatgtaatagcagatactgttgccgccccgcttgagcaagccatcaatggggttgaaggcatgctttacatgagttctcaaactgcttctgacggccgaatgattttaaccatctctttcagacagggaactgaccccgatattgcgcaaattcaggttcagaatcgggtatcacgggctttgcctcggctaccaacggaagtccagcaaataggggttgtgactgaaaaaacctcgccggatattcttatggtggtgcatttgttctctcctgatgagcgttatgatccactttatgtttctaactatgcaatgttaaacgtacgtgatgagctttcacgcttaccaggtgtcgcaagcatagcgctgggaggtgaaggggaatatgccatgcgagtatggttagatcctaataaagtggcttccagagggttaacatcaagtgatgtcactgctgcgattaaagaacaaaacgttcaggtagcggctggctctgtcggacagcaacctaatgcatcgtcatcattccaggtcactgtgaatgccttagggcgcctaactactgaggaacagttcggcgatatagttattaaaaccggagatgacggacaaattacgcgcttgcgtgatgtggctcgtcttgaactcggttcagataactactccatgaggagtttactaaataataaaaatgcagtgggtatgcagattgttatgaccccgggcgccaatgcacttgaggtgtctgcatcggtaaggtcaacaatggaacgcctgaaagtaaggtttccggaaggtattcagtacagtatcgcttatgatccgaccgtgtttgttagtgcttccctgaaatctgtcacgacgactttattagaggccacaatattagttgtgctggtcgtgatgctatttttgcaaacatggagagcatcaatcatcccattgatcgcagtgcctatttcattagtgggtacgtttgcattaatggatgtatttgggttctcactcaatacgctatctttatttggtctggttctttcaattggtattgttgttgatgatgcaatcgttgtggttgagaacgttgagcgccatattgcaaaaggactctcaccaaaagacgccgcaagaaaagcaatggacgaggtaacggggccaattctggctattacctcagtactggcagctgtgtttattccatcagcattcctctcggggcttcagggcgaattctatcgtcaatttgcattgacgattgctatctcaacgattttatcggctatcaactccttaacattgtctccggcattagcttccgtactactgaaaccacatcaaggtatagagaagcaagatttgttgactcgtgtaatggatcgttttttcggatcttttttccgtcgttttaaccgtttctttgatagcctgtcgaattcctatgttgggacgattcgacgtatcgttcgcggaagtacaattgtactcattctgtatgctggttttctggcactgaccttcctgggcttcaaacaggttcctggtggttttgtgcctgctcaggataaatattgctcttttgtcaaatacatagaatcatcctatgtataa

SEQ ID NO: 422582 - DNA, 696 bp, Serratia marcescens; identical to SEQ ID NO: 241741

SEQ ID NO: 422583 - DNA, 411 bp, Serratia marcescens; identical to SEQ ID NO: 241742

SEQ ID NO: 422584 - DNA, 702 bp, Serratia marcescens; identical to SEQ ID NO: 241743

SEQ ID NO: 422585 - DNA, 258 bp, Serratia marcescens; identical to SEQ ID NO: 241744

SEQ ID NO: 422586 - DNA, 873 bp, Serratia marcescens; identical to SEQ ID NO: 241745

SEQ ID NO: 422587 - DNA, 1872 bp, Serratia marcescens; identical to SEQ ID NO: 241746

SEQ ID NO: 422588 - DNA, 627 bp, Serratia marcescens; identical to SEQ ID NO: 241747

SEQ ID NO: 422589 - DNA, 633 bp, Serratia marcescens; identical to SEQ ID NO: 241748

SEQ ID NO: 422590 - DNA, 366 bp, Serratia marcescens; identical to SEQ ID NO: 241749

SEQ ID NO: 422591 - DNA, 1521 bp, Serratia marcescens; identical to SEQ ID NO: 241750

SEQ ID NO: 422592 - DNA, 372 bp, Serratia marcescens; identical to SEQ ID NO: 241751

SEQ ID NO: 422593 - DNA, 1398 bp, Serratia marcescens; identical to SEQ ID NO: 241752

SEQ ID NO: 422594 - DNA, 948 bp, Serratia marcescens; identical to SEQ ID NO: 241753

SEQ ID NO: 422595 - DNA, 447 bp, Serratia marcescens; identical to SEQ ID NO: 241754

SEQ ID NO: 422596 - DNA, 495 bp, Serratia marcescens; identical to SEQ ID NO: 241755

SEQ ID NO: 422597 - DNA, 786 bp, Serratia marcescens; identical to SEQ ID NO: 241756

SEQ ID NO: 422598 - DNA, 2886 bp, Serratia marcescens
atgcggtggaaactcccatggccgaagctggccggcgccggctccagtagcccggctagcgatgagcagccggacagctggcagcgccacgtcgaggccttgcgccaggccggcatccccgaacccggttcggcagtccacggccgcaagccagcgaccgtggccgacgagcaggcgctgtacgacgttgcgccgtccttcgtggaactgctgccctgggtggagttcttgcccgggtcgaaatcgatgctcctggaggatggccaatcggtggcggcgttctacgaactggtgccgctgggcaccgaaggccgggaacccggctggctcgcgcatgcccgcgacgccctggaaaacgcgcttcaggacagtttcgatgaactggacgagaacccgtgggtgctccagctctatgcccaggacgaaccgagcttcgaccagtacatgcagaccttgcgcgattacgtgcagccacgtgcgcgcggctcggcgttcaccgagttctacttgcgcttcttcggccaccacctgcgcgctgtggccaagcccggcggcctgttcgaggacacggtggtcacgcggctgcgctggcgcggccagacgcggcgggtgcgcatggtgatctatcgccgtgcaactgggcaggcaagccgccgcggccagacgcccgagcagatgctgaacatcgtctgcgaccgcctgtgcggcggcctggcgaacgccggcatccaggcacggcgcatggtcgcagccgacgtccacgactggctgctgcggtggttcaatccgcgcccggcgatgcttggaccgagtgcagaggaccgggagcgcttctacgcgctggcgcgctaccccgacagcaccgaagaaagcgaggccggcgaaatcgagctggcgagcgggcgggatttcagccagcggctgttcttcggccagccacgctccgacgtggagcacggcacctggtatttcgacggcatgccgcaccgcgtgctgatcaccgaccggctgcgcatgccgcccggcaccggacacctgaccggcgagacccgcaaaggggatgccatcaacacgctgttcgaccagatgccggaagacaccttgctgtgtctcacgatggtcgccacgccgcaggatgtcctggaagcggatctcaaccacctggcgaagaaggccgtgggcgagacgctggcgtcggagcagacgttgaaggacgtgcaggaagcccgctccctcatcggcagcgcacacaagctctaccgggggacgctggcattctacctgcgcggacgcgacgaagcggaactggaccggcgcggcctggacctggcgaacgtgatgctcaatgctggcttgcagccggtgcgcgaggacgacgaggtggcgccgctcaacagctacttgcggtggctgccatgctgctacaaccccggccaggatcggcgcaagtggtacacccaactgatgttcgctcagcacgcggcgaacctgtcgccggtgtggggccgcgctcaaggtacggggcacccgggcatcacgatgttcaaccgcggtggcgggccgatcaccttcgacccgctcagccgcctggatcggcagatgaacgcccatctgttcctgttcggccccaccggctccggcaagagcgccacgctcaacaacctcttgaatcaggtcacggccatctaccgaccgcggctgttcatcgtggaggctggcaacagcttcggcctgttcagcgacttcgcacgcatgctcgggctgacggtaaaccgggtcaagctggccccaggttcgggcatcagcctcgcgccattcgcagacgcgcgtcggctgatcgagacgcccagcgacgtgcagacgctcgacgccgacgcgctggatgaagacccgccaccagatgcctcggccatggaggcggacgagcagcgcgacgtgctcggcgaactggagatcacggcgcggctgatgatcacgggcggagaggacaaggaggaagcccggatgacgcgggctgaccgctcgctgatccgtcagtgcatcctcgacgccgccgagcactgcgtggccgacaaacgcacggtgcttacgcgcgacgtgcgcaacgcgttgcgcgcccgcggccaggacccgacgctgcccgaaatgcgccgcgtgcggctgctggagatggcggatgcgatggacatgttctgtcaaggcacggacggcgaaatgttcgaccgcgacggcacgccgtggcccgaagccgacatcaccttggttgacctcgcgacatacgcccgcgagggctacaacgcgcagctctccatcgcttacatcagcctgatcagcacggtgaacaacatcgccgagcgcgaccaatacctgggacgcccgatcatcaacgtcaccgacgaaggccacatcatcacgaagaacccgctgctcgcgccctacgtcgtgaaaattacaaagatgtggaggaaattgggggcctggttctggctcgcgacgcagaacatcgacgacctgccgcgcgccgcggagcccatgctcaacatgatcgagtggtggatctgtctcagcatgccgcccgatgaagttgagaagatcgcgcggttccgcgaactctcgcccgcgcagaaggcgctgatgctttcggcgcgcaaggaagcggggaaattcaccgaaggcgtcatcctctccaagagcatggaagtgctgttccgcgccgtgccgccgtccctgtacctcgccctcgcgcagacagaacccgaggagaaggccgaacgctaccagctcatgcagcagtacggctgcaccgaactggaagcggctttcaaggtggccgagaagatcgaccaggcccgcggcatcgagtcgccggccctggaactgtcgtaa

SEQ ID NO: 422599 - DNA, 441 bp, Serratia marcescens; identical to SEQ ID NO: 355889

SEQ ID NO: 422600 - DNA, 1419 bp, Serratia marcescens; identical to SEQ ID NO: 355888

SEQ ID NO: 422601 - DNA, 912 bp, Serratia marcescens; identical to SEQ ID NO: 346002

SEQ ID NO: 422602 - DNA, 693 bp, Serratia marcescens
atgagccgcttcaagaacgagatcacccacctgcaggcgcacatcaagaccttgcgcctgggcgcgggcgcgctggtcattgtcgccctggtcatgggcggcggctggtggagcgcgccgcgcgacctgaccatccacgtcccgcccgacctgcgctctggcagtacccgcaagtggtgggaagtgccgcccgaatcggtctatgcgttcacgttctacgtgttccagacgctgaaccgctggccgaccaatggcgaagaagactactcgcgcaacctccacacgctctcgccgtacctcaccccgtcctgccaggccttccttcgcgcggactacgactaccgccgctccaccggcgagctacgccagcgcgtgcgcggcatctacgagattcccggccgcggctatggcgacgaccccacggcgcgcgtgcgcaccgtgtccgatcgcgactgggtggtgacgctggacatcacggcggacgagtactacggcgccgagcaggtcaagcgcgccctggtgcgttatccgatcaaggtcacgcgggtggacgtcgatcccgcccgcaacccgttcggcctggcgctggactgctacgaaggcgcgccccagcgcatcagtgcaccggagccggcgcgcccggcgtcgagtggcctgtctccgcaagcgcctcaaggaggaaacaccccatga

SEQ ID NO: 422603 - DNA, 411 bp, Serratia marcescens; identical to SEQ ID NO: 241761

SEQ ID NO: 422604 - DNA, 360 bp, Serratia marcescens; identical to SEQ ID NO: 356857

SEQ ID NO: 422605 - DNA, 234 bp, Serratia marcescens
atgaacggcgcccaggtctcggcatttcaagccaacagcggcatcgcgccttccgcaatggcgaccgtcctggtcggcgtcgtgttcgcggtcctgctcgtgtggggcgtctgggccatccgaacggcctacgtggggtggtccgagagccgcctcaaccagcgccagttcctcggcgtctgcatccgcttcgtcgcgatgtacctcgtcctgagtttcttccttctgtcctga

SEQ ID NO: 422606 - DNA, 384 bp, Serratia marcescens; identical to SEQ ID NO: 334557

SEQ ID NO: 422607 - DNA, 471 bp, Serratia marcescens; identical to SEQ ID NO: 324122

SEQ ID NO: 422608 - DNA, 504 bp, Serratia marcescens
atgtggctcggcctgtctggccgcttccgggcgcggtggagccaagccattcatgaggagtggaaacgcaatctgttgatcaaccgccccgatctcacccgggttcaggtcgacaggacgtcggatctcatggacagggccattccggacggcttggtggagggctacgaagcgctcgtggcaggcctgacattacccgatccgaacgatcggcacgtcctggctgcggcgattcgctgcggtgcgagcgtgattgtgacgttcaacgaacgtgatttcccgaacgatctgctggctccgtacggcatcgaatcgcagcaccccgatgagtttgtggacaacctgctggatctggatgcggccgccgtagtgtcggctgcgcagcgccagcgtgcccaactcaagcatccgccgatcgatgtggaccgctatctcgaaatcctgctgcgccaaggccttgtgcaaacgaccaaggtgctggcgacctatcgcaccattctctga

SEQ ID NO: 422609 - DNA, 915 bp, Serratia marcescens
atgaccaagaatccttcatcagacgccactttgccgaaaggcatccatcgaagctggaagctgccggataagtcgctgggtgacttgtgggattcgatcgtgatggacgaagccatcaaaaaacagttgctgtcacaagcgatcgtcaacttcacggtgcgccccaaggtggagcgcacggtactccccctgcacggcgtgatcttgttggtcggcccgccggggactgggaagacctccttggcacggggcttggcgcatcgtgtggccgaatctttttcttctgcgaagtttcgattgctggaagtggagcctcacacgctgacgagctctgcaatgggaaagactcaacgcgccgtggcagacctgttctcgcaatcgatcgcagaatccgcagcggcgggcccgacgatcgtccttctggacgaggtcgaaacgcttgcggctgatcgagcgaagctcagcctggaagccaacccggttgatgtgcaccgggccaccgacgcggtgttggtgcagttggacatgttggccgaacgcaacccgcatctgctgttcgtggccaccagcaacttcccacaggccgtcgacagtgccttcctatctcgttgcgacatggtgatggaggtgccactgcccggcaaggatgcctgcaagcagatcctagtggactgcctgaatggcctggcaaagacatttccggggattggcaagctttcctcggctcaccagttcgacgcgtgcgctggcgagtgcgtcggattggatggtcgggccattcgcaaggtcgtagccaacgccctcgcggccgacccgcaagtggctatcgatccgaacaagctttccgtagagcacttgcgcagtgcgatacgacaggcaaagcaaatgcgccttcaaggagggaagcaaaaatga

SEQ ID NO: 422610 - DNA, 471 bp, Serratia marcescens
atgaccaccgttgtcagccggacgtttcgcagctcgccgcaccgcgatgcgttgcagacatgggatgccattgtcgaactgctcactcagggcaaggacggcacggctcgctctgaactcagggccgtgacgggcgtggccgccagcttgatcgccgaccaggcacccaagagcgcgcccatcgttgcgacatgcgatggaccacggaccaggatctactgcctcttcgacgaagacgcgatctatggtgatgatgccaacgaagaagtcttggggttcgagccgttgaagggagactggggagtctcgctgccgtgtccgaaggagcagctcggctgggtgcaaagcgcgctcaaaaagcacagttctcgcatcattgcacgggacttgagccaaggaattgccacgcaggcgcaggccgatgctgggcaagcgctgtcgctcgacctcggaggtttcctcaagtcatga

SEQ ID NO: 422611 - DNA, 501 bp, Serratia marcescens; identical to SEQ ID NO: 324126

SEQ ID NO: 422612 - DNA, 903 bp, Serratia marcescens
atgctgtcgatcgatgaagcttttcgcaagttcaagtcgcgtctggaactcaacgaacgcgaacagaagaatgcctcgcaacgccagaacgaagtgcgggactacctgcagaccaagttcggcattgcgcgcagcttcctgaccggttcctatgctcgatacacgaagacgaagccgctcaaggatatcgacatcttcttcgtgctgaaggactcggagaagcattaccacggcaaggccgcatcggtagtgctggatgatttccactctgcattggtggagaaatacggttcggcggccgtgcgcaaacaggcgcgctcgatcaacgtggatttcggtgttcacatcgacgcggaggacaacacggactaccgggtggtcagcgtggatgcggtgcccgcattcgataccggcgaccagtatgagatccccgatacggcgtccggaaagtggatcaagacggacccggagatccataaggacaaggcgaccgcagcgcaccaagcctatggcaatgagtggaaaggtctcgtgcgcatggtgaagtactggaacaacaatcccaagcacggcgatctgaagccggtgaagccctcgttcctgatcgaggtaatggcccttgagtgtctttacggcggctggggaggatcgttcgatcgcgagatccagtcgttctttgccacgcttgccgatcgagttcatgacgagtggccggatcccgccggacttggcccggcgatcagcaacgatatggatgccgcgcgcaagcagcgcgcgcagcagctgctgttccaggcgagccaagacgcaagcatcgccatcgaccacgcgcgtcgtggtcgcaatatcgaagcgcttcgcgcctggcgcgcactgtttggccccaagttcccactgtcctga

SEQ ID NO: 422613 - DNA, 726 bp, Serratia marcescens; identical to SEQ ID NO: 324128

SEQ ID NO: 422614 - DNA, 2625 bp, Serratia marcescens
gtggcaagcatacgttcggagtaccaccggttcctggcgcacttggcgcagcggcacgtgcacgacgacgtgcgccggctggcgcacctggtgctcgatcacctgcagccactggccgaggtcggtgctgcacgccgggggcgctccacgcgcttggcgccgctggccatcgcgcatctggcgcagatgcctgtcgcctacgacggggacgcgcgcggccccgaaaacgggccggcgctcgggcgactgcaccagctcgaagtcgggccgtttcgaggattcatgcggcaggagacgttcgacctcagccatgacatcaccttggtctacggtgccaacggcaccggcaagagcagcttctgcgaagccttggaagtggcgatgctcggttcgatcagcgaagcgcaggccaagcgggtcgaccagcggacgtactgcaacaacgctcgcctgcgccgccacgtcgcgccagtcctgtcgtctacggcggcgggcgaagcgcaggccgtccagcccgacgaagctgagtatcgcttctgcttcatcgagaagaaccgcctcgacgatttcgcccgaatcgccgcgcggaccccgagcgatcagcgccagctcatcgccaccctgttcggcgtggaccagttcagcgagttcgtgcgcggcttcaacccctcgctcgatcaggacctgatgcttgccggcgtgcaggcggcgcagctggcgcagcgtcgcctgcggttggcgaactccgaacagaccatcgccgcctacccgcagaagatcgcagcggtcgagggcctggaacaagctttggcgcagcgcatgtcacctggcgcgacctatcaagcctgcgtggactggctgctgggtacgccgcagcagcaaggacggctaccgtatgtccaggctcagctggacgccaacccgcctgccattcacgaggtgacccaggcccgcctgcaagcgttgctggcagaggcctaccgcgtccagggactgtggcaagcgtcttccgcgcaactcgcggcccgcgcgggcgaggtgtcgtacgcgaagctctacgaggccgtgcaagcgttggcggacggggcgaccgcgtgtccggcatgtggaaccggactggccgctgtggcacaggacccgttcgccagggcgcgaatgggcctggagcagctcgcgcaactggccgtcctgcagcagcaagaggccgggcatcggacgcagttgagcgaggcggtccgagcgctgtgggacgaaatgcgccgcgtggtggcggcggctggggtcgcttgtcctgccgaatcgcaggccgcgggcctgccactgctgcctcccacgtcggcgggcaattggctcggcggctgggtgaatggggaccagcgcgcctggcaagccctcttacggatcgcacagatcatcgaaggcttcgacgcgcaggcgcgcgacgtgcatgcccagcgcggcgcgatggcccaggagcgggaccgcctgcaacagcatcagctggagatcgaacggctgcggaccatgcgcacgactgcggatcaggagctggcggccgcccgccaaaccgtggcccaattcgacgacgcgaaccgcggcctgatccaggcggccacggacgaaatgccggtggtggtgcaccatcagcgggtcaaggccgcctacgacggcttcctacccgagattcaggcatacctgaccgctctgccgggggttctgctacaggggctgggagaccaagcccgccatctctacaacgcattcaaccgggccgatccgcccggcgatctgctgcacgcgctgtggttgcccgtggccgagaacggcaagatcgaggtggagttcgccggcgagccgggcgtgcgctacgacgcgttgatcgtcttcagcgaagggcacatcaaatgcttgggtctggcgattctgcttgccaagaacctcgcgcagggctgccccgtggtcatcttcgatgacgtcgtcaatgcgatagacgacgaccatcgcgatggcatctggcgtaccttcttcgaggacggtttgctccacggcaagcaggttatcctcacctcgcacgcagaggagttcctgcaccgcatccagcaggagttgggcgtgcgccgcgccgcggccatcaagcgctacaagtttctcccgcatcagggagagcacgaactgcgggtcgacagcgacccgccagcgaagaactatgttcttctggcccagcaggcgttggcggctgacgagaaacgcgaggcactgcgccaggcccggccggcgctggagagtctgacggaccgcctgtggacgtggctgggtcggcgggcggacggccggatcgacatcaagctgagcgggccccgcgcgccttgggagctgaacaataaatgcaccaagttgcggtcggccgtcgagcgtatcgcggcgcaacatgcgggtgcgccggatgccgtaggggcgttggtcaggctgctcaatgtcagcggtacgagtattgaatggggttacctcaatagcggtgtgcacgacgctcagcgcgatcatgagttcgatcgggcgacggtaagaacggtcgtcgaggcggttacggcgttggatgctgctcttgataccctgcagaaccgatga

SEQ ID NO: 422615 - DNA, 750 bp, Serratia marcescens
atgaaggatgccgcctcgaccgcgcagcgggagcagaaccagcgccaggggctgatcgtcggcaccatcaccttgccgttccggctgctcggggtgctcatcggctcgctgctgttctcgatcgtggtggagtgcgtcggcatgcacctgttctggaaggaccagggctggcgccactcccagcagatgctgcagtacgaactcgggcacctgtccaaccacttcacgcgcagcgtggtggtgcaggagcccgggcgcacggcgcacgagctggtggataccgggtacgagtgggtgttcgtgcgctcggggttgctggagcgcatgagccagaccgccgagcgcgcccgcgcggccagccacgggcagagccgcaacttccgctactacatcagccaagtctatgtctgggccgaaagctacctgatcgctgcggccttcacgacgctcaccttcctggtgcgcctgctggtcctggtactcacgctgccgctgatcctcactgcagcattcgtcggcctgatcgacggcctggtgcgacgggatgtgcgccggttcggcgcgggccgcgaatccggcttcatctaccaccgcgcgaaggccagcctgatgccgttggccgtgctgccttgggtcacctatctcgcactgcccatagcggtgcatcctctggtcatcctgctgcccagcgcggcgttgctggggatggcagtcagcctgaccgcaggcagcttcaagaagtacttatga

SEQ ID NO: 422616 - DNA, 2190 bp, Serratia marcescens
atgtcgggcaaacagccggtcgaggttctgctacgcccagcggtggagctatacaccgtcgcggcgtgtgcaggcgccgcgtttctgtgcctggtggccccatggtcgctcgcgctgagcccggccatgggcatcggcagcgccttggcgttcggcgcctacggcgcgatccgctaccgcgatgcccgcatcatcctgcgctaccggcgcaacatccgccgtctgccgcgttacgtgatgaccagcaaggacgtgccggtcagccagcagcgcctattcgtggggcgcggctttctctgggagcagaagcacacgcatcggctgatgcagacgtaccggcccgagttccgccgctacgtcgagccgacgccggcctaccggctgaccaggcgcctggaggaacggctggagttcgcgccattgccgctctcgcgcctgccgaagctcaccggctgggacgcgcctttcaaccccgtgcgcccgttgccgcctgtcggcggcctgccaaggctgcacggcatcgagcccgacgaagtggacgtcagcctgccgctgggcgagcgcgtcgggcactcgctggtgctgggcaccacgcgggtgggcaagacgcgcctggccgagttgttcgtcacgcaggacatccgtcgcaggaatgctgccggcgagcatgaggtcgtcatcgtcatcgaccccaagggggatgccgatctcttgaaacggatgtacgtcgaagcccagcgcgctggccgcgaaggcgagttctacatcttccacttgggctggccggaaatcagcgcccgctacaacgccgtgggccgcttcggtcggatctcggaagtggcgacacgcatcgcggggcagctctccggcgaaggcaacagcgcggcgttccgcgagttcgcatggcgcttcgtgaacatcatcgcccgcgccctggtggaactggggcagcgcccggactacatgctgatccagcgccacgtcatcaacatcgacgcgctgttcattgagtacgcccagcactactttgccaagacggagcccaaggcctgggaggtgatcgtccagatcgaggccaagctcaacgagaagaacatcccaaggaacatgatcgggcgcgagaagcgtgtggtggcgctggagcaatacctctcccaggcgcgcaactacgaccctgtgctcgatggcctgcgctcggcggtgcgctacgacaagacctacttcgacaagatcgttgcatcgctgctgccgctgctggaaaagctcacgagcggcaagatcgcccagctcctggcgccgaactactccgacctggccgacccgcgcccgatcttcgactggatgcaggtgatcaggaagcgcgccgtcgtctatgtcggcttggacgcgctgtccgatgcggaggtcgccgcagcggtcggcaactcgatgttcagcgatctcgtctcggtggctgggcacatctacaagcacggaatcgacgatggcctgccgggcgcatcggctggtgcgcgcgtgccgatcaacgtgcatgcggacgagttcaatgaattgatgggtgacgagttcattccgctcatcaacaagggcggtggcgcgggcctgcaagtcaccgcctacacgcaaacgctttcggacatcgaggcccgcatcggcaaccgcgcgaaggccggccaagtgatcgggaatttcaacaatttattcatgttgcgcgtgcgcgagacggccaccgcggaactgctgacgaggcagttgccgaaggtcgaggtctatacgaccaccatcgtctcgggcgcgacggacagctcagacatccgcggcgcgacggacttcacgtcgaacacccaggaccgcatcagcatggccagcgtgccgatgatcgagccgtcacacgtcgtcggtctgcccaagggccaatgcttcgcgctgctgcagggcggccagctttggaaggtgcgcatgccgcttccggcgccagaccccgatgaagtgatgccgacggacttgcagcaactggccgggtatatgcgccagagctacagcgaggccacgcagtggtgggagttcaccagttccgcagccttgccgcatgcagccttgcccgacgacctgctggatgacgccgctccagccgagcctgacgcggtggccaccggcgccgacgacagcaccggcgaggccgcaccatga

SEQ ID NO: 422617 - DNA, 549 bp, Serratia marcescens
atgacgaaaccccatcccgcccatctcgcgttcacgggcctactcatgctgctgtcaggcctgccgctggcctcgcgtgccggcgagccactgatcgttgtcgaggaccgtggcggcacgtcggcattgccgtactacgaagccctgaatctccagccgcgcgccaacgcaccggcgcggccgtccatcccgacgccccaggttcctgccacacgggcggacgaagccgcgatgctgccggtgcgcagcgccaagctcacgcccggcaccgtcgcgcgacgggtgatcgaagcgcccggcctgcggccgttcgtggtcatcggcgacgacgaggcttcccgggcctggttgcagcgccgcgccgccgctttgcgcgaacgtggcgcggtcggcctggtcgtcaacgtcgagaccgcgcagggcctggcgcggctgcgcgccctggtgccgggcgtgccgctcgcgcccgtggccggcgacgacctggccgatcgcctgggcctgcggcactacccggcgctgatcacggccaccggcatcgagcaatga

SEQ ID NO: 422618 - DNA, 570 bp, Serratia marcescens; identical to SEQ ID NO: 330052

SEQ ID NO: 422619 - DNA, 738 bp, Serratia marcescens
atgaagccgtcgatcctccttttcgcggtcctggtggcgtcgtcgcaatggcccgcctgggcgcagcagcccgcaacgacctcggcgcgcaacgcacagagccaggagcgcccgctggccgcccgcgtgctggacgaccgggtggcaaccgaatggggcttgcagccacaagaatgggcacgctaccgcgagctgatggatgggccgctgggtatctactcgcccaacctggacccgctgtccgccctgggcatcgaagctcgcacggacgaagaacggcgccgctatgcggaactgcaggtgcaggtggaagcgcgccgcgtcgagaagctgctcgcctaccagcgcgcctacgacgaggcctggcagcgcctgaatccggggatgcagcgcgtgaacctgcccgacgacaagccgggcgccggcccatccagcagtcccttgcgcggcagcggccgcatggcggtgttcgtcaaggacggctgcgcagcctgcggacagctcgtgcagcgcctgcaatcctcgggcgcggagttcgacctgtacatggtgggcagccgccaggatgacgcgcgcatccgcgactgggccaagcgcgcgcagatcgacccggcgcgcgtgcgcgccggcagcatcacgctcaaccacgacggcggccgctggctgtcactgggcctgcccggcgatctgcccgccgccgtgcgcgaagtgaacggccaatggcagcgccagccgtag

SEQ ID NO: 422620 - DNA, 645 bp, Serratia marcescens; identical to SEQ ID NO: 330051

SEQ ID NO: 422621 - DNA, 600 bp, Serratia marcescens; identical to SEQ ID NO: 330050

SEQ ID NO: 422622 - DNA, 2280 bp, Serratia marcescens
atgtccctcgatctcgaaaccactgccgctgaatccgcgcccgtacagggcgaactgctcgacgcggaatcttcccctctgaccctgagccttcaggattttgtcggcgagttcggcgacgaactactcgacgccctcaacagcgctaatccgccggtctataccggccaaccgcaggcgcaccggcaactggtggtcgccagcctcaagcgcaagctgttcccagcccaggccgaagtcgtccacgccgccgccgagctgctgatcgaccgtggcgaacgtgctgcgatcgtcaatggcgagatgggctgcggcaagacgaccgtcggcattgccacggccgccgtgctcaacgccgaaggctatcgccgcactctggtgctgtcgccgccccacctggtttacaagtggcggcgcgagatccaggagacggtggccggtgccaaggtgtgggtactcaacgggccggatacgctcgtcaagctcatcaagctgcgcgagcagttgggcgtgcagcccacgggccaggagttcttcgtcctggggcgcgtcaggatgcggatgggctttcactggaagcctgtcttcaccacgcggcgcacccgccacggcgacgtggcggcctgcccggactgcggcacggtcatcaccgacctcgacggcgagccggtcaacccgatcgcgctccaagccgaggagtgccgcaggaagtgcggccactgcgccgcgcccctgtggacactgatccgcccgcgcagtctgtccggcagcgaccagtcctcggccgtgctcaaagccttaaagcgcataccgaccatcggagaggtcaccgcgcagaagctgatgcaaaagttcggtgacgggttcctggcgtcgatgctcggcgacaacatccatgagttcatcaacctcatggatggcaacggcgagctggtgttttccgaccgtcaggccacgcgcatggaacgtgcgatggccaacatggagttcggctttggcgagggcggctatcagccgtccgagttcatcaaacgctacctgccgcaaggcacgttcgacctgctcatcgccgatgaggcacatgagtacaagaacgggggcagtgcccagggccaggccatgggcgtgctggcggcgaaggctcgcaagaccttgctgctgaccggcacgttgatgggcggctacggggacgacctgttccacctgctgttccgagcccttccggggcggatgatcgaagacggctaccgcccgaccacgagcggcagcatgacctcggctgcgatggcgttcatgcgcgatcacggggtgttgaaggacatctactccgagagcaccggcacggcgcacaagacggccaagggcaccaaggtatcggtgcgcacggtcaaggccccggggtttggccccaagggcgtgctgcgctgcatcctgccgttcacgatctttctcaagctcaaggacatcggtggcaacgtcctgccgccgtatgacgaggagttccgtgaagtcgcgatggacacggcgcaagccgcggcctaccgcgatctggcgggtcggctgaccgcggagctgaaacaggctctggcgcgacgcgatacgaccttgctgggtgtggtcctcaacgtgctgctggcctggccggattgctgcttccggtcggagaccgtggtgcatccgcgcacgcgcaacaccttggcgtttgtcccggctcagttcaacgagttcgagatcagccccaaggagcgtgagctgatcgacatctgcaaagaggagaaggcgcagggccgcaaggtcctggcctacacggtctataccggcacgcgcgacaccacgtcgcgcctgaaggtgttgctggagcaggaaggcttcaaggtggcggtgctgcgcgcgagcgtggatgccagccgccgcgaagactggatcgccgagcaactggaccgtggcatcgacgtgctcatcaccaaccccgagttggtcaagacggggctggacctgttggagttcccgacgatcgtgttcatgcagtcgggctacaacgtgtactcgctccagcaggcggcacgccgctcctggcgcatcgggcagaagcagcccgtgcgtgtgatctacctcggctacgccggttcctcgcagatgacctgcctggagctgatggccaagaagatcatggtctcgcagtccacctcgggcgacgtgcccgaatccgggctcgatgtcctgaaccaggacggtgattccgtcgaggtcgcactggcccggcagcttgtcgccgcatga

SEQ ID NO: 422623 - DNA, 306 bp, Serratia marcescens; identical to SEQ ID NO: 333150

SEQ ID NO: 422624 - DNA, 321 bp, Serratia marcescens; identical to SEQ ID NO: 333149

SEQ ID NO: 422625 - DNA, 1110 bp, Serratia marcescens; identical to SEQ ID NO: 333148

SEQ ID NO: 422626 - DNA, 648 bp, Serratia marcescens; identical to SEQ ID NO: 333147

SEQ ID NO: 422627 - DNA, 261 bp, Serratia marcescens; identical to SEQ ID NO: 333146

SEQ ID NO: 422628 - DNA, 408 bp, Serratia marcescens
atgggctggtatttctcaaaccaatcgcggtccgaactgatcgcggaactgatcgcaccgcaagagaccgagcgcgccagcgtcaaggtcatcgctcacaccctgcgcggcaacgtgctgtggtccgtcgccgaagtgaccgccaaggtcgaaggcgtgcatcgtgatctcgcaccgggccagtccctgcgctacatccgctgcgatctgcttgaacgaagcggcggccagtggggctacaagtccttggacgagtccatgcacccgtactactacacgtgcccgctgtcctatctggacctcgcaccggagcagtccgccgactggcgtgcaggcgttcgcgcctaccacgcccggcggcgcacacccacggcatccgcggcatccgccgcggcgccgatggcctga

SEQ ID NO: 422629 - DNA, 342 bp, Serratia marcescens
atgtccaccatcgcttgcgataccccgcgttcaacgctggatgaacccgcgtggcgggacctttgcaaagcggccgccgcacacgcccagcgcggttgcggcttgtcctacgaccactacgtgacgctcttcagttcggcgatcgacgcacaggccaatcgtttgccggatgagcaacgtgctcaggctctcgaaatcgcggcccaggaatgggactacgcaacacctgccgaacggcaggaaacccaggactggaatgcggagcatggctattgctcgcacgggatcgagttcggctactgcccggccggttgtgatcgagacgatgacgactgggattga

SEQ ID NO: 422630 - DNA, 690 bp, Serratia marcescens; identical to SEQ ID NO: 345971

SEQ ID NO: 422631 - DNA, 828 bp, Serratia marcescens; identical to SEQ ID NO: 334558

SEQ ID NO: 422632 - DNA, 906 bp, Serratia marcescens
atgaacaccacgtccaacgagaaatcgtatttcgacctccacacctcgggcatcggctacatccagcgtgtccgtgaagtgcccgtccggggcggccgccgtgcgcagcctttcctggcatgcaccatcgccgcgctggtcggccccgcccgggaccccagctaccgctacttcgacgtcaaggtctcgggtgccgaggccaagaagctcgttcagcgctacatcggcgttgacgatcccaagcagcgcccgctggtgcgctttcgcctcggtgacctgtggggcgatgtgtacatccgcgacaagggtgagcagaagggtcaggccgccgcgtccctcaaggcgcgactgctcaaggccgaactgatcgaccgggccgaactggcttcgatcgagcagcacgagttgatcacccgcggcatcggctatctcaatcgtgtgaaggacgtcaccccaaaagctggcgactcgttcctctcttgcaccgtcgcggcactggccgggcctgtcgatgaaccggagtatcggtacttcgacaccatcgtcgccaccccggaagccgagcacctggttcgccggtgcgttcaggccgtcgagggtgaccgcaaggtgctgatcgccttccgtctgaacgacatgaagatcgatccgtacatccgcaccaagggtgagcacgccggggaaccggccgccagcctggaatcgacgctggtccacatcggtctcatcaagatcgacggcacccaggtctatccgacgagccaggcgcaagccgaggcgccgccggccgaagacgcatccgcgtccgaagccgacgatgccatcgacacggccaccgagcccgccgagcgcgagcccgaggcgcaagtccaggagcaggagccggcattggctgcttcgttctga

SEQ ID NO: 422633 - DNA, 765 bp, Serratia marcescens; identical to SEQ ID NO: 330044

SEQ ID NO: 422634 - DNA, 261 bp, Serratia marcescens; identical to SEQ ID NO: 330043

SEQ ID NO: 422635 - DNA, 642 bp, Serratia marcescens; identical to SEQ ID NO: 330042

SEQ ID NO: 422636 - DNA, 1689 bp, Serratia marcescens; identical to SEQ ID NO: 330041

SEQ ID NO: 422637 - DNA, 288 bp, Serratia marcescens
atgaagaaactcaccaccctcaccaccctcatcgccctggccgccgctctaagcgcgcccgcctgggctgccaccaagaccgtcaccctgtcggtgcccggcatgacctgcgccgcgtgcccgatcacggtcaagacggctctgtccaaggtcgccggcgtcgagaaggccgaagtcagcttcgagaagcgggaggccgtcgtcaccttcgacgaggccaagaccaatgccgacgccttgaccaaggccaccgcaaacgcgggttacccgtccagcgtcaagcagtga

SEQ ID NO: 422638 - DNA, 351 bp, Serratia marcescens
atgtcggaacccaagaacggctgcggcgcactggcgaccggcggcgtcgcggccgtcctcgcctcggcctgctgcctcggcccccttgtcctggtcgcgctcggcttctctggcgcgtggatcggcaacctgaccgtgctggagccgtatcggccgatcttcatcggcgcagcgctcatcgcgctgttcttcgcctggcgcagcatcttccgaccagcccatgcctgcaagcccggcgacgtttgcgccgtgccccaagtgcggactgcctacaaggtgatcttctggatcgtggccgccctggttctggttgccctcgcgtttccctacgtcctgccgctgttctactga

SEQ ID NO: 422639 - DNA, 408 bp, Serratia marcescens; identical to SEQ ID NO: 330038

SEQ ID NO: 422640 - DNA, 189 bp, Serratia marcescens
atgtcactgcgattcaaaggcgctgacctgcgccccgtgctgaccgaagccatcgccaatcaggggtcgtctcagaaaacggaaaaaaatcgtacgctaagagccgaagtgggccctttagcagcaatgcaaagctgcgatcaacgggcaggaaacattgccatggtgcgcgttgcactctctcactag

SEQ ID NO: 422641 - DNA, 825 bp, Serratia marcescens
atggatcgttccctcatcaaatccatgatgccttcgctggtcgcaggccatgtgccccgcaacgtgcggtcgttcaagtaccgcgtgttcgatgatcagccgctgtcctcaacgctgggcttcgccatcgacccccaacccttcgacggcaaggtggtcgccgcgaccgacgatgccatcgtcgtcaagctcaagccttccgagttcgcggtgctcgatcccagcctggtgaccacggttcctgccgaaggcgccaaggtgcatgtccaaccctatgcccgtcgtcgcttcgacggactgcgcgcggacacgccggaggtcatcaccgaggagacttcggacggcacgccgtacaccatcacgaggcacatcctcggctcggcgccggccaagctgcccattcccacgccgcagtgcatggagttgggccagctcatcgagcagttggaggagatgccggcccccgatcgcttccggcgcatcacccacatgctggtggatgccggtgcccgcgacttcacctgggtcgatcccacgccctccaagatcatcgagaccccgccggcgatcagcttcacggtctcgaccgcgaagttcgagggccgggtgacgatcctctacgaccgcggcggagacacctacgtggtggaactgcaccgtcagaacggtgaatcggtcgaactggtcgatcggcacgacgaggtgtatttcgacatgctcggcgaagtgctggagaggctcatcgacgacgggcgctggcgccagatcgacgtgagcatcctcgacgcgaaagcggcccgcaagcgccaggccgtcccggcatga

SEQ ID NO: 422642 - DNA, 279 bp, Serratia marcescens; identical to SEQ ID NO: 333668

SEQ ID NO: 422643 - DNA, 738 bp, Serratia marcescens
atgtcccagaatcccaatccctttctacgcggctactggaatctgaaaatcgtccgcacgctgtccatcagctacgaggacggaagcccgcatgtttggcgaaacatccacccgagccagcagcacctctgcgacgcggcgctggtttcttctccttgcatcatcaccagcgacttcgcggtggtcaggactggcaccgaacctgtcggcgccgcactgatcgccgaatgcgacgcggctgaagggggcagcggcgaaggcatggtgggtgccgtggtgtacgcgatccacggcgacgacttcgacggccgccccgtccacattggcgacacctattcggccgaggccgcacgggaagtcgtgcagcggttgagcttcgagaccggctactacagccggtgctgggaaatcagcagcgcgcacatcagccgcgaaaccggccagtacctggccaacctggctgacctcgcgacgccggaggcctttttgttcatcgcgttccggattccctacagcccggcgatcggcgtcaagctgatctccacgccctggacggaccagcacctgcaggacgtcgaggggatcgccgccgagcagcttcggcaggagcaccgcagcaagggcatgccggacgagctggcacagatccttgaactggccggccaggccgacgtgcgcatcctcatcctcgatgccgacgcacccgtgttgccgggcctatcgctggccggcgaatag

SEQ ID NO: 422644 - DNA, 687 bp, Serratia marcescens; identical to SEQ ID NO: 333145

SEQ ID NO: 422645 - DNA, 393 bp, Serratia marcescens; identical to SEQ ID NO: 333758

SEQ ID NO: 422646 - DNA, 213 bp, Serratia marcescens; identical to SEQ ID NO: 323915

SEQ ID NO: 422647 - DNA, 501 bp, Serratia marcescens; identical to SEQ ID NO: 323914

SEQ ID NO: 422648 - DNA, 2955 bp, Serratia marcescens; identical to SEQ ID NO: 323913

SEQ ID NO: 422649 - DNA, 399 bp, Serratia marcescens; identical to SEQ ID NO: 323912

SEQ ID NO: 422650 - DNA, 636 bp, Serratia marcescens; identical to SEQ ID NO: 323911

SEQ ID NO: 422651 - DNA, 2031 bp, Serratia marcescens; identical to SEQ ID NO: 349604

SEQ ID NO: 422652 - DNA, 441 bp, Serratia marcescens; identical to SEQ ID NO: 323909

SEQ ID NO: 422653 - DNA, 528 bp, Serratia marcescens
atgagcgacccgaaccgcgaacctcgctacttccgtggtctggaacagccagccttcatgcggctggaacacgcggcctctctaaaaggccttttaaagccttttaaaggtaaaggggacttcgaggcctgggccagccagtgcttcgccatgcgcgacgagttgattgccctggcgcagcgacaggtgctgccacaggcgtgcgggcatcccttccacctgcttcccgtcgagctggcccagcagaccactggcgcaggcacgacctttcttcgctggcgcaagcacgatcgatcggccatgggcgtggcgttgtggcaggagctgatggcgagccccagcacgccggtcaacctgctgcacgacctgcacgagatcgaactgcagcgcgtcatgctgaacatgcagatcagcctgctgcacaccctgggcaggcaagcacaggaatgcgccagcaaggccgcgcaggcggacaacacctacctgcgccggctcgcgtccgttcctgccgcagtgcgcgatcggtga

SEQ ID NO: 422654 - DNA, 780 bp, Serratia marcescens; identical to SEQ ID NO: 332899

SEQ ID NO: 422655 - DNA, 1251 bp, Serratia marcescens
atggccgtggacgacgctgcaccacgagcaccacgccaaggtccggtcgccctcgctgatctgttcgacagcgcgctgaaagaccttgcaccgaaacctcgcccactagcaccggctcccgccttcgcatccgcgacgtctcctgtgtctgcaaccggcgacggtttcctgttcagtggaaatcggcacgagagcgtgccgcgacggctgttcctcgaccgacgcctgacgccgctggaacgcaatgcctggcaagtcttccggatgatgctcaacgaggatggcgtcacggcgtttccgacgtatgagcaacttcgcccgtggctcgcgtcaatgccctgcgccggacaggcctcccacgagaccgtggcacgggcgctgacgctgttgcgcctgacgcgctggttgagtctcgtgcgccgcaggcgcgaccccaagaccgggcgcatcctcggcaacctctacgtcctgcacgatgagcccctgaccccgttcgaggcgatgcagctcgacccggactacctgcagctcgtcagccaagccctgggccattcggccagggccgttcaggtcgtgggcttgcacacgctcaatgagatcgccgaagacccgctgctgtctggccgcatgctgccctcgcggctgcaggtccttgccgaacgcctcgcaagccaaggcattgggtcgcaggagagttatccacaggaggacacggttcacgattccgaagaaggggcgccgagccttcttcggaattctgatcggccctcttcggattccgaagcagggccaaaacacgcagcagacggcgctcttcggaatccgaaacaggaccgtactgtacgtagtagtcgtattaatgaagtacgtactaccgcgcgtgagcgtgggcaggcgcgcgcgatgccgggagttcgtctgcctgatcgctttctcggcttgaaagatgaacagcaggccggcgccatggtggcattgcagcaggtcgatgccccgctacgccaggccgtgctggacgaatgggcggatcgctgtcgtggcagcaccatccgcaacccggcaggctacctgttcggcatcatccaacgtgccatccgtggcgagttcaacgcatgggccaggcaagctgggtcagcaccgccacctgcccctgcacgagatgcaccgcctgagccaccgcgcaatgtagttccgcccgaggtagcccggcagcacatcgaccggctgcgcgaccttctgcgcagtagctga

SEQ ID NO: 422656 - DNA, 561 bp, Serratia marcescens
atgtccgcaccgaacccactcaaccaggccgtcatcgcgcaggcactctacgacctacgaaacgggcaactgcgtcgctgcaaggcgatggggttcggcgaggaagagctggatgcgctcaagcatccggcgctgatcagcgtgctggccaatgccaacgtctcctggtgctctgtctcggtgaaccgggaagtgctccggcgattgctcaaacaggcgcaggacgtggagaaggagatcgccaccgtcgatcgcatgctgcgcctgggtgccagtaccgaaatggtgagccgcttctacgggctgacacatcaggaagtcgcacttcggcgcgaagttctcggcctgcccaaacgcaaggggcgccatccggttctggacgaggagcaggacaccgagctgtggcggcgctggaaggtcgtgaccagcagcaggaacgtcgagctggaggatgagacctcggttcttgatgcggcaatggacctcgccgaaggcatggagctgccgctgtcggtggtctgggctgcgatcaagaactggatcgatcagggactgggttga

SEQ ID NO: 422657 - DNA, 1665 bp, Serratia marcescens
atggctgagatgacctcccaggacatggccggcaagctgcttgccgccgggttcgagcgcagtgggccatcggccacggccttgagcgacccgatcgccgacacgccgatggtcgtgacgctggaccagttgcggccctacgaccacgacccccgcaaaaagcgcaactcggcctacgatgaaatcaaggcctccatccgagagcgcggcctggacgcggcgccagcgatcacacgccgtcctggcgaggcgcactacatcatccgcaacggcggcaacaccaggctggcgatcctgcgtgaactctgggcggagaccaaggacgaacgcttcttccgcatatcgtgcctgttccggccgtggcctgcgcgcggagagatcgtcgccctgaccgggcacctcgccgagaacgaactacgcggcggcctcacgttcatcgagcgcgccctgggcgtcgagaaagcccgcgagttctatgaggctgaaagcggcaccaccctgagccagtccgagctggcccgccgcctggccgccgacggcttcccagtccagcagtcgcacatcagccgcatggctgacgcggtgcgctacctgctgcccgcgatcccgaccgtcctatacgggggcctcggccgccaccaggtcgagcggctgtcggtcatgcgcaaagccagcgaacgcacgtgggagcactatgccaaaggccgctccctgccgctggacttcgacagcttctttctggaggcgctgtcgcaatttgatgtccagcccgacgagttctcgccgccgcgtgtgcaggacgagttgatcggtcagatgtccgagctgctgggcatcgactacgacgtgctcgccttggacctgaccgaatccgagagccgccaccgcgccctggtcagcgacccaaccccgccatcggcgccgccggcattgcccgagcctggggccatcgcacggccgccgatcgaaccggcaccgccccccactacaactgcaccttctgcgggccactctgccgacgcgccgacaaggccccgggacgatggggccccgagcgaggcatccgcagccagccctgcggcagcgaatggcggtctgcttgacgagcacatcatctctccggcacccacgacggagcggctccagtccatccagcgcatggtcgccgaccagttgggcgatgcgctgccgcccgacttctcggccaacgtcttgcagtcgattcccgtgcaggccggtggcctctatcccatctcggacatctggtatatcgaccctggcctcgacacacccgaccgcctgcgcatccacatcgcgcagttcgcgcgcgagatcgcgggcgaggccgacctggacgcgtgtgtcgaggatcgttctgatggcatcgggttcacgtgtcgtgccccagcccaggcttcgtcgccgctcgcacgcgccgtgctcgcactactggtttccctggccggtcagcagccagccggcgtcggcttggacagcgggcaactcatcacagacctgccagcgctgttgcacggccagggtcaacgtcgtgacggcggggcccggcgattgagcgacaccgcgctggtcaagctgtttcgtctgctgcggctggcccggcgcctgctggatctggaagccggcgctgtcggttctgggatctga

SEQ ID NO: 422658 - DNA, 261 bp, Serratia marcescens; identical to SEQ ID NO: 332897

SEQ ID NO: 422659 - DNA, 876 bp, Serratia marcescens
atgcaggtcgtatccataatttcaacgaaaggcggcgtaggcaagacgactacggccgccaacctcggcggcctcgccgcggacgcggggctgcgtgtgctgctgctcgatctcgacgtgcagccgaccttgtcgtcctattacgagctggcacaccgcgctgccggcggtatctatgagttgctggcgttcaacgaacgcgccctcgatcagttggtgtcccgcaccatcatcgcgggcctggacctggtgctctcgaacgatcaccggggtgaactgaacacgttgctactgcacgcgccagacggacgcctgagactgcggcacctgctgccggcgctggcgccgctttatgacctggtgctgatcgacacccagggtgcacgctcggtgctgttggagatggcggtgctcgcctctgacctggcgctgtcgcccgtgaccccggaaattctcgctgcccgcgaactgcgacgcggcaccatgcagttgctggaggacatcgcgccataccggcacctcggcatcgaaccgccatccctgcacctgctcatcaatcgcgtccaccccgtgtccgcgaatgcacggatgatccagcaggcgctgcgcgacctgttccaggaccatgccggcatatgcgtgctgggcaccgacgtgccggccatcgaggcctatccgcgcgccgcaacccgcggcctgccggtgcatcgcgtcgagcatcgccagccgccgggcagagttgcgcccgccgcgctcgacaccatgcgcgcgctcgccggcgaactgttcccacagtggcaagacagatttgccctcgtgtccggccgtcctcctcgttccattgaaaccgggaggtcacatggcgaacgcacatga

SEQ ID NO: 422660 - DNA, 213 bp, Serratia marcescens
atgtcgcaaatacctgtactgccaccgcacgagcgccgcatcctgcggctcgatgaagttgaagcgaagtccggcttcaaacgcgcccacatctacaacctgatgaagaagcgccagtttccgcaggcgttgcgcctgggcgtgcgcgccgtgggctgggattcggtcgagatcgaccagtggatcgccgaacgcctcaacaaccggacctga

SEQ ID NO: 422661 - DNA, 747 bp, Serratia marcescens
atgcacaaggagccaccactatcaaaggtgttctatcgtcccatcgaagctgccatacggtgggctgggttgttgcggtacgaagcggtgatcgtcgcatcgatcgcatcaccgcgttgtctgccgcagatgttggactgcccgcgatggaacgagtgtcggctgtactcggaacgcatctacgacggtatcctcaacgccgaactacccttcggcaagaacgggatcacacttaatgacccagatctggtgagttcactcgatctgaccgtccgccatgtcgatctgaagcggtggatgcgcacccactatcccgagcatcggccgggatttctgttcagtcgcggcgagcgcatggtgcatcccttcatcaccatcgagacaggacaggcaatcctgctggaacggctggctctgcaggccgcgctggaccatagccgacgcgagatgcgcgaactgcaacagcaacacgaagtcttgctaaagcagtccgccgtactgctggctcccaagcagtgcgtgatcagtgatcgggcggaaactacatacctgaacatcatcggcggcatgctgacgctgatgctgagccaatccccatccggcgtgccgtactccagcttcaagacgcaggaggccatcgtcaccgcattgctcgcccactatggcggcaccatgggcatcacggagcgaaccttgaacggcaagttcgccaatgccaggaagaatgtccgtagcgcagccgcgtga

SEQ ID NO: 422662 - DNA, 324 bp, Serratia marcescens; identical to SEQ ID NO: 332896

SEQ ID NO: 422663 - DNA, 495 bp, Serratia marcescens
atgaccgacacgatctacaacgcattgttcatttgcacgggtaattccgcccgctccatccttgccgaaggcatgctcaacgagctgggcaagggccgcttccacgcttattcggcgggcagtcaccccaagggcgaggttcatccgctggcacttgccacgctggagcggctgcacctgccgacgaccggctaccgcagcaagagctgggacgagttcgtggcaccgggtgcgccggtgttcgacttcatctttacagtttgcgacaacgctgctggggaggcttgcccgctgtggccgggcaagccggtgtcggcgcattggggcgtccctgatccggcagccgtcgagggcactgaggagcaacagcgcaaagcgttcctcgacgccgcgatcacgctgcgccgacgcattgaactgttcctgtcgctgccgctccagcgcctggacgccatgtcgttgcagcgcgagctgcgcgacatcggccgccagtaa

SEQ ID NO: 422664 - DNA, 1071 bp, Serratia marcescens
atgactacagaaaccgaagcggccggtcacgcgccggccgcatctgccatgagcagcttcgagcgctatctgaccctgtgggtgctgctgtgcatcgttgccggcatcgcgctgggccagttcgcgccgggcgcgttccaggccattggccagctggaagtcgcccaggtcaacctgccggtgggcttgctgatctgggtgatgatcgtgccgatgctgctgaaggtggacttcggcgcactcggccaggtcaggcgacactggcgcggcatcggcgtcacgctgtttgtgaactgggcggtcaagccgttttcgatggcgctgctggcgtggatcttcatccgccatgtcttcgcacagtggctgccggccgggcagctggacagctacatcgccgggctgatcctgctggccgccgcgccctgcacggcgatggtgttcgtgtggagccggctgaccggcggcgatccggtgttcacgctgtcgcaggtggcgctgaacgacaccatcatggtgttcgccttcgcgcccgtcgtcggcctcctgctgggcctgtcgtcgatcatcgtgccatgggccacgctactggtgtcggtcgcgctctacatcgtcattcctgtcatcctcgcgcagctctggcgccgggcgctgctgcgccggggtcaggttgcgttcgaccgggcgctggaacgtattggcccgctgtcgatcgccgcgctgctactgacgctggtgctactgttcgcctttcagggagaggccattatccggcaaccgctggtgatcgccatgctggcggtgccgatcctgatccaggtgttcttcaattccgggctggcgtactggctcaaccgcaaggtaggcgagaagcacagcatcgccggcccctcggcactgatcggcgcgagcaacttcttcgagctggccgtggccgccgccatcagtctgttcggcttccactcgggcgcggcgctggccaccgtggttggcgtgctgatcgaggtgccggtgatgctgctggtggtgcgcgtggtcaaccgctcgcgcggctggtacgagcgccaagcgtaa

SEQ ID NO: 422665 - DNA, 1233 bp, Serratia marcescens; identical to SEQ ID NO: 332895

SEQ ID NO: 422666 - DNA, 423 bp, Serratia marcescens; identical to SEQ ID NO: 332894

SEQ ID NO: 422667 - DNA, 738 bp, Serratia marcescens; identical to SEQ ID NO: 332893

SEQ ID NO: 422668 - DNA, 1341 bp, Serratia marcescens
atggatttctttctgcaattagcggttatattggcatgcctgctgtatggggcgcgcaagggcggcattgcgctggggttactgggcggtatcgggttgatgatcctggtgttcggctttcacctgcagcccggcaaaccgccggtagacgtgatgctggtgatcatcgcggtggtggcggcctccgccaccctgcaggcctcgggcgggctggacgtgatgctgcaaatcgccgaacggatgctgcggcgcaacccgcgctacgtctcgatcatcgcaccgttcgtgacctgcattctcactattctgtgcggcaccgggcacgtggtgtacaccatcttgccgatcatttatgacgtggcgatcaaaaataacatccgcccggaacggccgatggcggccagctcgatcggcgcgcagatgggcattatcgccagcccggtttcggtagcggtcgtttcattggtggcgatgctcagcagctataccttcaatggccgccatctggaattcctcgacctgctgtcgatcaccattccttccaccctgtgcggcattctggcgatcggcatcttcagctggttccgcggcaaagacctggacaaagatccggagttccagaaattcatctcggtgccggaaaaccatcgctacgtctatggcgatgccgccaccttgctggaccgggtgctgccgcgcagcaactggatcgccatgtggattttcctcgctaccatcgccctggtggcggtgctgggggcattttccgagctgcggcccagcttcggcggcaagccgctctccatggtcctggtgatccagatgtgcatgttgatggccggggcgctgatcgtcatcatcacccgcaccaacccggcgtctatttctaaaaacgaagtgttccgctccggcatgatcgccatcgtggcggtgtatggcgtcgcctggatggcggaaaccatgttcggcgcgcacctggcgcagatcgaagccaccctgggcgtgctggtgaaagagtacccctgggcctatgcgctgatcctgctgctggtgtcgaaattcgtcaactcgcaggccgccgcgctggcggcactggtgccggtggcgctggcgatcggcgtcaacccggcctatatcgtcgcttcggcgccggcctgctacggctattacattctgccaacctatcccagcgatctggcagcgatccagttcgaccgctccggcaccacccgcatcggccgcttcgtgatcaaccacagctttattctgcccggcctgatcggcgttagcgtctcctgcgtcttcggctggatcctcgctgcggcgttcggtttcttataa

SEQ ID NO: 422669 - DNA, 453 bp, Serratia marcescens
atggacccgacaaaaatgaccgggctggcgctgttacaggctgcaatggccggcaagatcccagcggcctcgatcgctgaaaccgtgcccatgaagccggttgcggtggaagaagggtatatccgcatcgtggcgcgggcagacgggcgccatctgaatccgctgggtggcgtacatggcggctttgccgccacggtattggactcggtgaccggttgcgcggtgcacagtacgctgggcgcaggcgtaggttacggcaccgtcgatctgcaggtaaaaatgctgcgccctgtgccgaaggagagtgacctgatcgccgaggggcgtctggtctatgcggcgaagaacgtcgctttcgctgaaggcacgctcaaaacggcaggagggaagctgctggcttcggcaaccgccacttgttttatcattcgccccaccgaacaagcaccgcaataa

SEQ ID NO: 422670 - DNA, 282 bp, Serratia marcescens
atgcagccgtataaagaggttgagtttgatcatgagctttgtctggcgatcggcaaagccgtattagacgtggtggcgcagggggaagaaaccagcgctccggcggtgatgaacgcgattgagcggtcggtggaacaggggttgaatgacgacgaaacggccatcgccgacgacgccctggatttgatggctcgtctcgtccacggcttcagcttcataaatctagcggatgaagaggatacttcccatgcattggttgaatttcaaacgctacaagagtga

SEQ ID NO: 422671 - DNA, 552 bp, Serratia marcescens
atgcattggttgaatttcaaacgctacaagagtgacgttgccaaacaggccgtgccgccgcatttgaatgcggctgaatttgcgcggcattacgccgacaagccgcaagccgatacggaagagtatctttcgctgagcggggagatgtgctgggatgcggtggtgctgtgcgcccaccgttcaggcgcgcttagcaaggcgaaatacaagcagctgtggcagacggtattcgataagcaatacaaacatttcgtcagccctgacgataccgagatccgcaccatggccgatatgttgcgcgcgccgcagggatgttttatcggcatattttccctgcgtgacgcgacggcgccccgtttgctgcatgccatgatcggcaccggtgcaggctttgccgccggcaataaaaatctttgcatcggcgtggggggcgcggtcggctgggaaaatctcaatctggcgcgcgatctgcgctggcagccggaaggcggttttttacgccagggcgacaacgaagtgctgcgcattttttaccggcctttccccgcctga

SEQ ID NO: 422672 - DNA, 270 bp, Serratia marcescens
atgaccgactatgcgttctacaatcagatcctgacccggctggccgccaatcaccccggcacgctggatgaaaaaacctatgaactgtggaaacaagacgccaccagcccgcacgccttcgccgatcccttcgcctatctcaaaaccaagggcctgatacaggcctatgtgatgagcgacatcgacgagaacaactatgatatcgacccgcatcaaacgcggatcactgccgccggtctcgaattcattcgcaacggcgggttcaaataa

SEQ ID NO: 422673 - DNA, 1503 bp, Serratia marcescens
atgaagttaagaaaaaaacgacataaaccgatgcacattaacgacatcaccatcatcgatgacagcaaactcaagaaggcgatcaccgcggcggccctgggcaacgcgatggagtggttcgacttcggcgtatacggctttgtcgcctatgcgcttggccaggtcttcttccccggcgcctctcccggcgtgcaaatgatcgccgcgctggcgaccttctccgtgcccttcctggtgcgtccgctcggcggcctgttcttcggcgccatgggcgacaagttcggtcgccaaaaggtgctctcggtgaccattatcatcatggcggtcagcaccttctgtatcggcctgatcccgtcctatgcgtcgatcggtatctgggcaccgatcctgctgctgctggccaagctggcgcagggcttctccgtcggcggtgaatattccggtgcggcgatcttcgtcgccgaatactcgccggaccgcaaacgcggctttatgggcagctggctggacttcggctccatcgccggctttgtgatgggcgcaggcgtggtggtgctgatctccagcatcgtcggcgaagccaacttcctcgactggggctggcgtatcccgttcttcatcgccgcaccgctgggcctgatcggtctctatctgcgccatgcgctggaagaaaccccggcgttccagcagcacgtggacaagatggaaaaagatgaccgcaacgccatcgaaaatccgccgaaaacctcgttcaaagagatcgcggccaaacactggaaaagtttgctggtgtgcgtcggtatcgtcatctccaccaacgtgacctattacatgctgctgacctacatgccgagctacctgtcgcataacctgcactactcggaagatcacggcgttctgatcatcatcgccatcatgatcggcatgctgttcgtacagccggtaatcggcctgaccagcgaccgcatcggccgtaagccgttcattatcggcggcagcatcggcctgttggcgctggcgatcccgtgcttcattctgatcaacagcaacgtgattggcctgatcttcgtcggtctgctggtgctggcggtgctgctcaactccttcaccggggtgatggcctcgattttgccggcgatgttcccgacgcacatccgttacagcgcgctggcgatttcgttcaacatttcggtgctgatcgccggtgcgacgccgaccgccgccgcctggctggtcgaagcgaccggcaacctgtacatgccggcctactacctgatggttgtggcggtgatcggtcttatcacaggtctgtacatgaaagaaaccgccaacaagccgctgcgcggcgcgacgccggccgcttcggaccgctcagaagcgaaagagctgctgcaggagacctacgacaacatcgaacagaaagtcgaggacatcaacgcgcagatcgccgaattggaaaagaaaaagcagatcctgatcgaccagcatcccaagctggattga

SEQ ID NO: 422674 - DNA, 1368 bp, Serratia marcescens
atgaaaattttatctcccctggcgttaagcctcgccgccctgctcaccgccggctgcggcaatgccctgaaaagcgactaccgggcgccgcaggtcaactatccgacgagctggcagcacgccgccgacaacgccgcgccgacgccgttcgactggcgcgatttccacgatcccgagctcgatcgctggctgcaacaggtgatggccagcaacaacgatctggccgtcgccgtgctgcgcgtctaccgtgcgcggctcgaggcggaacgcgtcggcatcagcaccgcccccgacgtcaacgcctcgttgaacagcagcatcaatcgcccgctgtcggagtcctccgcctggaataaaaccagcggcgcgacgctctctacgagctatgaagtcgacctttggggcaaactggcgcgccagcgcgatgccgccgagtgggccagccaggcttccgagcaggatctgcagacggcgcgcctgacgttgctggccaacgccgccacgaattactggcgcatcggcttcctcaatcagcagatcggcgtcagccaggcaagcatcgcctacgccaaacagacgctgcggctggccaacgcccgctaccgggccggcagcatctcggcgctggacgtggtgaacgcggaacaaaacgtgctgacgcaggaaaaccggctgctggcgttgcaacacgatcgtcaacaggcgctgaatgaacagacggtgctgttgggcgcgccttcaggccaggccaccatcgcgcccgcgcgtctgccgacgacggcgatgccgcagatcaacaccggcatccccgccagcgtcttgagccggcgcccggatctcagcgccaaagagctgcggttgcgcgccgccctggccaacgtcgacgagaaacgtctgcagtactatcccgcgttcagcctgaccggctcgctgggcgccagcagcagcgcgctgctggagttcctgcgcaacccgacgggcagcctcggcgccggcctgacgttgccattcctgcaatggcagcaaatgggggtggatatcaagatcgcccgtaacgactacgaacagcaggtgctggccttcaggcaggcgctgtacaaggcgatgggtgatgtgaataacgccctgtcgctgcgcgcacagctgcgggcgcaagagacgcagctgcaggcctcgctggcattggcgcgcaaatcggagcggctgaacgaggtgcgttaccggcagggcgccgtcaccattaccgactggctaaatgctcaggagcagcgccgtcaagcggaactggcggtggacgagaaccgcttcgcgcagtaccagaacctggcgaaaatctatctggaattcggcggttcgtcggtaccctaa

SEQ ID NO: 422675 - DNA, 1938 bp, Serratia marcescens
gtgaacgcgatcatcgagctaaaaggcatcagccgaacctacaccaacggcggccaggcgctgacggtgttgaaagacatcgatttgaccatcgccgccggcgaactggtggcgatcatcggcgcctccggttccggcaaatcgacgctaatgaacatcatgggctgcctcgatgtgccggatcgcggcgactactacatcagcggccagaacgccgcccacctgtcgccggacgaactggcccgcctgcgccgcgagcatatcggctttatcttccagcgttaccacctgatgcccgatctcagcgcgctgggcaacgttgaaattccggccatctacgccaacgcccggcgcgatcagcggcggcagcgagcggcgcaactgctggcgcggttgggcctggaggggcgcgaagaccacaagcccggccagctttccggcggccagcagcagcgcgtcagcatcgcgcgctcgctgatcaacggcggcgaaattatcctggcggacgaaccgaccggcgcgctggacacccaatccggccaggaagtgctggcgatcctcagcgagctgaaccaacgcggccacaccgtggtgatcgtcacccacgatatgaaagtggcgcaacatgcgcagcgcgtcatcgaactgcaagacggcaaaatcatcgctgacagcggccgccaatcggcacccgccgtcgcgctaccgccgccgaaccgcagccggcaaagcggctggcaaagtcttatcgaccgcacccgcgagtcgctgcacatggcgctgaaggcgatgaacgcccaccgcctgcgcaccgcgttgaccatgaccggcattatcttcggcatcgccgccgtggtcacggtggtggcgctgggcgaaggcgccaaacagcgcacgctggagaatatcaaggggctcggcaccaacgtggtgagcatctatccggggcgtgacttcttcgacgacgccatcgacagcatccgcaccctggtgccggccgatgccgacgcgctggcgcagcaaagcttcgtcgacagcgtcagcccggaagtcagcgcgtccgacagcattcgctttcgcagcaaatccgccaccgcgtcaatcaccggcgtcggccgcgattatttccgcgtcaacggcatcacgctggtgcaaggcgccaccttccgcgacgatcgcaacgcgctgcaggaagtgatcatcgacgacaacgcgcgccaggcgctgttcggcgatttcggcgtcgagccgctcggccagatcgtgtttctcggctcagtgccggcgcgggtggtcggcgtcgccaaaagcgaacgcaactatgcgcccaaccgcatcagcgtctggatgccttacagcacggtgatgtaccgtatggtcggcaaaaccacgctcagcggcattaccgtgcggctgaaggatgacgtcgccagcgaagccgccgtcagcgccattacgcagttgctgacccagcgccatggcgtcaaggatttcatgacgttcaaccgcgatcagttccgtaaatcgatcgagcgcacctcgatgacgctcagtttgctgatcctgatggtggcctcgatctcgctggtgatcggcagcctgggcgtgatgaacatcatgctggtctcggtgaccgagcgcacccatgagatcggcgtgcgcatggcggtcggcgcaaggcgcggcgatatcatgcaacagttcatgatcgaggcggtgctggtctgtttgatcggcggcgcattgggcatcgcgctgtcgttcgccgccgggtcgctgttcacctcgctggcgggcggcatgttcaccgccatctattcctggcaagccgccgcgacggcgtttttctgttcaaccttaatcggcatgatcttcggttatctccccgcccgcaaagcggcaaggatggatccggtcgtttcattggccagcgagtaa

SEQ ID NO: 422676 - DNA, 1191 bp, Serratia marcescens
atgacttcactgaaactcacaccccgtcgtctgacgctgatcgccgtcatcattttcatctgcgtcgccatcgcgctggccctctattggcaacgcccgccgcagcaggattacgttaccgcaacggcccgcctgggcgatatcgagaacgccgtgctggccaccgggcgactggatgccgtcgaacgcgttaacgtcggggcgcgggtctccggtgaagtgaaatcgctgaaggtcaaactgggcgatcgcgtcaccaaagggcaaccgatcgccgacatcgacgatctgcaacagcgcaacgatctgcgcaacgccgaggcggcgctgaacgtcatcaaggccgaactgcaggccaaacaggcgcagctgaaacaggccgagtcgcgtttcaaacgccagcgccgcatgctgaacgacgaagccagctcgcgggaggacttcgaaaccgccgaagccacgctcgccaccacccgcgccgagcagctttcgctcaatgcccgcctggtgcaggcgcagattgaagtcgacaagaaaaaaatcgatctgggctatacccgcgtggtcgcgccgatggacggcatcgtcatcgccgtggttacgcagcaggggcaaacggtcaactccagccaaagcgcgccgaccatcgtcaagctggcgcggctggatatgatgaccatcaaggcgcagatctccgaagccgacatcacccgcatttcaccggggcaaaaggcgtacttcaccattttctccgatccggataaacgctacgacgccacgctgcgcaccatcgaactggcaccggaatcggtaatgaaagacgactcgctcgccggcaccagctccgcctccggttccggcacctcgaacgcgtcggtctattacaacgcgctgctggacgtgcccaacccggaaaaccgcctgcgcatcgccatgaccgcgcaggtgtccttgctgctcggcgaagcgaagcacaccctgctggtgccgatccaggcagtgcataaaatcgatggcaaagagcagcaggtgcaggtgctgacccaagaccagcggctggaaacgcgcaaagtgaccaccggcatcaccaacaacgtcgacattcagatcctcagcggcctgaaagccggtgaaaccgtggtgctgtcgcagcccgccgccaagccggctgaggatggcatcttcctgtga

SEQ ID NO: 422677 - DNA, 849 bp, Serratia marcescens
atgatgccaaaccgcctcgagccggaactcgacatttaccaatacccggagcacctgcgcgcctgtctggcgccgttgcccaaggggccgggcgtctatctgttccacggcgagagcgaaagcctgccgctttacatcggtaaaagcgtcaacgtacgcagccgggtgatggcgcattttcgcgcgcaggacgaggcgaaaatgctgcgccaaacccggcgcatcagctttatcgagaccgccggcgagttgggcgcattgctgctggaggcgcagttgatcaagcagcaacaaccgttgttcaacaaacgcctgcggcgctcgaaacagctgtgtgcgctgcgtctgcaggcggacacggtgacgattgcccacgccaaagagatcgatttcgccgtcacgccccacctctacgggctgtttgccaatcgccatgccgcgctggaaaaactgcgcgccatcgccgacgagcatcgtttatgttatggcaagctggggatcgacaagctgcccgcggggcgagcctgcttccgctacagcctgcgcaagtgcgccggcgcctgctgcggcgtggagtcggcgcaggaacatgcgcggcggctcagcgcggcgcttgaacagctgcgcatcgcctgttggccattcgccgggcgcgtggcgttggaagaacagggcgagacgctgcgtcagtaccatgtgattcacaattggttttatctgggctcggtcagcagcctggcgcaggcgcagcggctgcagagtgcggccagccattttgacagcgatggctacaagattttgtgcaagccgctcatggccggcgattatcggattattgagctgccgtaa

SEQ ID NO: 422678 - DNA, 300 bp, Serratia marcescens
atgtctcactccgagcaactgcaggaactcttgcaacgcgtcgccgccctcgaggcgagagagaaagcgctgagcgccgcgtccaacgcttatcaggcgattatcaccaccatgttgggcaatatggaaaagaccgaacgcgatcggatcatcgcgatgatcgatcaggcccatgaaatcgcctacgcccgcgccattcaacgcagcaacgaaccgcaaaagcagaaaatcaaacaggccgatgatgtggcccagcgcatgttcatgtttgcgcaaggcaaggccgcccaaccgcgctga

SEQ ID NO: 422679 - DNA, 504 bp, Serratia marcescens
atggacgcgattaaaagcatcttggttaaagagattgaacagatcaatcggcgcgaagggcgtgacggcaagccgcgcttcaacagcgaattcgctcgcactcaccgctatctgtgccttgccatgttcgccggttatttcgcggtgatcgccgtgatgtaccaggtgccgtacatggggatatatgctttcctgggcttcaccgcttttgtgctgttcatgttcgccatgctgctgatcgagatccggccggtataccgcttcgaggacatcggggtgctggatctgcgggtttgctacaacggcgagtggtactttacccgcgcgctgtcgccctatgcggtgcagcaactgctggaggagccgtccatcggcgccgcgctgaaacagaagatgcgcgtgatcatcggcaacaagggcgaaatcgacttctacgacgtgtacgacatggcctacggaaaaaagccgcaggatgagcagccgcagctggcggcggcaaactga

SEQ ID NO: 422680 - DNA, 132 bp, Serratia marcescens
atgagtgatgatattttcgattttgatatcgatgccgaactggcgaaagccgaagaaaaagcggcgcagaaggtaaaagaggttcctgagttcctcgaagacgaagcggactgcgaaggttgcaagatctga

SEQ ID NO: 422681 - DNA, 1722 bp, Serratia marcescens
ttggatgccagcaccattaacagtttgttcgtcatcggtgccgtgctggtgggggcaagcattctgctcagctcattttcttcccggctcggcattccgatcctggtgatctttctggcgatcggcatgttggccggcgtcgatggccccggcggcatcgtcttcagcaattaccccgtcgcttatctggtcagcaacctcgcgttggcggtgatcctgctcgacggcggcatgcgtacccgggtcagctctttccgcgtcgccctgtggccggcgctgtctctcgccaccatcggcgtggtgatcaccgccggtctgaccggcatggccgccgcctggctgttcaatctcgatctgctgcaggggctgctgatcggcgccattatcggttccaccgacgccgccgcggtattctccctcttggggggcaaaggtttgaacgaacgcgtcagcgccacgctggagatcgaatccggcagcaacgatccgatggcggtgtttctcaccatcacgctgattgcgatgatcgccgccggggaaaccgcgctgagctgggccttcccgctgcatctgatgcagcagttcggtatgggcatcgtcttcggtctgggcggcggctggctgctgctgacgctgatcaaccacatcaaactggcggacggcctctatccgctgctggcggtgagcggcggcattcttatttttgcgctgaccaccgcgctggacggcagcggcattctggcggtgtatctgtgcggcctgctgctgggcaaccggccgatccgcaaccggcacggcatcgtacaaaccttcgacggcctggcgtggctcagccagatcggcatgttcctggtgcttggcctgctgctcaacccgcacgagctgctgccgatcgccatccctgccctgctgctgtcgctgtggatgatcctgttcgcccgtccgctgtcggtgtttatcggcctgctgccgtttcgcagctttaccctgcgcgagcgcggctttatttcctgggtcggcctgcgcggtgcggtgccggtgatcctggcggtgttcccgatgatggccgggctgcccaacgcccagctgtttttcaacgtggcgttcttcgtggtgctggtctccctgctgctgcaaggcaccacgctgtcgtttgccgccaaaaaagccaaggtgatcgtgccgccggcgctgacgccgatctcccgcgttgggctggacgtacatccggaaaaccagtgggaacagttcgtgtatcagctttcggcggaaaactggtgcgtcggcgcggcgctgcgagagctgaagatgccacccaatacccgcatcgccgccctgttccgcggcaaagaactgctgcacccaagcggcagtacccgcctgcgggagaacgatattctgtgcgttatcggccatgagcacgacctgcccatcctcggcaaactgttcagccaggcgccggccgtgacgctcgacgagcgcttcttcggcgactttatcctgcagtccgatgcccgtttaagcgacatctcgcagctttatggcctcaatctgcaagacgacgtggacgagcagcagacgctgggccagttcgtcattcagctgatcggcggcgaaccggtgatcggcgaccaggtggaatgggacggcctgacctggaccatcgccgaaatggacggcaatcaagtcagcaagataggcgtgcggatcgtaaccgactga

SEQ ID NO: 422682 - DNA, 225 bp, Serratia marcescens
atgaccgacaagaacactccggctcaggaagccatagcggaaaacgccaccctgctgaagatcctcggcaggttgctgtccgcgctggacgcttcgatcagcggcaaagaacgcagcattctggtcgctgagctctccaacttcaatctcgacggcatttccgaagcggaaagcaagctggcctccgagctgatcaaacgggcgctggaatcgctcgatcattaa

SEQ ID NO: 422683 - DNA, 1017 bp, Serratia marcescens
atgagagaagcatgggtcgattatgccaagggaatcggcatcattctcgtggtttttggccacgttaatcggggtctatacagcgcgggcattcagctttccggttcatcctatctactgacggacagcattatctacagttttcatatgccgctgtttttcttcctttccggtctattttttacgcaatccttggataaaaagggaaaaaccagctttttgatcagcaagatagacaccatcgtttatccctatgttgtctggtcgctactgcaaggcatggtggaagtactgttgtcgcgctataccaataacccttccagcctgggcgatgtcctgtcgctgtttacgcatccacgcgcgcagttttggttcctgtacgccttgttcatggtctttgttttggccaccttgctgtacagcaaagaaaaataccgttatctcctgccggtattgatcgttatcagcgcggggctgtatctctaccaagacagcctaaccaaagccttccattttgattacattacccgattcttgatcttcttcctgcttggcgcttttgccattcgctacgcttccctcatcgccaatctgggtttcggttcgctgctggcctccttgatcgcgttcatcgcgctgcagtggggattccacggctattctggcttgctgtataccgataccggcagtttctccctgttactggcggttgaagccatcttcttgatcgtcagcctgtcggttctgctggccaagacgaatctttcctggctgagacgactcggcgaattgagcatggtcatctatttgatgcatatcctcgcggccagcggcttacgcatcatactgaccaaatttatgcatatcagccattggccaacacaagcgatcgccggcacgctattcgggctgatcgcccctgttatcgcctatgcgctgatacagcgtctgcaccttacttttctcttggatcgtcctcgcttcaataaccgtctgcgaaaagaaaaaatctcctga

SEQ ID NO: 422684 - DNA, 1131 bp, Serratia marcescens
atgactaaaggcagcaaacagcgcgagttttttctcgactccatcagagcctatttgatgttgctcggcatcccgtttcacctctcactgatctattccagccacgcctgggcggtgaacagcccgtcgccctctttctcgctcacggtgctgaacgacttcatccacgccttccgcatgcaggtgttcttcgtgatctccggctacttctcctacatgctttacgagcgctacgagcgccaccagtggctgaaggtcaggctggagcgggtggcgatcccgctgttgagttccatcccgctaatcacggtgccgcagtttttcatgctgaaatatttcaccgataaattaaacggctgggatgagttttctctctatcagaaaataaatgtaacagtttgggaattggtgtctcatctttggttcttattgaccctgtcattgttaacctgcgcctgcttttatctgttccgcaacatcaagcgtcaaccccgtgaacatattcctgcattaataaacagaatgcgtggattaggaaacatctcactgtatttctttatttatgcgatatgctattcggccgcgcaccgcattattttaatttttgtaccgcagctattatccaacggcctgttcaatttcgtggtgatggagacgatgttctacctgccgttcttcatcctcggcgcttatgcgtttaagtatgtgtggcttaaggagatttttctgcgccgctcaccgctggcgctgctcggttcgctgctgctgtttatcgcatatatgctgaaccaaaagctgctggcgcacagcagctatatgttcgagctggaagtggtgatcaaaaccctaatggggatcctgatgaccaacgtggcgttctctttcgggcataacctgctgaattatcactcgccgcgcatcacctatctggtcaacgcttcgctgtttatatatctggtgcaccatccgttgaccctgatatatggcgctttcgtgacgccttatatcggcaacaacctgttgggattcttgctgggcctgctgtttgtgttctcgctggccttcgcgttatatgaactgcacaaacgcgttccgctgctgcgcttcctgttctccggcaagccgcgttag

SEQ ID NO: 422685 - DNA, 1569 bp, Serratia marcescens
gtgctagttaatatattatccggacaaccacgcgccgcgagcgttcgttggttaggtgctaccgtattgttcacgctgttcagttcgccggcatgggccttttctattgatgatgtggccaagcaggcgcaggacctggcggcgaaaggtttcgaagccccgaagagcaaccttccttctcagttccgcgagatgaagttcgcagactatcagcagattcagttcaatcacgataaagcctattggagcaagctgaaaacccctttcaagcttgagttttatcatcaggggatgtacttcgacacgccggtgaaaatcaatgaagtcacctccaccagcgtaaaacagatcaagtacagcccggattacttcaacttcggttcggtcaaacacgaccctgaatcggtgaaaaatctcggttttgccggctttaaggtgctctacccggtcaacagcgccgacaaaaacgatgagatcatgagcctgcttggcgcgagctatttccgcgtggtgggtaaagggcaggtttacgggctttccgctcgcggcctggccatcgataccgctttgccgtccggcgaagagttcccgcgtttccgcgaattctgggttgagcgtccgaagcagggcgacaagcacctggtgatctatgcgctgctggattccccgcgcgccaccggcgcttaccgtttcacggtgatcccgggccgcgacaccaccgtggacgtcgagtccaaagtgttcctgcgcgacaaggtgggcaaactgggcctggcgccgctgaccagcatgttcctgttcgggccgaaccagccgtcgccgacgttgaactaccgtccggcgttgcacgactccaacggcctgtctatccatgccggcaacggcgagtggatctggcgcccgctgaacaatcctaaacacctgtccgtcagcacctataccgtcgagaatccgaaaggcttcggtctgctgcagcgcggccgcaacttcaaagaatatgaagatctggacgatcgttacgatctgcgcccgagcgcctggattgaaccgaagggcgactggggcaaaggcaaggttgagctggtggagatcccgacggcggatgaaaccaacgacaacatcgtcgcgttctggacgccggatacgctgccggaagccaaaaagccgctgacgctgagctaccggctgaacttcacccgcgatgaagacaaactgcattcgcaggacatcgcctatgtggcccgcaccatgcgttcgaccggtgacgtgaagcagtccaacctgattcgcgagccagacggcagcgtggccttcctggtcgacttcgtcggcccggtgctgaaagggctggacgccaataccccggtcgcctctcagatcagcatcggcgacaacggtgaaatggtagaaaacaacgtccgctataacccagtgaccaaaggctggcgcctgacggtgcgtctgaaagtgaaagacgacaagaagccggtagaaatgcgcgcggcgctggtcaatggcgataagactctgtcggaaacctggagctatcagctacctgccaatgaataa

SEQ ID NO: 422686 - DNA, 2559 bp, Serratia marcescens
atgaataagcctactcaacccgcccaggattatcttgcggcgctgcctctgaccgccgagcggtcggaggcgctcaaccctcaaacggcggatgacgctcaggcactggaggcgctccatcggcagatgggcgccgccgacgccaacgtcaatagcctgtcggcggatgacgtggcgctggcctcggtcaaaccgcgtatcgaaaacgcctggccggatgcggtcagcgatgacgacttcgataccgacgccgaagggcgcgccattctgaaggcgacgccgccgatcaaacgaaccaccatgttcccggaagcctggcgcaccaacccggtggcgcgcttctgggattctctgctggggcgttcgccgcacaaccggcacgccaccaaagaggaggccgaggccgagaaccgctggcgtaccgtcggctccatgcgccgttatgtgctgctggtgctgatgctggtgcaaaccggcatcgccacctggtacatgaaaaccatcttgccttatcagggctgggcgctgatcgatcctatcgccatgctggatcaggatctgatgcagtcggtgctgcagctgctgccatatgtgctgcaaaccggcattctgatcctgttcgccgtactgttctgctgggtctcggccggtttctggaccgcgctgatgggcttcctgcagctgctgatcggcaaggacaaatacagcatttcctccaccatcaagggcgatgagccgatcaatccggcgcaccgcaccgcgctgatcatgccgatctgcaacgaagacgtcgaacgcgttttcgccggcctgcgtgcgacctatgagtccgtcgccgcgaccggtcagctggaacacttcgatatctacgtcttgagcgacagctacgatccggacatctgcgtggcggagcaaaaggcgtggatggagctgtgccgcgatgtcgacggccacggccgcatcttctatcgccgtcgccgccgccgcgtcaaacgcaagagcggcaacatcgacgacttctgccgtcgttggggcggtgagtacagctacatggtgatcctggatgccgacagcgtgatgagcggcgaatgcctcaccgggctggtgcgtctgatggaagccaacccgaacgccggcatcatccagtccgcgccgaaggcgtccggcatggataccctgtatgcgcgcgtgcagcagttcgctacccgcgtttacgggccgctgtttaccgccggcctgcatttctggcagttgggcgagtcgcactactggggccataacgccatcatccgcgtgaagccgtttatcgagcactgtgcgctggcgccgctgccgggcgagggctccttcgccggttcaatcttgtcgcatgacttcgttgaagcggcactgatgcgccgcgctggctggggcgtgtggatcgcttacgatctgccgggcagttacgaagagctgccgccaaacctgctggacgagctgaaacgcgaccgtcgctggtgccacggcaacctgatgaacttccgcctgttcctggtgaagggcatgcacccggtgcaccgcgcggtgttcctcaccggcgtgatgtcctacctgtcggcgccgctgtggttcatgttcctggcgctctccaccgcgttgcaggtggtgcacaccctgatggaaccgcaatacttcctgcagccgcggcagttgttcccggtctggccgcagtggcggcccgagctggcgatagcgctgttctccaccacgctggtgctgttgttcctgccgaagctgctcagcatcgtgctgatctgggccaagggcgcgaaagagtacggcggggcgttccggctgttcatttcgatgctgatggaaatgctgttctcggtgctgctggcaccggtgcgcatgctgttccataccgtgttcgtggtgagcgccttcctcggttgggaagtggtgtggaattcgccgcagcgtgacgacgacgatacgccgtggggcgaagccttccgccgccatggctcgcagatgttgctgggcctggtgtgggccggcggcatggcgtggttggatctgcgcttcctgtggtggttggcgccgatcgtgttctcgctgatcctgtcgccgttcgtgtcggtgctttcgagccgcgcgacgctgggcatgaagagcaaacacgccaagctgttcctgatcccggaagagtacaacccgccgcgtgagctgttggcgacggaagaatacctgcatctcaaccgcaatcgcgcgctgaccaacggctttatgcatgcggtggtcaacccgtccttcaacgcgctggcgacggcgttggcgacggcgcgtcaccatctgcgcgcgacgctcgatcgcaaccgcgaggagcgggtgaacgaagcgctgcagctggggccggagaagctggcgaagggcaaacgtctggagctactgagcgatccggtcacgctggctcgtttgcaccagcgcgtctggctgttgccggaaggcgccgcctggcgtgagcactatcagcagttgccgcacaacccgctggcgcacccaacgggccggcgttaa

SEQ ID NO: 422687 - DNA, 246 bp, Serratia marcescens
gtgaatctctcttcctaccttcggctggcctgcgtggcggccggcgtgatggccctgaccggctgcggcagcattatcagccgcaccgtgcccggcgcggggcatggccaccagtactatcccggcgtgcagtgggatctgcgcgatacgccctggcgctacgtcacggtgatagacgtgccgctgtcgatggtggtggacacctttatgctgccgttcgatgcgcagcacggcccctatgaataa

SEQ ID NO: 422688 - DNA, 546 bp, Serratia marcescens
atgaatattcgccgggctcgccccaccgactaccccgccattttgcagctgcagggggaaaacgtgccggaagcgctcgacgagcgccaaaaacggcagggatttatcgtatcgcgcatgaatgaggcgcagctggcggcgatcaaccgcggcatcggcatactagtggctgaacaggaaaaccaactggcaggctttgtttgcctgatgcccgccgacgtgcaaccgcgcccgccggtggtggacgcgatgctggcgacgctcgccacgcaatccttcgccggacgcgcgctgaatgaactgcgggtgtttctctacggcccggtctgcctcgccgccgcctggcgcggcaaaggcgtgctgaagcgcctttacgctgcggtcaaagcgcataccagccatgactacgacgtgggcgcgctgtttatcgacgacgacaatccgcattcgttggccgctcacgtgcaagggctgggcatgacggcgctggcgcctttccattgcgggcagaaaggctatcagctggtggtgttcgccacccgctga

SEQ ID NO: 422689 - DNA, 378 bp, Serratia marcescens
atgagcctgtatgcaaccctggaagaagccatcgaggccgcacgcgaagagtttatcgacaccgccgaaggcggcggcgatgacgaaccgccggtgccgcagcagttcaatctgcaaaagtacgtgatgcaggatggcgacacgatgtggcaggccgagttcttcgaggaagaaggcgaagcggtggagtgcctgccgctgcgcagcggtgcggcggcgcaggcaatcttcgacggtgactacgacgaggtggagatcaccgccgagtggatagatgaaaataccctgtacgaatgggaagaaggcgacttccagctcgagccgccgctggataccgaagaaggccaggccgcggccgatgagtgggatgaacgttaa

SEQ ID NO: 422690 - DNA, 1689 bp, Serratia marcescens
atgttaatcgacccttcaagcaaatatcgacccttcccgccggtggcgttgccggaccgccaatggcctgcgcgtacgctgcggcaggcgccgcgctggtgctccagcgatctgcgcgacggcaaccaggcgctggcggaaccgatggataacgcgcgcaagcgcgagttctatcaattgctgttgcagtgtggtttcaaagagattgaagtggctttcccttcggcgtcgcaaacggatttcgattttgtgcgcacgctgattgacgagcagctgatcccggacgacgtcacgattcaggtgctgacgcagtcgcgcgacgatctgatcgaccgcaccttcgaggcgctgcagggggcgccacgggctatcgtgcatctgtacaacgccacggcgccgatgtttcgcgacatcgtgttccgccaggataaggccgccaccgtggcgctggcggtgaacggcgcgcggcgcattcgccggcagtgcgaggctcagcccgataccgcctggtgcttcgagtattcgccggaaaccttctgttttactgaattggcgttcgcgctggagatctgcgaagcggtggcggcggtgtggcaaccggggccgcagcggccgatgatcatcaatctgccggcgacggtggaagtgagcacgcccaatgtgtatgccgatcagattgaatggttctgtcgccacttcagccgccgcgccgatgtaacgatcagcgtgcatccgcataacgatcgcggcaccggcgtggcctgcgcggagctggcgctgttggccggcgccgatcgggtcgaaggctgcctgttcggcaacggggagcgcaccggcaacgtcgatctggttacgctggcgttgaatctctatacccagggcgtggcgccgggcctggacttcagccgcctgaagcaggtggtggaggtggtggagctgtgcaatcagctgccggtgcaccctcgccatccttatgccggcgagttggtgtttaccgccttctccggttcgcatcaggatgcgattaaaaaaggcttcgccgcccagcgccagcgccaggatggctggtggcaggtgccttacctgccgctcgatcccgccgatgtcggctgcagctatgaggcggtgatccgggtcaacagccagtccggcaaaagcggagccgcctggctgttggaacaaaatcacgggctggcgttgccgcgcggtttgcagattgatttcagccaggtggtgcagcgcgcgaccgacggcagcggcaaggaaatgagcggcgcgcagctgtggcgcttattccgcgacacctatgggctggtggagcaaccgcgcttgcagctgctgagctaccagacggaaagccacggcgtagaggcctacagcttcaatgcgcgggttgcctgtgagggagagccgctgcggctgcagggcgccggcaatggcctgctttccagcgcggtggatgcgctgcgccagcgcttcggcttgccgctggcgatcgaggattaccacgagcatacgctggggcaccagagcgacagccgggcggtggcctatattcgctgctcgttgccgcagggtgaggcgacctacggcgttggcatcgacgtcgactccgccagcgcctcgctgcaggcgctgctcaacgtcgccgggcgctatctggcgtcaacgtcggcgcggccgggctga

SEQ ID NO: 422691 - DNA, 801 bp, Serratia marcescens
atgctgttgtttcacgacgttctgccgcccgaccagcctgtccggccgttggccaaggattatcgccacggcgacagcgagccggatcactaccatcactgcgcgcagctgattcacagcctgagcggcgtggtgcaggtcacgacccggctcggcagttgggtggtgccgcccggccgcggcgtctgggtgccggctaaggtggtgcatagtctgcgcattaccggccaggtggcggccaggacgctgttcgtcgatccgctggcgcgcgccgatctgccggcccaatgccaagtggtgcaggtttctccgctgctgcgcgagttgattatctgtgcgatggagattgcgcccgattacccgagcggcggacgcgatgagcgcgtcatggaactgattctggatgagttgcggatgctgccgatcctgccgctgcacctgcctgaaccgcgtgaggcatcgctgctcgccctgtgccgccatatccaggctacgctggcgcagccctggacgctggaacaggcggccgctcatctcagcgtcagcggacgcaccctgtcgcggcgcttccagcgcgaaaccgggctgcattttagcgattgggtgcgacgcgcccgtttgctggcggcgctgaacgcgctggcgaccggccgctcggtgttggaagtggcgcttgatctcggctatgacagccccagcgcgttcagcgccatgtttcgtcgggtgctgggggtcgcgcccagcgactatttcagcccggccgcgccgacgttgacgccagatagcgcccggcgacgttga

SEQ ID NO: 422692 - DNA, 318 bp, Serratia marcescens
atggatattgacgcgatgcgcaaggcggcggcgcaggctggcgcgatgctgcgcaccttgggcaacgaagatcggctgctgctgctgtgccggctcagccagggcgagatggcggtgagcgagctggcgcaggcgctggatatccgccagccgacgctgtcccagcagcttggcgtgctgcgcgaggagggattggtctccacccgacgcgccggtaagcagatttactatgcggtggccgatgccaaagcgctggcgctgctccataccctgtatcaactctattgcccacagccggagaaccgcgatgaccattga

SEQ ID NO: 422693 - DNA, 435 bp, Serratia marcescens
atgaccattgactggcaacacttcacgccgtattccgcgctggcgggcggagccattatcggcgcagcggtggcgctgctgctgctgttcaacggccggatcgccggcatcagcggcattaccggcggtttattgagcgcgggtggccgcgagcggggctggcgcgccgcatttcttggcgggttgctgatttccccctggctgtatgctgccgcagcggctttgccgtctgctgagatcgcggccggcagcggcgggctggcggtagcagggctgttggtgggggtggggactcgattgggcagcggttgcaccagcgggcacggcgtgtgcggcgtcgcgcggctggcgccgcgttcgctggccgccacggcggtgtttatgctgctgggttttatgaccgtgtggctgatgcaccacttgctgggagggtga

SEQ ID NO: 422694 - DNA, 429 bp, Serratia marcescens
atgtttaaatccctgttggcgctgctgagcggcgtgattttcggtctggggctgatcgtcgccggcatggccaatccggccaaagtgttggcgtttctcgacgttaccggccagtgggatccttcgctggcgctggtgatggttggggcgatcgcggtggcggcgccggccttcttgtgggcgcggcgacgcgagcggagcctgttgggcgaaccgctgcagatcccggccaccgggcgtgtggatcgccgtttgctggcgggcagcgcgctgttcggcgtcggttggggcatcgcgggcatttgccctggccccgcctgggtgttggcgggggcggagatacagcgggtatggccgttcctgctggcgatgctggcgggcatggcgctgtatgagattatcatgaggcggaggcgtacatgtcgatag

SEQ ID NO: 422695 - DNA, 399 bp, Serratia marcescens
atgtcgatagccaaggcggtgttgcgcatcgcgcgcccgaccgatcggttgcaagagattgccgcgctgtattgtcgtgggctggggttcgaaaagctgggcgagtttgtcgatcatcagggctttgacggcataatgatcggccatccgcagcatgcctaccatctggagttcacgcagcatcgcggggtgcgggtcgggcaggcgccgacgcaggatcatctgctggtgttttatctgccggatgagaacgcatggcgagccgcgtgcgagcggatgcgggcggcaggattcctggctgtcaccgcctataacccctattgggatagggcggggcaaacctttgaagatcctgacggctaccgggtggttctgcaacatcaggcctggcaaggataa

SEQ ID NO: 422696 - DNA, 1554 bp, Serratia marcescens
atgcaatcctctgtcaataagtcagaaagccggaccttcttcggccatccctatccgctgggttctctgttcttcaccgaaatgtgggagcgcttttcgttctacggcatccgtccgctgctgatcctgtttatggccgccaccgtatacgacggcggtctgggtctggcgcgcgagaacgcgtcggcgatcgtcggcatcttcgccggcagcatgtacctggcggcgctgccgggcggctggctggcggacaactggctcggccaacgcaaggccgtttggtacggttcgattctgatcgccctcggccacctgtcgatcgccctgtccgcggtgatgggcaccaacctgttcttcatcggcctgatgttcatcgtgctcggttccggcctgttcaagacctgtatctcggtgatggtcggcacgctgtacaagaaaggcgatgcgcgccgcgacggcggtttctcgctgttctacatgggcatcaacatcggttcgttcatcgccccgttgatctccggctggctgatcaagtcacacggctggcactggggcttcggcatcggcggtatcgggatgctggtggcgctggtgatcttccgcgtgttcgccgtcccggcgatgaaacgctatgaccgcgaagtgggcctggattccacctggaacagcccggtcgcgaagaaaaaaggcgtcggcgcctggctgctggcattggcggtaggcctggctgcggtcatcgtgctgatcgctcagggcaccatcgtcatcaacccggtcgaagtagccagcgtgctggtgtacgtgatcgccgcgtcggtcaccctgtatttcatctatctgttcgcctttgccggcctgagccgcaaagagcgcgctcgcctgctggtgtgctttatcctgctgatctccgccgcgttcttctggtcggcgtttgaacagaaaccgacctcgttcaacctgttcgccaacgattacaccaatcgcatggtcggcggcttcgagatcccggcggtgtggttccagtcgatcaacgccctgttcatcatcctgctggcgccggtgttcagctgggcctggcctgcactggcgcgcaataacgtgcgcccgagcagcattaccaagttcgtgatcggtatcctgtgcgccgccggcggtttcggcctgatgatgctggccgcgcagaatgtgctgagcaacggcggcgccggcgtatcgccgatgtggctggtgggcagtatcctgatgctgacgctgggtgagctgtgcctgagcccgatcggcctggccaccatgacgctgctggcgccggagagaatgcgcgggcaaatgatggggctgtggttctgcgccagcgcgctgggcaacctggcggccggtctgatcggcggtcacgtcaaggccgaccaactggatatgctgccggatctgttcgctcgctgctcagtcgcgctgctgatctgcgccgccgtgcttatcgtgctgatcgtgccgattcgccgcatgctggaaaatacccagaccaagagcgcgcagaaaccggcgaccagcgcctga

SEQ ID NO: 422697 - DNA, 1239 bp, Serratia marcescens
atggcttcggcagcagaacccgttaactggaaacgcaaccttttcgtcgcctgggtagggtgctttctcaccggcgccgccttcagcctggtgatgccgtttctgccgctgtacgtcgagacgctgggcgtaaccggccatcaggcgctcaacatgtggtccggtctgctgttcagcattaccttcctgttttccgctatcgccgcgccgttctggggcgccctggccgaccgacgcggccgtaaactgatgttgctgcgctcggcgttgggcatggcgatcgtcatggtgctgatgggcatggcgcaaacggtctggcagtttctcgcgctgcgggcggtgctggggttgcttggcgggttcatacccaacgccaacgcgctgatcgccacccaggtgccgcgcaaccgcagcggctgggcgctcggcaccctgtcaaccggcggcgtcggcggcgcgctgatcggcccgctgatcggcggcctgctggccgatctgtacggcctgcgcccggtgttttatatcaccgccgcggtgctgttcgtctgcttcgtgctgacgctgctgtatgtcaaagagcaatttaccccggtgcaaaagcgcgacatgttgcacgcaaaacaggtgttcgcctcgctgaagaacccgaagctggtgctcagcctgttcgtcaccaccatgatcatccagatcgccaccggctcaattgccccgatcctgacgctgtatgtgcgcgatctggccggcgcgacccataatctggcgtttatcagcgggctgatcgcctcggtgcccggcgtcgcggcattgatgagcgccccacggctgggcaaactgggcgatcgcatcggcccggaacgcattctggtctttatgctgatcgtctcggtgctgctgctgatcccgatggcgttcgtgcaaacgccgtggcagctcggcgtactgcgctttctgctgggggcagccgacggcgcgctgctgccggcggtacagacgctgttgatttataactgcaccaatcaggtcgccggccgaattttcagctacaaccagtcgttccgcgacgtcggcaacgtcagcggcccgctgctcggcgccgcggtctccgccggctacggttttcgcgcggtcttcgccgtcaccgctttggtggtgctgttcaacgccggttattcctggtggtgtctgcggcggcggccgggctacatgcgggaagacaccctgcaggaagagcaatag

SEQ ID NO: 422698 - DNA, 285 bp, Serratia marcescens
atgtacattgtcagcctgacctaccatcgcccgatcgccgacgtcgacagccaccttgacgggcacatcgcctggcttaagaaatattttcaggacggcaccttcatcgcctccggccgcaagaatccccgcaccggcggcgtgatcctggccaagggcattgagcgtgcgcggctggacgccatcctggccgaagatccgtttaacgccgtggcccactacgaggtcactgactttagcgccaccaccaccgccgccggtttcgaggcgctggccggcctataa

SEQ ID NO: 422699 - DNA, 921 bp, Serratia marcescens
atgactcaagttcctactttcaatcgttccttattgcacccgcgctactggctgacctgggtcggcatcggcttgctgtatctgctggtgttgctgccttatcccgtcatctactggctcggcacctcgattgggcgattttccatgcgctttctcaagcgacgcgtcgctatcgcccagcgtaacctcgagctctgttttcccgacatgccgcaggccgaacgcgatgcgctggtggtaaagaatttcgaatcggtcggcatggggctgtttgaaaccggcatggcgtggttctggcccaactggcgcatcgagcgctggttcaaggtcagcggcctggagcacatccaaaaggcgcgtgacaaccagcagggcgtgttgctgattggcctgcactttttgacgctggagctgggcgcgcgcatcttcggcattcacaacccgggcatcggcgtttaccgcccgcacgacaacaagctgatggactggctgcaaacctggggccgcatgcgttccaacaaatcgatgctggatcgcaaagacatcaaaggcatgatccgcgccctgaaacagggcgatatcatctggtatgcgccggatcacgactacggcccgcgcagcagcgtattcgtgccgctgttcgcggtagacaaagccgccaccaccaccggtagttacgtgctggtgcggatgggcaaaccggcgatcattccgttcaccccgcgccgcctgccggacggcaaaggctatgagctgatcatgcagccggcggtggaaaacttcccgctggataacgaactcgatgccgccgcctttatgaataaagtggtggaaaaagagatcctgatggcgccggatcaatatatgtggctgcatcgccgcttcaagacccgcccggaaggcgagccttcgctctactga

SEQ ID NO: 422700 - DNA, 159 bp, Serratia marcescens
atgttggcaccatggatcagtgcggggctgctggttttgggcgcggcggtcggcagcgtcggcgcgcatctgcaggtgaacgcgatattggcgctcgccggcgtgatgatggcgctcggtatgctggcttccgcgtttaccgaaggcggcggacgctga

SEQ ID NO: 422701 - DNA, 1068 bp, Serratia marcescens
atgccagtgttacataaccgaatttctaatgaggaactgaaggcgcgcatgctggcggaaaccgagccgcgcaccacagtttctttttacaaatatttctccatcgacgatcccaaagcgtttcgcgacagcctgtacgttcagttcgaaaaattgaaggtgttcggccgcatctacgtggcgaaagagggcatcaacgcgcagatcagcgtgccgcagcataacttcgacgcgttcaaagccgcgctgttcgcctcgcacccggcgctggatcaggttcgcctgaatatcgcgctcgaagacgacggaaaatccttctgggtgctgcgcctcaaggtgcgcgagcgcatcgtggccgacggcatcgatgacgagagctttgacccaagcaacgtcggcgaatatctgcaggccgatcgcgtcaatcagatgatcgacgatccgaatacggtgttcgtcgacatgcgcaaccactatgagtacgaagtcggtcacttcgaaaacgccatcgaggtgccgtcggataccttccgcgatcagctgccgatggcggtggagatgctgcaggacagcaaagacaaaaacatcgtcatgtactgcaccggcggcattcgctgtgaaaaagccagcgcctatatgctgcacaacggctttaaaaacatctaccacgtggaaggcgggatcatcgagtacgcccgcaaagcgaaagagcaggggttgccgctgaagtttatcggcaaaaacttcgtgttcgatgagcgcatgggcgagcgcatttccgacgatgtgatcgccaactgccaccagtgcggggcgccgtgcgacacccataccaactgcaaaaacgacggctgccacctgctgttcattcagtgcccgagctgcgccgccaagtttgaagggtgctgcagtgaaatttgccgcgaagagctgaagctgccgcgcgaagagcagcgcgcgcgccgtgccggccgtgaaaacggcgtcaagatcttcaataagtcgaaaggcctgttgcagactacgatgcacattccggcaccggaagaagaaggcccagcccgctga

SEQ ID NO: 422702 - DNA, 579 bp, Serratia marcescens
atgttgaaaaagaccgtattgggcctgaccgcaggcgccctgctgctgagcgccggttccgcactggcggcggactacaagatcgacaaacagggccagcacgcctttatcgagttccgcatccagcacctgggttacagctggctgtacggcagctttaaagacttcgacggcggcttcaccttcgacgaaaaagatccgtccaaggacaaagtcaacgtgaccatcaataccgccagcgtcgacaccaaccacgccgagcgcgacaagcacctgcgcagcgccgagttcctcaacgtggagaagaacaagcaggccaagtttgaatccaccgaagtgaagaaaagcggcgacggttatgcggtggtcggtaacctgacgctgaacggcgtgaccaaaccggttacgctggacgccaaactgattggccagggcaacgatccgtggggcggctaccgcgccggctttgaagccaacggcaagatcaagctgaaagatttcggcatcaccaccgatctgggcccggcgtcgcaagacgttgagctgatcatctccgtagaaggcgtgcgcgagaaataa

SEQ ID NO: 422703 - DNA, 555 bp, Serratia marcescens
atgctctggaaaaataccgccgatcgtttcggccatgtgtcagtgttgatccactggctggtggcgctgacggtgtacggcatgttcgccctcggcctgtggatggtcacgctgggctattacgacgtctggtaccaccaggcgccggagatccacaaaagcatcggcacgctgctgttcatcgtgatggtgatccgcgtgatctggcgctttgtctcgccgccgcccaagcctctggccagctatggccgcctcactcgcgtcagcgccattctcgcgcatctggcgctgtacgccgtgctgttcggcattctgatcagcggctatctgatctcgaccgccgacggccaaccgatcagcgtattcggctggttcgacgtacccgccaccgtgaccggcatggcggaacaggccgacaccgccggcgccatacacctttacctggcctgggccgtggtagtgctctcggtactgcacgggctggccgcgcttaaacatcactttatcgatcgtgatgtcactttgaaacggatgctgggtagcagcgccgattaa

SEQ ID NO: 422704 - DNA, 1059 bp, Serratia marcescens
atgggccgaacccgagtaaccgacagcagcctgcgtttggccgtcctgttggcgatgttggtgatcattttggccggggtgaaagccgccgccgacatcgtggtgccgtttctactggcggtattcctcgccatggtgctgaacccgctggtgacgatgctggaacgccgccgggtgccgcgcatccttggggtgacgctgctggtgacggcggtgatcgtggtcgtgatgctgtttatcggcatgctgggcgcttcgctgaacgagttcgcccgctcgctgccgcagtaccgcggcatgatgatcgagaaactgcgcgagctgcagcattacgccgatcgcttcaatatcagcctctccagcgaggcgatgctgcagtatgtcgatcccagcgcggcaatgaatctggttacccgcatgctggggcacctgtctggcgccatgaccaacgtcttcctgctgctgatgaccgtggtgtttatgttgtttgaagtgcagctgctgccttataagctgcagcaggcgttggataagccgaacgaaggcctcgccgcgatgcggcgggcgctggacggcgtgacgcgctatctggtgattaaaaccatcatcagcctggccaccggcgtgatcgtctggatcttcctggcggcggtcggggtgcgcttcgcctttatctgggggctgctggcgtttctgctcaactatatccccaatatcggctcggtattggccgccattccaccgttgattcaggcgctgctgttcaacggattgggcgatgcgctggtggtggcgggcggctttatcgctgtcaacatggtgatcggcaatatcctcgaaccgcgggtgatggggcgcgggctggggttgtcgacgctggtggtgttcctgtcgctgatcttttggggttggctgctcggcccggtgggcatgttgctgtcggtgccgctgacgatcgtggcgcgcatcgcgctggagaccaccgagggcggctatcggctggcggttatcctgggggacggccgcccgccgcgccagcctccggcggcgccggagtga

SEQ ID NO: 422705 - DNA, 1005 bp, Serratia marcescens
atgccgccgttatttccccgattgagcttcaaccgcttcggcgatcccacccaggtgctgacgctgcagcaggtgaacaggccgccgctgcgtcccggccggctgctgctgcagatgcgctatgccccgatcaatccttccgacctgatcccgattcacggccaatacgcgcaccgtatcgccctgccgcaggtgccgggctatgaaggcgcaggcgtcatcgtcgatccgcagagcgggcgctcgaccggccgacgcgcgctggcggtagcgggtgacggcagctggcaaaccttcgtcacgctgcctgaggatcgggtggtgtgggtgccggacgacatcgacgacaacgacgcggcgcagatttacatcaacccgctcacctgctgggtgttgctgacgcaatggctgccgctcaacgccggcgacgtgctgctgctcaacggcggcggctccgccgttagcctgctgttggcgcagctgacggcgctgcgcggtattcgtctggcggtggtggtgcgcaacgccgcccatcgccaggcgctgctggccgccggcgcctggcgcgttatcgaagcgccacagctgatggaaatgacacattttggcgcccgtgcggccatcgactgcatcggcggagaagacggattgcagctggcgcgagcggttcgctccggcggcgattttgtggcgctgggcctgctgagcggccgccaggtagattggcggcgtgtggtggatgagctaaagctgcgcgcttcgctgttccacttgcgcaaatggaacgcacaggcggcgccggcgcaatggcagacggcgttttatcagctattccagctgctacgacgcggccagctggctttgcgcccacccgccgcgatttatcctttgcgtcagtacgtagcggcgctgcagcacgccgcgcagcccggcgtcagcggaaaaatcttcctcactccggcgccgccggaggctggcgcggcgggcggccgtcccccaggataa

SEQ ID NO: 422706 - DNA, 627 bp, Serratia marcescens
atgaaactacttgtcgtggacgaatgctgcttcacccgggtcggtatagccagctactttgctgatagtggaattacgacgatcaagtgctgccacagcattgagtacgctacgccgctgttggccagctttcagccgagccacattctggtgaacctcagcaaccagtgccgctataacgaagcggacgcacagctgctggcgtttatggaagccagccagtctgccctgctgtttatctatctcgatacgccttatccttacagcgaaacgccaatgcgcatcgccgataacgcgtttctgttcaataaaagcattctgccgctcaccttgcgcacgctgcgcgaaaatccgctggcgctggccgatgacggcgaagagcgttccctgttcagcccgcaggaactgacggtgatgaaatattggatggcggagatgcccaactaccgcatcgcgaaaaaactgcaaattagctcgcatacggtgtacgtgcacaagcgccacatcacggagaagatcaacgcgcgcaaccggctggagttctactcgttgtataacgtgctgcgttatttctacccgccgaacacgccaacgaactcgacgccgttggcgctgctggcggtatga

SEQ ID NO: 422707 - DNA, 1116 bp, Serratia marcescens
gtggaatatgatttgattgtggtgggcagcggttcagtcggcgcagcggcagggtattacgcaacccgcgccggcttgaaagtgctgatgatcgacagcgccattcccccgcaccgcaacggcagccatcacggcgatacccgcatcatccgtcacgcttacggcgaaggtgaaaagtacgtgccgctggtgctgcgcgcgcaggcgttgtggaatgcgctgattcaacattccggcgaggaactgttccagtcgtgcggcgtactcaacctggggccgcagcactccgaattcattcgcaatgctcagcagagcgcgcaaaaattccgcctgaatgcacaaaccctcagcgccgaacagattgctcaacgctggccggaattccgcacgcctgaaggttacgtcggcgttttcgagccggacgccggcttcctgcgttccgaactggcggtggccagcctgatcaagctggcgaaagaggccggctgcagccagttgttcaactgcccggtcagcgcggtggagcctatcgatggcggcgttgaagtcgtcaccggcgaagggcgtttcacggcgcgaaaagcggtggtcaccgccggcacctgggtgaaagcgctgttgccgcagttgccggttgcgccattgcgcaaggtattctcctggcatcaggcggatggccgctacagcgtgaacaatcgcttcccggcctttaccgttgaagcgcaagacggcacgcactattacggcttcccggcggataacgacggcctgaaagtgggcaaacacgacggtggccagccgatggatgcccccgagcagcgtaaacctttcggcagccacgccagcgacggcaccgaagtcttcaccttcctgcggcagtttttaccgggtgtaggcgtatgtttacacggcgaagcctgcagttatgacatgagccccgacgaagactttatcatcgacaccctgccggagtgcgatcgtctgatggtcatcagcggattgagcggccacggcttcaagttcgccagcgcactgggcgagattgccgcgctgttcgcgcaggacaaagcgccgccggtcgacgtctccagctttggtctgaaacgatttagctaa

SEQ ID NO: 422708 - DNA, 255 bp, Serratia marcescens
atggacagaaatgatgaagtaattcagacgcacccgcttgtcggttgggatatcagtactgtcgacgtttacgacgccatgatgatacgccttcattacctgtcttcactagaccaaacgcccgaagaagcccaagtagacagaactctttggctgaccacagatgtcgcccgtcaattaatcaatatcttagaggccggcatcgccaagattgaagctacggattatcaggatcttgatcgcagaaaacattga

SEQ ID NO: 422709 - DNA, 279 bp, Serratia marcescens
atggccccggacaaggtgaaatccgaagacgcaatgacgtttggcgaactgctggcgttgattgccgatcagaaaaggcgcttgaacgtactggaagtggctttctcttatctggccttcagcctggatgacaaagccaaccagcggctgatccacagcctgaagctggaatcgcacagccagaatcgcgacgccgaaacgcaaaagcatttcgcccatttggccgaagagctggaaaaatgtctgcatggcgcatcgccacctgccgacgcggaataa

SEQ ID NO: 422710 - DNA, 240 bp, Serratia marcescens
atgcgtgttgaagtcactatagataaaacccggccgctgccgtcgggcgccattgaggcgctgaccggtgaactgggcaaacgggtcaatcgccagtttccagacgccgtcgtgcacgtacgttatgccggcgccaacgggctctccgtgctggggggcgccaaaaccgaccgggatctgatcgaggaaatccttcaggaaacctgggaaagcgcggacgagtggttcagcgcagaataa

SEQ ID NO: 422711 - DNA, 1047 bp, Serratia marcescens
atgaccgcacaacctcaagttctgaaaatccgccgcccagacgactggcatatccacctgcgtgacgacgagatgctgaaaacggtggtgccctataccagccaggtatttggccgggcgatcgtgatgccgaacctggttccgcccgtaacgaccgtggccgccgcgcgcgcctaccgcgatcgcattctggcggcggtcccgcagggtcacaacttcactccgctgatgacctgctatctgaccaactctctggcggccagtgaactggtcaacggctttgagcaaggggtgtttactgccgccaagctgtatccggccaacgccaccaccaactccagccacggcgtcagcgacgtgaccggcatctacccgctgttcgaacagatgcaaaaaatcggcatgcctttgctgatccacggcgaagtgaccgaccctgccgtcgatatcttcgaccgcgaggcgcgctttatcgagcaggtgatggaaccgatccgccagcagttcccggagctgaagatcgtcttcgagcacatcaccaccaaagaagcggcgcaatatgtgcaggcaggcaatcgtttcctcggcgccaccatcacaccacagcacctgatgttcaaccgcaaccacatgctggtcggaggcattcgcccacacctgttctgcctgccgatcctcaagcgcaatgtccatcaggaagcgctgcgtcaggcggtcgccagcggctcggatcgtttcttcctcggtaccgactccgcgccgcacctcaagcatcgcaaagagtccagctgcggctgcgccggctgtttcaacgcgccgaatgccatcccagcttacgccgcggtgttcgaacagctcggcgcgctggcgcactttgaggccttctgctcgctcaacggcccgcgtttctatggcctgccgctcaacgaagacttcatcgagctgcagcgcgtgtcgaccacccagccggaagagatcgccctgggcaatgaatccgtgatccccttcctggccggtgaaaccctgaactggtcgctgaaagactga

SEQ ID NO: 422712 - DNA, 288 bp, Serratia marcescens
atggaagtacgcgttatcgccaccctgcaagcgaaagcgggatttgaagacgccgtcagcgaagcggtgcacgacattctcgagccgagccgccaggagttgggcaacctgcaatatgatttgcatcgcgatctggaaaagccgggcgttttcgtgttctttgagcgttgggccagcagcgaagcgctggataagcataatgagacggcgcattttcagcagttcgtcagccggcttgacggcaagttggatgttttagacatcaaaaaactgaaaaagatagcctga

SEQ ID NO: 422713 - DNA, 3381 bp, Serratia marcescens
atgaaaagaatgttgattaacgcaactcagcaggaagagttgcgtgttgccctcgtagatggacagcggctgtatgatttggatatcgaaagtccgggtcatgagcagaaaaaagcgaatatttacaaaggcaaaatcacccgcattgaaccaagtcttgaagcagcgttcgtggactacggcgcagaacgacatggtttcctccctcttaaagaaatcgcccgcgaatacttccctagcaattactcttcccatggccgcccgaacatcaaagatgtgctgcgcgaaggccaggaagtcatcgttcaggtagacaaagaagaacgtggcaacaaaggcgccgccttgaccaccttcatcagtctcgcgggcagttatctggtgctgatgccgaacaacccgcgcgccggcggtatttcccgccgcatcgagggtgacgatcgcaccgagctgaaagaagcgctctcctcgctgcaactgccggacggcatgggcctgatcgttcgcaccgcgggcgtaggcaaatccgccgacgcactgcagtgggatctctccttccgcctgaagcactgggaagcgattaaaaaagccgccgaaggccgccccgcgccgttcctgatccaccaggaaagcaacgttatcgtgcgcgccttccgcgattacctgcgcccggacatcggcgaaatcctgatcgacaacccgaaaattctcgatctggccaaagagcacatcgctgcgctgggccgcccggatttcagcagcaaaatcaaactgtacagcggtgaaatccctctgttcagccactaccagatcgaatcgcagatcgaatccgccttccagcgtgaagtgcgcctgccgtccggcggctcgatcgtcatcgacagcaccgaagcgctgaccgccatcgacatcaactccgcccgcgccacccgcggcggcgacatcgaagagacggcgttcaacaccaacctggaagcggcggacgagatcgctcgccagctgcgcctgcgtgaccttggcggcctgatcgtcatcgacttcatcgacatgacgccggttcgccaccagcgcgaagtggaaaaccgcctgcgcgatgccgtgcgccaagaccgcgcgcgcatccagatcggccgcatttcccgtttcggcctgctggaaatgtcccgtcagcgcctcagcccgtcgctgggcgaatccagccaccacgtgtgcccacgctgtaacggcaccggcaccattcgcgacaacgaatcgctggcgctgtccatcctgcgcctgatcgaagaagaagcgctgaaggaaaacaccaaagaagttcacgctatcgtgccggttcaggttgcttcgtacctgctgaacgaaaagcgcgaatccgtcagcgcgatcgaaaaacgtcagggtggcgtgaaagccgtcatcgtgcctaacgatgaaatgcaaaccccgcactactcggtgctgcgcgtgcgcaagggcgaggaaacctctaccctcagctacctgctgccgaagctgcacgaagaagacatggagcgcccgctggaagacgcgccgatggaacgcaagcgtccggagcaaccggccctggcttccttctccctgtccgccgatgcgccaccgccggctgaagaacctgtcgccgtggccaagcctgccgctgccgccgccaaagctaaagccgcagcgccggccgccgccaagccgggcttcctgggccgcctgttcggtggtctgaagagcctgttcgccggtgaggaacaacctgccgtcgaagaaaccaaaccggccgaaacgccgaaggcggaaagcaacggtgaaaaccgtcgtcaggatcgtcgcggtcagcgtcgccaaggcaccggccgtaaagagcgcggtgagcgtggtgaccgtccggaacgcggcgagcgtaaagagcgcggtgaaggccgtgacaatcgcgagcgcgacaaccgtgagccgcgtgagaaccgcgaaggccgtgaatcgcgtgaatcccgcgatgaacagcgccgtaaccgccgcaaccagcagcagaacgcgccggtagcggaggaaaccgcctcggaagacagcgctaaagcgccgcgcgaagatcagcagcaacgccgtgagcagcgcgctgagcgccagcgtcgtcgtcaggaagaaaaacgtcaggctcagcaggaagtgaaagcgctggaaagcgttgaagcggtcgagagcaccgacgaagagcaggaagaacgccagcagcagaacatgcagcgccgccagcgccgccctctgtcgcagaaggtgcgcatcctgtccgcggaagaagaactgcagcgtgcagcggaagagctgctggcgccgaaagcgccggtagcgaaagccgaagtcgcgcagccgaccgccgacgacagcgtcaagctgctgccggaaaccgttgccgctcagccggaagacgatgcccagggcgaaaaccgtggcaacggcgaaggcatgccgcgccgttcccgtcgttcaccgcgccacctgcgcgtcagcggccagcgtcgtcgtcgttaccgcgatgagcgttacccgctgcagtccccaatgccgctggcgggcgcgttcgcttcgccggaaatggcatcgggcaaagtctgggtaagctacccggttgctcaggttgaagaagccgaagtgcaggccgaagccgtagaagtagaacaggcagcggcaccggttgttgccgcagcggttgaacagcacagcgttgccgtggaagaaactcaggctgcggccagcgtcaacgagccggcaccagaagccgccgttgaaactgcggccgttaccgtaacggaagaagctgcagccgtagcgcctgtcgttgccaccccggccgaggaaaccccggcgccggtggaagccgcgccggcacctgtcgcagttgaagaaccgaaagcggaagagactgccccggcagtggaagccgagccggtagctgaaaccgttgcggcagaacctgtggttgaagccaagccggtggaagacgagcctgtggtcgacgctgcgccggcagaagctgcgcaagcggaagaaacgccagtggcagaagcagcgcctgcgccagccgccgtggaagccgctccggtcgaaaaagccccggcgccaatcgccgcagaacctgcgccagtggttgctcagcagccggcaccggtgaaagccgtgcaggacgtactgtacaaacacatcgccactgcgccgatgaccaaagcgcctgcgccggcctacgtgccggaagaacgcaagcacagcgactggcagcgcccttccttcaactttgaaggcaaaggctcggcaggcggccattcggcggtgagccaggccaccgcgccggccaccaagccgcagccggttaacgaataa

SEQ ID NO: 422714 - DNA, 960 bp, Serratia marcescens
atgaaaacgaacaatccagcagtacaattcatcacgatttccgacgacgaagccggtcagagaatcgacaactttctgctcgctcgcctgaaaggcgtgccgaagagcatgatttaccgcatcgtgcgcaaaggcgaggtgcgggtcaataaagggcgcatcaaggtcgaatacaaattggcggccggcgacgtggtgcgcgtgccgccggtgcgggtggccgagcgcgaagagacgccggtgtcggccaagctggataaggtagccgcactggcagactgcatcctttatgaagacgaccacctgctgatcctcaacaagccttccggcaccgcggtgcacggcggcagcggcctgagcttcggcgtgatcgaagggctgcgcgcgctgcgcccggaagcccgcttcctcgagctggtgcaccgtctggatcgcgatacctccggcgtgctgctggtggccaagaagcgttccgcgctgcgctcgctgcacgagcagctgcggctgaagggcatgcagaaggattatctggcgctggtgcgcggccagtggcaatcccactgcaaggccgtacaggcgccgctgctgaaaaacatcctgcaaagcggcgaacgcatcgtgcgcgtcagcagcgaaggcaagccttcggaaacccgcttcaaggtggaagagcgttacgaattcgccacgctggtgaaggccagcccgatcactgggcgcactcaccagatccgcgtgcacacgctgcatgccgggcatccgatcgcctttgacgatcgctatggcgaccgcgagttcgatcgccagctggcgggtaccggcctgaagcggttgttcctgcacgccgcggcgctgcgcttcgagcatccggccaccggcgaaacgatgcgcatcgaagcgccgatggaccaagagctgcgccactgcctgcaggtgctgcgccggcaggtggccaagtaa

SEQ ID NO: 422715 - DNA, 540 bp, Serratia marcescens
atgctgctggagaagttacggctgcccttcgactgcgccgcacccgaggtggatgaaaccccactgccgggcgaaagcgccgaagcgctggtgctgcgcctggcggcggcgaaggctcaggcgctggccctcgcctatcccgagcatctgatcatcggctccgatcaggtctgcgtgatcgatggcaacatcaccggcaagccccataccgaggaaaacgcccgggcgcagctgcgccaggccagcgcccaggccgtaaccttctataccggcctggcgctgtacaacggccgcagcaagcagctgcaggccctgtgcgagccgttccacgtgcattttcgcgcgttgagcgaagcggagatcgccgcctatgtacgtctggagcaaccgctgaactgcgcgggcagtttcaagagcgagggattggggatcgcgttgttcgacaggttggaaggccgggacccgaacgccctgatcggcctgccgttgatcgcgctgttggacatgttgcgggctgaaggcatcaacccgctggtctga

SEQ ID NO: 422716 - DNA, 522 bp, Serratia marcescens
atgcaaaaggtaaaattacccttgaccattgatgcggtacgtaccgctcagaaacgcctggactatgctggtgtctatgcgcctgagcaggttactcgtgttgccgactccgtggtcagtgtggacagtgatgtcgaggtgtcgttgtcgttcaatatcgacaatcaacgcctcgcggtgataacagggcatgcggacgtcacggtaacgttgatgtgccaacgctgtggagtcccgttcgaacatcaggttcacacaacatattgttttagcccggtcgtcaatgatgagcaggctgaggcattaccggaagcgtacgaaccgatcgaagttgacgagtttggcgaagtcgatctgttggcgatgattgaagacgaaattattctttcactgcctgtcgttccggtacatgaatctgaacactgtgaagtgtccgaagcggacatggtatttggccaactgcctcccgaggcggagaaaccgaatccgtttgccgtattagccagtttaaagcgtaagtaa

SEQ ID NO: 422717 - DNA, 168 bp, Serratia marcescens
atggccgtacaacagaataaaccaacccgttccaagcgtggcatgcgtcgttctcacgatgctctgaccacgactactctgtctgtagacaaagtatccggtgaaactcaccgtcgtcaccacatcactgccgacggtttctaccgcggtcgcaaggttatcggctaa

SEQ ID NO: 422718 - DNA, 1005 bp, Serratia marcescens
atgggcggggacttcggtccctgcgtcacagtgcctgcttcgttgcaggcactggcctctaatttacagcttcatctcctgctggtcggcaatcccgacgtcatctcccctttgcttgcccacgccgatccggttcttctggagcgtctgcaagtcgtgcccgccgagtccgtgatcgccggcgacgccaaaccttcacaagcgatacgcgccagccgcggcacgtcgatgcgcattgcgctcgagcagctcagcagcggtaaagcgcagggctgcgtcagcgccggcaataccggtgcgctgatgggattggcgaagctgttggtcaagccgctggaaggcatcgagcgcccggcgctgatgacggcgatcccgaatcagcaacgcagtaaaaccgtggtgctggatttgggcgccaacgtcgagtgcgacagcaccatgctggtgcagtttgccgtgatgggcgcggtgatggcggaagaggtgatcggcattgcgcaaccgcgggtggcgctgctgaatattggcgaagaagagaccaaaggcctggataatatccgcgaagcggccgctgtgctaaaaaatactccggcaatcaactatattggttacctggaaggaaacgagctgctcaccggcaagaccgacgtgttggtgtgcgatggcttcgtgggcaacgtcaccctgaaaaccatggaaggggtggtcagggtgttcttatcgctgctgaaatcgtccggcgacggcaacaagcgagcgtggtggctgaaattgttgggccgttggttgcaaaaacgggtggttaagcggttcggccacctgaaccccgaccagtataatggcgcatgtctgttaggattgcgcagcaccgtagtcaaaagccacggcgctgcgaaccctcacgcgtttgcagtcgcaatcgaacaggctgtgcaggcggtgcagcggcaagtcccggaaaggattgctgcgcgccttgaggctgtattacctaagagtgactga

SEQ ID NO: 422719 - DNA, 954 bp, Serratia marcescens
atgtatacaaagattctcggtacggggagttatttgcccgtacaagtgcgcaccaatgctgatttggaaaaaatggtggatacctctgacgagtggatcgtcacgcgtaccggtatctgcgaacgtcgcatcgccgctgcggatgaaaccgtcgcgacgatgagcttccaggccgctgagaaagcgctggaaatggcaggtgtggctaaagaagatattgggctgatcgtcgtggcgaccaccacgaccactcacgcgttcccgagcgcggcgtgcctggtgcagcaaatgctgggcatcaaagactgcgcggcgttcgatctggctgcggcctgcgccggctttacttatgcgctcagcgtggccgatcagtacgtgaagaacggcgcggtcaaacatgcgctggttatcggcgcggacgtcttgtcgcgcacgctggatcctgaagatcgcggcaccatcattctgtttggcgatggcgcaggggcggtggtgctgggggcttctgaagcgccgggcattctgtctacccatctgcatgccgacggcagctacggcaacttgctgacgctgccgtacaaggatcgccagaatcaagacaagccggcctatgtcaccatggcgggcaacgaagtcttcaaggttgcggttaccgagctggcgcgcatcgtcgacgagacgctgcaggccaacaacatggaccgcagcgagctggattggctggtgccgcaccaggccaacctgcgcatcatcagcgcaacggcgaaaaaactgggcatggggatggacaaagtggtggtgacgctcgatcgtcacggcaacacctctgccgcctcggtgccttccgcactggacgaagcggtgcgcgacgggcgaattcagcgtggccaactggtgctgctggaggccttcggcggcggctttacctggggctcggcgctggttcgtttctga

SEQ ID NO: 422720 - DNA, 930 bp, Serratia marcescens
atgacgcaatttgcttttgttttcccgggccaggggtcgcagaccgttggcatgctggccgagttggccgcacagttcccgatcgtcgaagaaaccttcggcgaagcctcttccgcactggggtacgacctgtggcagctggtgcagcaaggcccggcggaagagctgaacaaaacctggcagacccaaccggctctgctggccgcctcggtggcgattttccgcgtttggcaacagcagggcggtaaagcgccggcgctgatggcgggccacagcctgggcgaatactcggcgctggtctgcgccggcgtgctggacttcaaggcggcgatccgtctggttgagctgcgcggcaagctgatgcaggaagcggtgccggaaggcaccggcgcgatgtacgccatcatcggtctggacaacgacgcgatcgccaaggcgtgtgaagagtctgcgcaggggcaggtggtttctccggtcaacttcaactcgccgggccaggtggtcatcgccggcaacaaagaagcggttgagcgcgcaggcgtcgcctgcaaagccgcaggcgccaagcgcgcgctgccgctgccggtgagcgtgccttcgcactgcgcgctgatgaaaccggccgccgacaagctggccgtggcgctgcaggacatcaccttcaacgcgccgcaggtgccggtggtgaacaacgtcgacgtgcgcaccgaaaacgatccggaagcgatccgcagcgcgctggtgcgtcagctgtacagcccggtgcgttggaccgagagcgtagaatttatcgcagcacagggagtgacgtcgctgctggaagtggggccgggcaaagtgctgaccggtctgactaaacgtattgttgacaccctgacggctgcggcggtgaacgacaccgccagcctgtcggcggcgcttgaacaataa

SEQ ID NO: 422721 - DNA, 735 bp, Serratia marcescens
atgagcttcgaaggtaaaatcgttctggtcaccggcgcgagccgcggtattggccgagctattgcagaaacgtttgtggcacgcggcgccaaagtgatcggcaccgcgaccagcgagagcggcgctgaagcgatcagcagctacctgggcgcaaacggcaaagggtttatgttgaacgttgttgatgcgcaatctatcgacagcgtgctggcatcgattcgcgccgaatttggcgaaatcgacattttagtgaataatgccggcatcacgcgtgataacctgctgatgcgtatgaaggatgatgagtgggaggatatcctcgacaccaacctgacttccgtattccgcctgtcaaaagcggtaatgcgcgctatgatgaaaaagcggtttggccgtatcatcaccatcggttccgttgtcggcaccatggggaacgcagggcaggcgaactacgcggcggctaaagccggtctgattggttttagcaaatctttggcacgtgaagttgcttcgcgtggcattacggtcaacgtcgtggcacctggctttattgagacggacatgacacgggcgttgacagatgatcaacgcgcaggcattttgtcatcagttccagccaaccggctgggcgatgctaaagaaatcgccagcgctgttgcatttttggcctctgatgaggccggctatatcaccggtgaaacgctacatgtcaatggcggcatgtacatgatttaa

SEQ ID NO: 422722 - DNA, 237 bp, Serratia marcescens
atgagcactatcgaagaacgcgttaagaaaatcattgttgagcaactgggtgttaaacaggaagaagttttgaacaacgcttctttcgttgaagatctgggcgctgattctcttgacaccgttgagctggtaatggcactggaagaagaattcgacaccgagattccagacgaagaagctgagaagatcactactgttcaggcagctattgatttcatcaacgctagccagcagtaa

SEQ ID NO: 422723 - DNA, 1242 bp, Serratia marcescens
gtgtctaagcgtcgagtagttgtgaccggactgggcatgttgtctcctgtcggcaatacggtagagtccacgtggaacgctcttcttgccggtcagagtggcatcagcctgatcgaccatttcgataccactgcctatgcgaccaagtttgctggcctggtaaagaattttaattccgaggatttcatctcgcgcaaagatgcgcgcaagatggacgcctttatccagtacggtatcgctgccggcatgcaagccatgcaggatgcaggcctggacatcaccgaggctaacgccagccgcattggagccgcgatcggttccggcatcggcggcctgggtttgatcgaagaaaaccacagttcactggttaacggtggcccacggaaaatcagtccgttctttgtgccatccaccatcgtgaatatgattgccggtcacctgacaatcatgtacggcatgcgtggcccaagcatttccatcgccaccgcctgtacttcaggtgtgcacaacatcggtcatgcggcgcgtatcattgcctacaatgatgcggacgtgatgctggccggtggggcagagaaagccagcaccccattgggcgtcggcggctttggcgcagcgcgcgccctgtccacccgtaatgacaacccgcaggcggcgagccgtccgtgggataaagaccgcgacggctttgtgctgggcgacggcgccggcatgatggtgctggaagagtacgagcacgcgaaaaagcgcggcgcgaaaatctacgccgaagtggtgggctttgggatgagcagcgatgcttatcacatgacgtcgccaccggaaaacggcgcaggcgctgcgctggcgatggaaaatgccctgcttgacgccggtgtgaccccgtcacaaatcggctacatcaacgcgcacggcacctctacgccggcgggcgaccaggcggaagcgcaggcggtgaaatccgtcttcggcgccgatgcagagcgcgtgctggtgagctcgaccaaatcgatgactggccacctgttgggtgcggcaggcgcgatcgagtctatcttcaccgtgctggcgctgcgcgatcaggcggtaccgccaaccatcaacctggataacccggatgaaggttgcgatctggacttcgtgcctcacgaagcgcgccaggtcagcgatatggagttcagcctgtgtaactccttcggcttcggcggcaccaatggctcgctgatcttccgccgagtgtaa

SEQ ID NO: 422724 - DNA, 798 bp, Serratia marcescens
atgtactggattaacggacaacgccacgatgcgctggcgccgagcgatcgcggcctgcagttcggcgatggctgctttactaccgcccgggttatcgatggtaaaatcgagctgctgccctggcatctggagcggctgcagcaagcggcgcagcggctgatgctgcccgccaccgattggctggctttcgagcgggagatggcgctggcggccgaatcaattccgctcggcgtggtcaaagcgatactgacgcgcggcagcggcgggcgaggttacagcccgacggggtgcgaaaacccgacgcgcatcgtggcccgcagcagctaccctgcgcactatttgcagtggcgcgagcagggcatcacgcttgcgctcagcccggtggcgctggcgcgcaatccgttgctggcggggttgaagcatttgaaccgcctggagcaggtgctgatccgcgcgcatcttgaccagacggccgccgacgaggcgctggtgcttgacactgccggtatgctggtggaatgctgtgcggctaatttgttctggcgtaagggaaaagcggtatttaccccggatctgagccaggcaggcgtcgcgggcctgatgcggcggcgggtgatcgcgctgctggcgggctcggaataccgtctgcactgcgtcagtgaaccgctggagacgctggccgatgccgacgaagtcctggtgagcaatgcgctgatgccgctgctgccggtaaacgctgcgcaatcatggcgctatgcttcgcgccagctgtatgattttttgcgtccacactgttaa

SEQ ID NO: 422725 - DNA, 1026 bp, Serratia marcescens
atgaagaaaagaaagctgaaggtcctgtctattattgttgttctggtattggcgctgctgttttggggctaccagaagatcgaacgctttgccgatacgccactggctatccaacaagaaaccatcttcaaactgccggccggcaccggtcgggtggcgctggaagggctattggtgcgtgataagctggtgcacaacgggcgctggttccagtggctgctgaagctggagccggagttggcggagtttaaagccggtacctaccggttcacgccgggcatgacggtgcgccagatgctgaaactgttggccagcggcaaagaggcgcagttcaccgcacgctttatcgaaggctcacgcctgcgtgactggcagcaggtgctgcagcagtccaaatacctgaaacacaccctggcgggcaagagcgaagcggagatcgccgcagcgctcggcattcctgcgggagaaacgccggaagggcatttgtacccggatacctatcagtataccgccggcatgagcgatatcgcgctgctcaaacgcgcacacgtgcgcatgaacaaagcgctgcaggccgcctgggccggccgcgacaccagcctgccgtataaaacgccggaagagctgctgaccatggcttctatcgtcgagaaagagaccgcagtgccggaagaacgcagcaaggtggcgtcggtgttcgtcaaccgtttgcgcatcggcatgcgcctgcagaccgatccgacggtgatctacggcatgggcgaaagctataatggcaacatcacgcgcaaggatctggagacgccgacgccgtacaacacctatgtgatcgccggcctgccgccaacaccgatcgccatgccgggcgaagcctcgctgcaggcggccgccaatccggccaaaacgccttatctctattttgtcgccgacggcaagggtgggcataccttcaccaccaatctggcgagccataaccaggcggtgcgcgtgtaccgtcaggcgttaaaggaaaagaatgaaaagtaa

SEQ ID NO: 422726 - DNA, 639 bp, Serratia marcescens
atgaaaagtaaattcgttgttatcgaagggctggaaggcgcgggtaaaaccaccgcgcgcgatacggtggtcaatgtgctgcgcgaacacggcgtcagcgacatcgtcttcacccgcgagccgggcggcacgccgctggcggagaagctgcgcgatctgttcaagcgcggcatcgacggcgaattgccgaccatcaaggccgaagtattgatgctgtacgccgcgcgcgtacagctggtggaaaccgtgatcaaaccggccctggcgcgcggcgcctgggtggtgggcgatcgccacgatctctcttcacaggcttaccagggcggcggccgcggcgtggatccgcagctgatgagctcgctgcgcgacaccgtgctgggggattttcgcccggacttgacggtgtatctcgatctgccgccgctggtcggcctgcaacgcgcgcaggcgcgcggtcagttggatcgcatcgaacaggaggcgctgccgttcttcgaacgcacccgcgctcgctatctcgagctggcggcgcaggatgaaaccatcgtcaccgtcgacgccgcccagccgctggagcaggtgaccgcggcgatccgcgactgcgtcggccactggctgcggcagcaggaaggcgcataa

SEQ ID NO: 422727 - DNA, 1008 bp, Serratia marcescens
atgaactggtacccgtggctgaacggcccttatcgtcagctggttgggcagtacgccgacggccgcggccatcatgcgctgctgctgcacgcggcggcgggcaacggtgacgatgcgctggcctacggcctgagccgctggttgatctgccagcagcgcaacggtgaaaaaagctgcggcgagtgccacagctgccggctgatgctggcgggaaaccacccggattatcacgtgctggcgccggaaaagggtaagagcagcctgggcatcgagccgatccgccaggtgattgaaacgctgtacgcccacgcgcagcagggcggcgctaaagtgatttggctgccgcatgcggaacagctgaccgaggcggcggccaacgcgctgcttaaaacgctggaagagccgccggagaaaacctattttctgctgggctgccgtgagccgtcgaggctgatggcgacgctgcgcagccgttgcctgtattggcatttggccagcccggatgagcagctcagcttgcagtggctgggccgacaggcggccggctctcagacggaccgcctcacggcgctgcgcctgcacgacggcgcgccgctggccgccgaacagctgttgcagccgcagcagtggcaacagcgcagcgccctgtgcgccacgttgagcgccgcgctgccgcagcgcgatatgctgtcgctgctgccggtgttgaaccatgaagacgtcgccgagcgcctgcactggctgtgcgcgttgctggtggacgcgatgaagtggcagcagggcgcgcatcactatgtattgaatcaggatcagcagccgctggtgcatcaactggccagcctgctgagcagcgcctcgctgcagcagatcgtgcagcagtggctgaactgccgccatcagctgctcagcgtggtgggcgtcaaccgcgagctgctgctgaccgaacagttacttcgctgggaacagatgcttggcgccgccggctattcccaacctcattcgctgtaa

SEQ ID NO: 422728 - DNA, 777 bp, Serratia marcescens
atgttgttagtcgattctcattgccaccttgacagtctggattatcaaacgctgcaccagaatgtggacgatgcgctggccaaagccaaggcgcgcgacgtcggctatgtgctggcggttgccaccacgctgccgggttaccgttccatgaccgagctgatcggcgagcgcaacgacgtggccttctcctgcggggtgcatccgctcaatctggaagaggggtatgattacgccgagctgcgcagcctggcggcggcggaacaggtggtggcgctgggggagaccgggctcgattacttctaccagaaagacaaccttgagctgcagcaggactctttccgcgaacatatccgcataggccgggatctgaacaagccggtgatcgtccacactcgcgatgcgcgcgcggacacgctggcgatcctgcgtgaagagaacgcacaggactgcggcggcgtactccactgcttcactgaagatctggccacggccgaagcgctgctggatctgggcttctacatctccttctcgggcatcgtcaccttccgcaacgccgaacagctgcgcgaggtggcgcgctatgtgccgctggatcgcattctggtggaaaccgattcgccttatctggcaccggtgccgcatcgcggcaaagaaaaccaacccgcctatgtgcgcgatgtggctgaatacatggcggtattgaagggcgtcagcctggaacaactggccgaagccaccaccgccaacttttcacgtttatttcacctcgaactgtga

SEQ ID NO: 422729 - DNA, 1434 bp, Serratia marcescens
atgttcaagaacgcatttgcaaacctgcaaaaagtaggtaaatcgctcatgctgccggtgtccgtgttgcctatcgcaggtatcctgctgggcgtcggctccgccaactttagctggctacctgcggtagtctcccacgtgatggcggaagcgggcggttcggtcttcgccaacatgccgctgattttcgccatcggcgtcgccctgggcttcaccaacaacgacggcgtttccgcgctggcggcggtggtggcctacggcatcatggtgaaaaccatggcggtggttgcgccgctggtgctgcacctgccggctgaagagattgcggccaaacacctggcggataccggtgtgctcggggggattatctccggcgccatcgcggcctatatgttcaaccgcttcttccgcattcaactgccggaatacctgggcttctttgccggtaagcgtttcgtgccgatcatttccggtctggcggcgatcgttctgggcgtagtgctgtccttcatctggccgccgatcggtacggctatccagaccttctcgcagtgggcggcttatcagaacccggtcgtggccttcggcatttacggcgtggttgagcgtgctctggtgccattcggtctgcaccacatctggaacgtaccgttccaaatgcaaatcggtgaattcaccaacgcggcgggccaggtattccacggcgacatccctcgctacatggcgggcgaccctaccgcgggcaaactgtccggcggcttcctgttcaaaatgtacggtctgcctgctgcggccatcgccatctggcactcggccaagccggaaaaccgcgcgaaagtcggcggcatcatgatctccgccgcgctgacctcgttcctgaccggtatcaccgagccgatcgagttctccttcatgttcgtcgcgccgatcctgtacgtgatccacgctatcctggccggcctggcgttcccaatctgcatcctgttgggcatgcgcgatggcaccagcttctcgcacggcctgatcgactttatcgtactgagcggcaacagcagcaaaatctggctgttcccaatcgtcggcatcgtctacggtctggtgtactacaccatcttccgcgtgctgatcgccaagctggatctgaaaaccccgggccgtgaagacaccgctgccgagcagactgcgcagggcggttccgaaatgtccgcggcgctggttcaggccttcggcggtaaagaaaacatcactaacctggatgcttgtatcacccgtctgcgcgtcagcgtggccgacgtgtccaaagttgaccaggcgggcctgaagaaactgggcgcagccggcgtagtcgtcgctggctccggcgtgcaggccatcttcggcaccaagtccgacaacctgaaaaccgatatggacgaatacatccgtaatcactga

SEQ ID NO: 422730 - DNA, 366 bp, Serratia marcescens
atgagctacgccgtgcagcaaatccacgatctgcgcctggtggtgttcgccgaagccgggccgccattgaaagacgaaaatgacgtcagcctgtttatcgcgcccgcctttgaacacgatgccgggatgattgccctccccgtcaaccgcctcgacgccgcctttttccagctcagaagcggcgtggccggcgccgtattgcagaaattcatcaactaccgcctgcgcgttgcgctgctgggcgatatctccccctggctggcgcaaagcaacgcgctgcaagatttcgtgcgtgaggccaaccgcggcgaacaggtctggttcctcccttctctcgccgaactcgaacagcgccttggcgcctga

SEQ ID NO: 422731 - DNA, 471 bp, Serratia marcescens
atggttacccgcgcgccagataacgccgatcgccacgcccagaccgacatgccggacgaggccgagcacgccctgcgttttagccgcgcccgcgaagcgcagtccaatgcgctgatcgaagattacgttgagctgatcgccgatttgctgcaaagcacccgcgaagccagaaccaccgatatcgcgcgccgcttcggcgtgtctcacccgacggcgatcaaaaatatcgcgcggctgaaaagcgccggactggtggaatcgcgcccttatcgcggggtgtttttaaccgaggaaggcgagctgctggcgcagaaggtgcgccgccgtcaccgcatcgtggtcgatctgctgatgtgcgtcggggtgccgagcgaaaccgccgagctggacagcgaagggattgagcaccatatctcggacgaaacgctggcggtgttcgagcattacctgcaaaagcacgccaagccctga

SEQ ID NO: 422732 - DNA, 1305 bp, Serratia marcescens
atgcgtgacgcggcaaccactccatcgttaaccgaacggaccaacatcgcgattggcgccgcccttgccggacgcaagcgcggcgcctttacgccgttgctgttcgccggcccggcggtgattgcctctattgcctatatggatcccggcaacttcgccaccaatattcaggccggggcgaaatacggctacagcctgctgtgggtggtggtgatggccaacctgatcgccatgctgttccaggcgctgtcggccaagctcggcatcgtcaccaatcgcaatctggcggagatgtgccgcgaccagttttcacggccggtagtgatcggtatgtggctgctcagcgaagtggcggcgatggccaccgatctggcggagtttctcggcggggcgatcgcgctggcgctgctgttccatatgccgctgctggcggggatgggggtgacggcggtgatcacctatgcgctgttgatggtggaaaagaaaggtttccgcccggtcgagctgatgatcggcggcctggtgggcatcatcgcgctgtgctatctggtggagatgttcatcgtaccggtggactggcaagcggccggcctcggcatggtgacgccgcagttgccggacgcgcaggcgctgaccatcgccgtcggcattatcggcgcaaccgtgatgccgcacgccattttcctgcactcggggctgacccagcaccgtagcccggccagcgacaacggcgagcggcgcaagctgctgcgtttttccaatattgaagtggtgatcgcgctggcgcttgccgggctggtgaatattgcgatggtgatcatggcctcgagcgccttccacgccggtaacagcgacgtggccgaaattggcaccgcctaccatacgttgacgccgctgttcggcgcggcggccgccggcatcttcctcgcttcgttgatcgcctccggcatttccagctcggtggtgggcaccatggccgggcaaatgatcatgcagggcttcgttggcttccgcatcccggtgtgggtgcgccgcctggtcaccatggtgccggcgtttatcgtggtggcgatgggcgtcaacgccaccgacgcgctggtctatagccaggtggtactgagcctggcgctgccggcgccgatgattgcgctggtgatgttcacccgccgccgcgacatcatgggcgagttcgccaacggccgctggaccagtctggcggcggtggtcggcacggtggtgatcgtgctgctcaacgtggtgctgctgttgcagaccttcggcgtcgatattcccggtttggggtga

SEQ ID NO: 422733 - DNA, 750 bp, Serratia marcescens
atggcacgactgcaaggcaaatacgcattgattaccggcggcaccagcggcatcgggttggaaaccgcccgccagttcatcgccgagggcgcaacggtggcgatcaccgggcgcagccaaagcgccctggacgcggcgggccaggcattgggtggcaaggcgctgttgctgctgagcgacgccggcgatattccgcagcagcgcgaactggcgcagcggctggggcaacggtggccgcggctggacgtgctgtacatcaacgccggcgacgttacacatcgcccgctgcaggagtgggatgagcagagctatcagcgactgatggacatcaacctgaaggggccgttttttctgatccaggcgctgctgccgctgctggccaacccttcttcggtgatcctgtgcggttcggtcagcgcccatatcggcctgccgcagagcagcgcctacgccgccagcaaagccggcttgctgtcgctggccagaacgctgtccggcgagctgcacgcgcgcggcattcgccttaacggcctcagccccggcccgaccgaaaccccggcgttgggtaagctggggttggcggaagcagatgaacaggcattacgcgacgatatccgcgcgctggtaccgatcggccgcatgggcagcacgctggagctggccaaagcggcggtgtttctggcggcggacgagtcggcctttatggtcggcgccgagctgcagatggacggtggtgtgggaaatttataa

SEQ ID NO: 422734 - DNA, 378 bp, Serratia marcescens
atgacggcacaagcgccattagcggcggaaaataatttggcggcgttgccgccggcgggcgaaccctgcccgatggtggacttcgtcaatctggtgtcgggcaagtgggcgataccgatcctgtaccggctgataatgatcgacggcccggtgcgattcagcgagctgcagcgggcggtggcgcccattgcgcaaaaagagctgacgcgtcagctgcggctgttcgagcagcgtggcctggtgacgcggcaggtgtttcccgaagtgccgccgcgggtggagtatcaggtcaccgcgctcggtaaatcgctgcggccgacgctggattcgctggccgagtggatgcgtcggcacgcgccgcagctgatcggcggctag

SEQ ID NO: 422735 - DNA, 906 bp, Serratia marcescens
atgccactgaggatttcggcgctgtgcgcgctgttgctgagcgccgccgtgcaggcggccacggcgggcggtatcgatctgcaggctaaccgagagccgatacgcgcggagaaaaacccggccgctatcgcactaattccggcaaactttcacttcgcggtgcccggcaagctgacggtggcggtggctttcgagaactctccgccgctggcgctgttcgccgaggacaataaaacgctgatcggcagcgatccggacatcgcccgcctggtggccgacagccttgggctggcgctgaatctggtgcccacctcctgggaagattggccgctgggcatcagcgccggcaaatacgacgcggcgatcttcaacatcgccgtcaccaaactgcgcaagaccaaattcgacttcgccacttatcgggtggacacgctgggcttttacgtcaaatccaccagccacatcacctcgatcaaccggccgcaggacgtcgccgggctgcggatcatcgtcggatccggcaccaatcaggaaaacatactgttgggatgggataagcaaaaccgcgccgccgggttgccgcccgtgcagccgatctacgtgaccgacgacgccgccaccaacctgagcattcagtccgggcgcgccgatgcgttcttcggcccccactccaccggcgcctacaaggcggcgctgaccggcaagaccaaaatggtcggcatcggccccaacgtggcctacgtcgcggtcaccaccaaaaaaggcaacggtttggtgaacgccgtcaacgccgccatcaacggcgtcatcgtcagcggcgaatacgcgcaggtgctggagcgctggggcgaaggcgacgaaaaggtcgagcgctccgccatcaatccgccgggcatcggcgactag

SEQ ID NO: 422736 - DNA, 351 bp, Serratia marcescens
atggccgaagaaacgattttcagtaaaattatccgccgcgaaatccctgctgatgtggtttatcaggacgaactggtcaccgctttccgtgacatctctccccaggcacccacccatgtgctgatcgttcccaacgtgctgatcccaaccgtcaacgacgtgaccgtggagcatgaagccgcgctgggccgcatgatcaccgccgcggcgaagatcgccgaacaggaaggcatcgccgaggacggctaccgcctgatcgtcaactgcaaccgccacgccggtcaggaggtctatcatattcacatgcacctggtcggtggccgctcgctggggccgctgctgtcacgttaa

SEQ ID NO: 422737 - DNA, 390 bp, Serratia marcescens
atgcgcggtaaaaaaactctccgtggtctgatggcgttggcgctgcccgccgcgttgctgatgggatgcagttcatcgcccggcatcgcggtcaaccaagggcagacggtggtgatggatccttcggtgctgaccgccggcattttggccgatacgccctcgatttcgaacgcctccgggcgggtgatggcgacctcggtgctcaacaacagccaaatgacgccggtcaccgtacattaccgcttctattggtacgacgcgcaggggctggatattcgccccttcgagaaaccgcgcgagatcgtggtggcgcccgactcggacgccaaaatttactcgattaacggcaatctggacgctaaaagcgcgcgtctgtatctgtacctgtaa

SEQ ID NO: 422738 - DNA, 591 bp, Serratia marcescens
atgaaaaagtacgtcttagtggcgctggccgcattaaccctcagcggctgtctgtcgcgcccgcctgagccggaacaaccgttgccgccggtcaccgtcgaaccggaacagccgacgccgccggtcgagcagccgcagccgccaaccaccgagccggtgccgcagccgccgaaaattcagcagctcgactggctgggcagcgttcagccgctggtggggcagatgctgaaggccgatggcgtcacggccggcagcgtgctgctgctggacagcgtcaagaacaacactaacggttcgctgcagatgggcaaagctaccgcggcgctgtacaaggcgctggcgtcgaactccaccttcagcgtggtgccggaagcgaagctgaccagcgccagacaaacgctgggcctgtcggcggatgacagcttcggttcgcgcagcaaggcgattggcctggcgcgcatcgtcggcgcgcagtacgtgctgtacagcgacgtcagcggcgacgtgaagtcgccggcgttggatatgcagctgatgctggtgcaaaccggcgagatcgtctggtcgggcaatggcgccgttaaacgctga

SEQ ID NO: 422739 - DNA, 828 bp, Serratia marcescens
atggaaaccagactgccggcggtgaataccgccggttgtcatttcagcccggtgcaggggctgaccggcgagagctggcgcatcgacggcgcgggcatcacgctgttggcgcgccagcacagtgcggaaaaacgcgcgctgggcgtgagccgacggcgcgaagcgcgggtcttgcgccgctgcgcgccggggctggggccgcgggttttcgcacagaataatcagtggcttatcctcgaatggctcgaaggtgacgtcgtcacagatgccgagtttgcggcgctgaatcagcgcggcgagctggcggcgatggcggcggaactgcatcggcggccgctcagcggttaccggctggatctgcggcggcagttcctccgctactggccgcagctggatacgcggcgtgtaacccccgcctggctgcgcctgcagcgccattttttgctaagtgtgccgccacggccgctgcgcctggcgccgctgcacatggacattcacccgggcaatttgctcgccaccggtgaggggctgcgattgatcgactgggagtatgccgccgacggcgacgtggcgctggatatcgccgcgctgtttcgcggcaatggttggtcggccgggcagcagcagcgctttttgcagcactacgcgcgccagggctatcacgacgccgcccggctgcaggcccaggtgcggggctggctgccgtgggtggattatctgatgctgctgtggtttgaagtgcgctggcaacagagcggcgacgccgaatttttacgctggggcgctgcagtgcgccggcgattctgtttatcatcatccgaattctga

SEQ ID NO: 422740 - DNA, 1032 bp, Serratia marcescens
gtgggcccagtaatgctagatgtcgccggctatgagctggatgcagaagaacgcgagattttgaaacacccgctggttggcggattgatcctgtttacccgcaacttccacgatgcggagcagctgcgtgagctggtgcgccagatccgcgccgcctcgcacgatcggctggtggtggcggtagaccaggagggcgggcgcgtgcagcgcttccgcgagggcttcacccgcctgccggcggcgcagtcgttcgccgcgttgcacaatgcgcaggaaggcggccggctggcgcaggaggccggctggctgatggcggcggaaatgatcgcgcaggatatcgacatcagcttcgcgccggtgctggacatcggccacggcagcgcggcgatcggcgaacgttcgttccacagcgatccgcagcaggcgctggcgatggccgaacgctttatcctcggcatgcacagcgccggcatgaaaaccaccggcaaacacttccctgggcacggcgccgtcagcgccgattcgcacaaggaaaccccgcgcgatccgcggccgctggcgcagatccgcgagcatgacatggcgatcttccgcgagctgatcaaccgccaactgttggacgccgtcatgccggcccacgtcatctatactgaagcggacccgcgcccggccagcggctcgccttactggctgcagcagatcctgcgtcaggagctgggcttcgacggcgtgattttctccgacgatctgtcgatggaaggcgccgccatcatgggcagctacgccgagcgcggccaggcggcgctggatgccgggtgcgacatgatcctggtgtgcaaccaccgcgaaggcgcggtcagcgtgctggataacctgtccccggtcaaagcagagaaggtgaagcggttatatcatcgcggtcagttcacccgtcaggaactgcgcgactccgagcgctggcagcaggcgcacaaggcgctcagcgcgctgagtgaacgctgggaggagcacaagcagcgttcgcaggggtga

SEQ ID NO: 422741 - DNA, 543 bp, Serratia marcescens
atgattatctatttgcacggcttcgattccaccagtcccggcaatcatgaaaaggtgttacagctgcagtttatcgatccggacgtgcgcttcatcagctacagcacgctgcatccgcgtcacgacatgcagcatctgttgaaagaggtggacaaggcggtgcagcagggcggcgacgcgcacccgttgatctgcggggtcggcctcggcggcttctgggcggagcgcatcggcttcctgtgcggcattcgccaggcgatgttcaacccgaacctgtatccagaagagcacatgcacggcaagatagaccggccggaagagtatcgcgatatcgccaccaagtgcgtggaggatttccgcgagaaaaatcgcgaccgctgtctggtggtgctgtcgcggcacgacgaggtgctggataaccggcgcagcgccgaattgctgcatcactactacgagatcgtgtgggatgaacagcagacgcacaagttcaaaaacatctccccccatctgcagcggctcaaggcgttcaaggcgctgggttaa

SEQ ID NO: 422742 - DNA, 1305 bp, Serratia marcescens
ttgacaacgccaaagaagaaaatcgttattgttggcggcggcgccggtggcttggagctggcgaccagcctgggccataaacttggccgcaagaacaaagcggagatcacgctggtggatcgcaaccacagccatttgtggaaaccgctgttgcacgaagtggcgaccggttccctcgatgacggcgtggatgcgctcagctacctggcgcacgcgcgcaaccaccatttcagcttccaactggggtcgttgaccaacatcaaccgcgagacgcaaacgctgcagctggcgcagatctgcgacgagcagggcggtgagctggtgccggcgcgcgaattgccgtacgacattctggtgatggcgctgggcagcacctcgaacgatttcggtacgccgggcgtgaaagagcactgcatcttcctggataacccgcatcaggcgcgtcgcttccacaacgaaatgctcaacctgttcctgaagttctcggcgcagccggggcaaaaagagcgggtcaacatcgccatcgtcggcggcggcgccaccggcgttgagctgtccgccgaactgcacaacgcggtgaagcagctgcacagctacggtttcgaaggcctggacaacagcgcgctcaatgtgacgctggtagaagccggcgagcgcattctgccggcgctgccgccgcgcatctctgctgcggcgcaccaggagctgattaaactgggcgtgcgcgtgctgaccaacaccatggtgaccagcgcggacgccaaaggcctgaacaccaagggcggcgagttcatcgacgccgatctgatggtgtgggcggccggcatcaaggcgccggacttcatgaaggatatcggcggcctggaaaccaaccgcatcaatcagctggtggtggagccgacgctgcagaccacgcgcgatccgaacatcttcgccatcggcgactgcgcctcctgcccgaaagagggcggcggtttcgtgccgccgcgcgcccagtcggcgcaccagatggcctcgcgctgcgccaccaatatcctggcgctgatgaacggccagacgctgaagccatacgtgtataaagaccacggctcgctggtgtcgctgtcgcgcttcagcaccgtcggcagcctgatgggcaacctgatgcgcggctcgatgatggtggaagggcgcatcgcgcgcttcgtctacatctcgctgtaccgcatgcaccaggtggcgttgcacggttacatcaaaaccggcctgatgatgctggtgggcggcatcaaccgggtgatccgcccacgtctgaaaatgcactga

SEQ ID NO: 422743 - DNA, 537 bp, Serratia marcescens
gtgaacaagtcaatgttagccggtgttggaattggtatcgctgccgctctggggattgccgcggtagccagcctggacgtcttttctgccggtccgcaatatgcgcaggtgctcgccgcaacgccgattaaagaaaccatcaaaacgccgcgtcaggaatgccgcaacgtcaccgttacgcaccgtgcgccggtgcaggatgaaaaccgcatcgccggttctgtgctgggcgcagtggcgggcggcgtgatcggccaccagttcggcggcggccgcgggcgcgacgtggcgaccgtggtcggcgcgctgggcggcggctatgccggcaaccaggtgcaaggggcgatgcagaataatgacgtcaccaccagcgtgcagcagcgttgcaaaacggtctatgacaagtctcagaaaatgctgggctatgacgtgacctacaagatcggcaatcagcagggcaagatccgcatggatcacgatccgggcacgcaaatcccgttggataaaaacggccagctggtgctgaacagagcctga

SEQ ID NO: 422744 - DNA, 480 bp, Serratia marcescens
atgttagattttcgctttccgacagcgttgcaaatggtccttagcgtcgccgtagctgagaagcagggcatgcgttcgacgagcgccacccttgccgccgctctggaagccaaccccagctttatccgcaaactgatggtgccgctgaccaaagacggcatcatcgtttccacccttggccgcaacggctctatccacctcggccgcccggcggaagagatcaccctgcgggacatctatctggcggtgatcgacgacaagcgcatctgggcttcccgtcctgaagtgccggcccgttgcctggtgagcgccaacgcctgctggtatttcaaatcggtggtgaacgaagccgaacaggcttcgcttgcggtgctggcgcgccataccgtggccgattcgctggccgaactggagcggggcgacaagcgtgcctgcgcggagtacgccgccgcgcaagaggctgaaaccgccgacaaataa

SEQ ID NO: 422745 - DNA, 3144 bp, Serratia marcescens
atggacttttcccgctttttcatcgaccggccgatctttgccgcggtgctgtcgatactgatttttgtcgccggggtgatagccatcccgctgctgccgatcagcgagtacccggacgtggtgccgcccagcgtgcaggtgcgcgcagaatacccgggcgccaacccgaaagagatcgctgaaacggtggccacgccgctggaagaagcgatcaacggcgtcgaaaacatgatgtacatgaaatcggtcgccggttccgacggcgtgctggtgaccaccgtcaccttccgccccggcaccgatcccgatcaggcccaggtgcaggtgcaaaaccgcgtggcgcaggccgaagcgcgcctgccggaagacgtgcgccgccagggcatcaccacccagaaacagtccccggcgctgacgctggtggtgcatctggtctcgccttccggcaagtacgattcgctgtacctgcgcaactacgccaccctgaaagtcaaggatgagctggctcgcctgccgggcgtcggccaggtgcagatcttcggcgccggtgagtatgcgatgcgcatctggctcgatccgaacaaggtcgccgcgcgtggcctgaccgcctccgacgtagtgagcgccatgcaggagcaaaacgtgcaggtctccgccggccagctcggcgcggagccgatgccgacgcgcagcgactatctgctgtcgatcaatgcccagggccgcctgcaaaccgaagaagagttcggcaacatcatcctcaagagcggcgaaaacggcgagatcgtgcggctgcgcgacgtagcgcgcatcgaaatgggctccggcagctacgcgctgcgcgcccagctcaataacaaggatgcggtcggtatcggtatcttccagtcgccgggcgccaacgccatcgagctgtcggacgcggtgcgcggcaagatggccgagctggcgacccgcttcccggacggcatgagctggaaatcgccttacgatccgacggtgttcgtgcgcgattcgatccgcgcggtggtggatacgctgctggaagcggtgatcctggtggtgctggtagtcatactgttcctgcagacctggcgcgcctcgatcattccgctgctggcggtcccgatctccgtggtcggcaccttcgccgcgctgtatctgctgggcttctcgctcaataccctcagcctgttcgggctggtgctggcgatcggcatcgtggtggatgacgccatcgtggtggtggaaaacgtcgagcgtaatatcgaagaggggctgtcgccgctggcggcggcgcaccaggcgatgcgcgaggtctccggcccgatcatcgccatcgccgtggtgctgtgtgcggtgttcgtgccgatggcgttcctctccggcgttaccgggcagttctataagcagttcgccgtcaccatcgccatatcgacggtgatctccgccatcaactcgctgactctgtcgccagcgctggcggcgcgcttgctcaaaccgcacggcgcgccgaaagacctgccgtcgcgcctgatcgaccggctgttcggctggctgttccggccgttcaaccgcttcttcgccagcagttcgcaacgctaccagcgcggcgtctcccgcgtgctgggccggcgcggctcggtgtttgtcgtctacctgctactgctggccgccgccggggtgatgttcaagaccgtgcccggcggctttatcccgacgcaggacaagctgtacctgatcggcggcgtgaaaatgccggaaggcgcctcgctggaacgcaccgatgcggtaatccgcaagatgagcgccatcggcctgagcgtggacggcgtcaccgatgcggtggccttccccggcctgaacgcgctgcagttcaccaatacgccgaataccggcacggtgttcttcgcgctggagtcgttgagcacccgtacccgcaccgcggcgcagatcaacgccgagatcaacgcgcgcatttcacagatccaggaaggcttcgccttctcaatcatgccgccgccgatactcggcatcggccagggctccggctattcgctgtacgtgcaggatcgcgccgggctgggttatggcgcgctgcagacggcgatcaacaccatgtccggcgccattatgcaaacgccgggcatggggttcccgatctcctcatatcaggccaacgtgccgcagctggacgccaaaatcgatcgcgacaaggccaaggcgcagggggtgccgctcaatgcgctgttcagcacgctgcagacctacctcggttcgtcttacatcaacgacttcaaccgctatggccgcacctggaaagtgatggcgcaggcagacggccagttccgcgacagcgtggaagacatcgccaacctgcgcacccgcaacgacaagggtgaaatggtgccgatcggcagcatggtcaacatcggcaccacctacggtccggatccggtgatccgctataacggcttcccggcggcggatctgatcggcgacgccgatccgcgcgtgctttcctctacccaggcgatgggcgcgctgacgcagatggccggcaagctgctgccgaacggcatgaacatccagtggaccgatctgagctaccaacaatcgacccagggcaacgccgcgctggtggtgttcccggtggcggtgctgctggcgttcctcgcgctggcggcgctgtacgaaagctggacgctgccgctggcggtgatcctgatcgtgccgatgaccatgctgtcggcgctgttcggcgtgtggcttaccggcggcgacaacaacgtgttcgtgcaggtcgggttggtcgttctgatggggctggcctgcaagaacgccattctgatcgtcgagttcgcccgcgagctggaaatgcagggcaaaggcatcgtcgaggcggcgctggaggcctgtcgcctgcggttgcggccgatcgtgatgacctccatcgccttcatcgccggcaccatcccgctgatcctcggccacggcgccggcgccgaggtgcgcggcgtcaccggcatcacggtgttctccggcatgttgggggtcaccctgttcgggctgttcctgactccggtgttctacgtcacgctgcggcgcctggtggcgcgcaaagcgcagccgcagaccgtctga

SEQ ID NO: 422746 - DNA, 1188 bp, Serratia marcescens
atggcaaatcaaccaaactcatcgttcaacgccggcggccgcacgcgcgccgtcgctctgggccagcggctctccggggtggcgctgctggccgccctgctcgccgggtgcgacaacagcgtcgcgcacaacgccccgccaccgccgccggtggtcagcgccgccagcgtggtggtcaaaccgatcagccagtgggatgccttcaacggccgggtcgaagcggtgcagagcgtgcagctgcgcccacgggtctccggctacatcgaacgggtcaactacaccgaaggcgacgaggtgaaaaaaggccaggtgctgttcaccatcgacgatcgtacctaccgtgccgcgtgcgaacaggcgcaggccgagctggtgcgggctcgcaaccaggccgccctggcgcgcagcgaatcctcgcgcaccgagaaactgatcggcactcaggccatctctcaggaagtctgggaacagcgccggtcatccgccgcgcaggcgcaaagcaacgtgctggcggcgcaggcccagctcgatatggcgcagctgaacctcgactttacccgcgttaccgcgccgattgacgggcgcgccagccgcgcgatgatcaccgccggcaacctggtcaccgccggcgacagcgccagcgtgctgacgacgctggtgtcgctcgacaaggtctacgtctatttcgatgtggatgaagccaccttcctgcgctatcagcagcagggccgccacgacgcgcgcctgccggtgaaggtcggcctggtaggcgaagacggcaccccgcatcaggggctggtggatttcaccgataaccagctgaacgccgggaccggcaccatccgcatgcgcgccctgctcgacaaccgcgagcgccgcttcacgccggggctgttcgcccgggtacagatgcccggcagcgccgagttcaacgccatgctgatcgacgataaagcggtgatgaccgaccagaaccgcaagttcgtttacatcgtcgataaagacggcaaggcgcagcgccgcgacatcgacgtgggccgtatggccgaaggattgcgcatcgtgcagaaagggttggcaaacggcgatcgggtgatcgtcgacggcatgcagaaagtgtttatgccgggcatgccggtcgacgcgaaaaccgtcgccatgaaccctatcgcctccgcacttaactaa

SEQ ID NO: 422747 - DNA, 357 bp, Serratia marcescens
atgaacactacgggctttattaccgatttgaaggcgtggatcgacaacaatctggaagagaaactggatatcaacaccgtggcggatcgcgcgggctattccaaatggcacctgcagcgcatgttcaaacgccagaccggctacgcgctgggggagtatatccgcatgcaaaaactgaaagtctcggcggagcgcctggccaacagcggcgagcctatcgtcagcgtggcgatttcgctcggcttcgactcacagcagtcgttcaaccgcagcttcaagcgccagtttggccaaacgccgggcgactggcgccgcgcgttggcgcagccggcgtctatggggcgcacgcaccactga

SEQ ID NO: 422748 - DNA, 642 bp, Serratia marcescens
atgattttttattacttcacatcagcaaagtatggaattgataatcttaagcacaaacgattaaagatatcaaactttttaaatgtcaatgacccatttgagctactaggtgtcgagttaggtgataaaaaagtacgggatgctgcgaattttgagaaaaataaaatatccgaagaatatgggctaatatgctttagtgaagataaatataacccagttcagtgggcccattacggcgataatcacaaaggtgtttgtcttggattcgaaattcaagaagaactcctcaaaaaagtcaagtatgtttcggaacgcctattgaaaaaaacaatagaagaatcagattgtaataaaaagatactcactactaaatttagccactggaattacgagaaagaaagaagattaataattaataattgtgatttccctgaggatagtaacggcatgagatttaaaaagtttgatactgacatcgtgcttaaagagatttatatcggctgtaaatctaagctaacatatcaagatattacttcttcatatagcagtacaaacaagagtgttgtcgtaaagatgacaaggccagcatttaaaacctttcgtattgtctgggatagaagtaataaaagcacgcgtacttaa

SEQ ID NO: 422749 - DNA, 1485 bp, Serratia marcescens
gtgactccttcagatgccataccggcgccgcaagcgcgccatgccattccccccggtgcgggggcgctgttcttcatccagatcttcgccacgctgggcttcgccgtgctctactccacgctggtgctgtacgccaccaagcgattgggcttcaacgaaagcagcgccaacgccatgatgggcgtgttcggcgccttcaactatggcctgcacatgttcggcggttacctcggcggccgattcctcagcaaccgcaatctgttcgtgctcggcatggtgctgcaggtgatcggctgtgcgctgatcgccgtcgcgggcgtgtgggggttgtactgggggctggcgatgttcctgaccggcagcggtctcaacgtcacctgcatcaatatgatgctcacccagcgtttcaagccggacgatgatcggcgtgaatcggcgtttctgtggaactacgccggtatgaacctcgggttcttcgtcggctttaccgtcgccgggtatttccaactgacggaaaactaccgcgcgctgttcctgttcgccacgctgggcaacgcggcggcgatcatcgtcgccgtctgccgctggcgcattctggcggatctcaataccccgctgcacgacgccacccgcagccaataccgttggcgcatgctggtcgggctggcggtgctggtggcgctggtgccgatcatccgtgtgatgctgactcacgccgagttcagcggccacttcgtgatcgtgctcggcgcgctgatcttcctgatgctgtgcgtggtgacgctgcgccaccatccgcgcgatgagcgtcgcagaatggcggcctatctgatcctggcgctgggctcgctggtgttttgggcgctgtatcagctggcgccgatggggctgatgctgttctccgagcacaacatcaacctgaacgtttacggcattcaggtggcgccgcagtggatccagaacatcaacacgctggtgatcgtagtaggcggcccgctgctggcctggtggttcaaccgcctgcgcgctcgcggttgcaacatcgacattccgctgcagttctccggatcgctgttctgcatcggcttgggcatgctggtgctgccgctgggtatcagcatggcgggcggcgacgggctggtggcgtttaaatggatcgttatcagctatgtgctgcaaagcgtcggtgaattgatgatctcgccgatcggttacgccatgatcggcaagttggcgccgccgcgctatcagggcgtgatgatgggctgctggatgatggtgaccggcgtctcctcggtgctggcgggctacgtctccggcctgatgccggaaaacagcggcagcacgccgctgcagaccaaccccggctacagcgaaatcttcagcgcgctgggctggggggcgacgggcgtcggcgtggcgatgctgattctcattccgctgctgcggcgccttatccggcgcgacggcccgtctgccgcctga

SEQ ID NO: 422750 - DNA, 942 bp, Serratia marcescens
atgaacatcatttattaccaccccttgtttaacgcccaggaatggctggccggcatcaagcaacgcctgccgcaggccgagatccgcgaatggcagcgcggcgacgagcggccggccgattacgcgctggtgtggcgcccgccgcacgagatgctggccaaccgccgcgatctgaaagcggtgttcgccctcggcgccggcgttgacgcgatcctcgatcaggagcgcaaacaccccggcacgctgcctgccggcgtgccgctgctgcggctggaggataccggcatggcgcagcagatgcaggaatacgcgctgagctatgtgctgcgctatttccgccgtttcgacgagtatcaggcgctgcagcagcggcaggagtggcagccgctcgatccgcactcgctggatgatttcaccatcggcatcctcggcgccggcgtgctggggcagagcgtggcgcgcaagctgaccgagtttggcttcagcgtacgctgctggagccgcagcgccaagcagatcgatggcgtgcaaagcttcgccggggaggcgcagcgcgctgccttcctcgacggcgtcaaattgctgatcaacctgctgcccaatacaccggagaccgtcggcattctcaaccgcgagctgttcgcgcagctgagttcgggtgcctatctcatcaacatcgcgcgcggcgcgcacctggtggaagccgatctgctggcggcgctggagcaggggcagctggccgccgccacgctggacgtgttcgcccgcgagccgctgccgcaggatcacccgttctggcgtcatccgcgtgtcaccattaccccgcatattgctgccatcacgttgccgcagcaggcgatggatcagatcgccgccaacatccgcgcgctggaggcggggcatgccccggccggcgtggtcgacaggcaacgggggtactga

SEQ ID NO: 422751 - DNA, 738 bp, Serratia marcescens
atgtaccccgttgatttgcatatgcacaccgtcgccagcacccacgcttacagcacgctgcacgattacatcgccgaagctcagcagaagggcatcaagctgttcgccatcaccgatcacggcccggacatggccgatgcgccgcactactggcactttatgaacatgcacgtgtggccgcgcctggtgaacggcgtgggcatcttgcgcggcatcgaagccaacatcaaaaacctgcagggcgacatcgactgcaccggcccgatgttgaccgccaccgacgtgatcatcgccggtttccatgagccggtgtttgcgccgcaggataaagcgtccaatactgaagcgatgatcgccgcgatggcgcagggggacgtgcatatcatcagccaccccggcaacccgcgttacccgatcgacattcccgccgtcgcggcggcggcggccaaatacgaggtggcgctggagctgaataactcgtcgttcacccactcccgcaagggcagcgaggccaactgccgggcgatcgccgccgcggtgcgcgatgccggcggctggctggcgctgggctcggattcgcacgtcgccttttcgctgggtaactttgagcactgtgagcgcattatcgaagaggtgggcttcccgcaggcgcgtattctcaacgtcagcccgcgccggttgctggactttctcgagcggcgcggcaagccggcgattgcggaattggccgatttgtga

SEQ ID NO: 422752 - DNA, 579 bp, Serratia marcescens
atgaatgagttttccattgtctgccgcgtgctgggtacgctgttctaccgccaaccgcaggatccgctgttggtgccgctgttcgcgctgatcaaagagggcaagctgcagcagcactggccgctggagcaggatgacctgctgaagcgcctgcagcagggctgcgacgtcaaccagctggcgaccgacttcaacgcgatgttcgtcggcagcgagtgcagcgtgtcgccgttccgctccgactacgtcgaaggcgccagcgaagcggacgtgcgcaccttcctgcagcagcgcggcatgccgctggcggaggcaccggccgatcatttcggccagctgctgctggcagcgtcctggctggaagatcaatcgcaggaagatgaagcgcaggcgcagatcgccctgttcgacgagttcctgctgccgtggtgcggccgcttcctcggcaaagtggaagcccacgccaccaccggtttttaccgcacgctggcgctgatgacccgcgacgccatccaggcgatgcgcgacgagctggcggagtacgagcaggacgacgaagcgggcgacgaagaagcgtaa

SEQ ID NO: 422753 - DNA, 654 bp, Serratia marcescens
atgaaaagtaactggatgcagcagattcaaacgttgatcgggcagaaggccggcgcgatgggcggggcggaaggcatcggcaagctgctggcacccacggcgctgggcggcttggtcggcgtgctgttggccaacaagtcctcgcgcaagctggtgggcaagttcggcaagaatgcgctgatcatcggcggcagcgcggcggtgggcgcagtgctgtggaacaagtataagcagcgggtgaaagagacccatcaggacgaaccgcagttcggcctgcaaaccacgccggtggatctgcgcgccaaacgcctggtgcaggcgctggtgttcgccgccaagagcgacggccatatcgatgccgacgagcagcgcgccatcgatcacagcctggcgcagctgcaggtgggggaagaggcgcaggactgggtgcaggaagcgatcgagcagccgcttaacccggaattgatcgcccgcagcgtgcaaaacgaagacgaggcgctggaggtttactatctgagctgcctggtgatcgacgtcgatcactttatggagcgcggctacctcgacgcgctggcgcaggcgctgaagatcccggcggacgtcaagcagggcatcgagagcgacgtcaacgagaaaaagcgcgagctggcgtag

SEQ ID NO: 422754 - DNA, 2034 bp, Serratia marcescens
atgatgaccccaccgaaagcggaaaaacgcccttatcccatcaccatccacggcgacacgcgcgtggatgactactactggctgcgcgacgacgagcgcgcagaccgccaggtgctggactacctgcaggcggagaacgcctacaccgatgcgatgctgaagccgcagcaggcgctgcgcgaaaccctgtacgaagagatggtggcgcgcattccgcagcaggaacattcggtgccttacgtgcgccacggctatcgctatcagacgcgctatgagccgggcaatgaatacgcgatttccgtgcgccaaccgcaggccgagagcgagcgctgggaggtgcttatcgacggcaaccagcgcgccgcgaatcacgagttttacaccctgggcgggctggacgtcagccccgacaaccagcggctgggggtggcggaggatttcctgtcgcgccgccagtatgacattcgcttcaagaacctggccgacggcagttgggcggacgaagtgctggagaacacctccggcagcttcgaatgggccaacgactcctcgacggtgtactacgtgcgcaagcacgccaagacgctgttgccgtatcaggtttatcgccacgtggtgggcagcgatccgcagcaggacgagctgatttacgaagagctggacgataccttctacgtcgggctggagaagaccacctctgagcgctttatcctgatccacctgagcagcaccaccacctcggagatcctgctgctggacgccgaccgtgcggacgccaagccgcaactgttcgtgccgcgccgcaaggatcacgaatacgccatcgatcactatcaccagcatttctacatccgctccaacaaggacggcaagaacttcggcctgtaccagagcgagcaggcggacgaagcgcagtggcagacgctgatcgccccgcgcgccgatgtgatgctggaaggcttcagcctgttccgcgactggctggtggtggaggagcgcagcgccggcctgacgctgctgcgccagatccactggcagactggcgaagagaagcgcatcgccttcgacgatccgacttacaccacctggctggcgtacaacccggatccggaaaccgcgctgctgcgctacggctattcgtcgatgaccaccccgaccacgctgtacgagctgaatatggacagcggcgagcggacgatgctcaaacagcaggaagtgaagaacttcacgccggaaaactaccgcagcgagcgagtctgggtgaaggcgcgcgacggcgtcgaggtgccggtctcgctggtgtatcgccaggacagcttccagcgcggcgccaactcgctgatggtatacggctacggctcctacggcagcagcatggatccggcgttcagcgccagccgcctgagcctgctcgatcgcggtttcgtgttcgcgctggcgcacattcgcggcggcggcgagctggggcagctgtggtatgaagacggcaagctgttcaacaagcagaacaccttcaacgattttatcgacgtgaccgaaacgctggttgcccaggggtacggcgacggcaagcgggtgttcgccatgggcggcagcgccggcggcctgctgatgggcgcggtgatcaaccaggcgccgcagctgttccacggcgtggtggcgcaggtgccgttcgtcgacgtggtgaccaccatgctggatgagtcgatcccgctgaccaccggcgaatacgacgagtggggcaacccgaacgagcaggcctattacgactacatcaagcagtacagcccgtacgatcaggtgaaggcgcaggaatacccgcatctgctggtgaccaccggcctgcacgattcgcaggtgcagtattgggagccggccaagtgggtggccaagctgcgcgagctgaaaaccgacgatcggcaactgctgctgtataccgacatggatgcaggccacggcggcaagtccgggcgcttcaaggcctatgaggatattgcgctggagtacgccttcattctggcgctggcggagtaa

SEQ ID NO: 422755 - DNA, 669 bp, Serratia marcescens
atgacgttacgcgtaatagataccgagacctgtgggctggacggcggcgtggtggaagtggcctccctcgatctgctcgacggccaattgaccaacccgatgagcgatctggtcagcccggatcgccccatcagcctcgacgcgatggcgattcatcacatcaccgagcaaatggtggaaggcaaaccgcgcattgcggtggcaatcggccgctatcagggcagcccctactatgtggcgcacaacgccgctttcgatcgcggcgtgctgccggagatgaacggcgcctggatctgcacgctcaagctggcgcgcacgctgtatccggacatcaagtacggcaaccaatatctgcgctacgcgctgaacctggacgtgcagctgccggcagacgccacgctgtacccgcaccgcgcgctgtacgactgctacgtcaccgccgcgctgctgcaacgcatcatcaaggattcgggctggacgccggagcaaatggtgcagatcaccgaacaaccggtgctgctgaagaagttcaaattcggcaagtatcgcgggcaggagatcgatcgcatcgcccaggaagatcccggctatctgcgctggatgctgaaatccatcgacgatctgagcccggacatgaaacacacgctgaaatactatctgattggctaa

SEQ ID NO: 422756 - DNA, 747 bp, Serratia marcescens
atgtcctgtcccacccttgccgccgcccaataccccgctgcggcggccaatatcgcctgcaaccttgaacgtcaccttgaatttgttgcgcaggcagcagatcagcaggtgcagctgctggtgtttcccgaactgtcgctgagcggctatgagctcgcctacgcccccgagttggcgctgacgctggacgatcctcgcctgcaaccactcactgcggcggcgcaatcgcgacagatgacaatcatcgtcggcgcgcctttgcgcagtggcccggcattgcatatcgccgccttgatctttcaccccaacggcgcattgactacctataccaaacagcatctgcacggcgcggaacagcaatacttctcgcccggtgagggcggctcgttgctggaactccatcaccacaacatcgcgatggctatctgtgccgatacttcggagcccggccacgcgagctccgccgcacgggcgggtgcgcacatttatgccgccggcgtgctggtatctgaagccggttacgcgaaagacagcgccgcgctggcagactatgcccggcgttacggtatggtcacgttgatggccaaccatgcggcaccgaccggtggctggatcccggcaggccgcagcgccatctgggataacacgggagagctcctggttgccgcgccggatgacgcctcaagtctgatcatcgccgacaagacttccgacggttggcacggccgcttgtgccagttaagctga

SEQ ID NO: 422757 - DNA, 426 bp, Serratia marcescens
atgacagtcatgacgttaccggatgcgcagcaactgctggccatgccggattctgattatatgaactcggttcaacgggcgtttttccgccagctgctgcaagatgagcggcaaaagctgctgctgcacatcgatgagctgaaaaaagagatcgacggcggcgaagcgacgggcgatgaagccgacaaggcggcgcgcgaagaggatctgcgcctgctgttccgccagttggatcgcgaaagccgcctgctgccgaaaatcgatgcggcgctggcaaggttgcagaacggcgagtacggctactgccgggaaaccggcgaacctatcgggctggcgcgcctgctgctgcgcccgacggcggaactgagcatcgaggcgaaaaccgcgcaggagatgcgcgagccgcatatgcgcaaaggtggctaa

SEQ ID NO: 422758 - DNA, 954 bp, Serratia marcescens
atggaacaattacgaggtttgtacccgccgttagcggcatacgacagcggttggctggacactggggatggccaccggatctactgggagctgagcggcaacccgaacggtaagccggcggtcttcattcacggcgggccgggcggcggcatttctccgcatcatcgccagttgttcgatcccgaacgctacaaggtgctgctgttcgatcagcgcggctgtggccgctcccgtccgcacgccagcctggacaacaacaccacctggcatttggtggccgatatcgagcggctgcgcgaaatggccggcgtcgatcaatggctggtgtttggcggttcctgggggtcgacgctggcgctcgcctatgcgcagacccacccggagcgcgtcagtgaaatggtgctgcgcggcatcttcaccctgcgcaagcaggagctgcattggtattaccaggacggcgcgtcacgcttcttcccggacaaatgggagcgcgtgctgtccattctgtcggatgaagagcgtaaagacgtgatcgccgcctaccggcagcggctgacctcggccgatccgcaggtgcaacttgaagcggccaagttgtggagcgtgtgggaaggggagacggtcacgctgttgccgagccgcgaatccgcttcgttcggcgaggatgatttcgcgctggcgttcgcccggattgaaaaccactatttcacccatctgggcttcctggagagcgatgaccagctgctgcgcaacgtgccgctgatccgccatatcccggcggtgatcgtccacggccgctatgatatggcctgccaggtgcagaacgcctgggatctggccaaggcctggccggaagcggaattgcatatcgtggaaggggcggggcattcgtatgacgagccgggcatcttgcaccagctgatgatcgccaccgaccggttcgccggcaagtga

SEQ ID NO: 422759 - DNA, 231 bp, Serratia marcescens
gtgggttacaatctggccgagctgtccaaagaagagatggacagggtgaacgtggatctcgccgcctctggcgtggcgtacaaagagcgctacaacatgccggtgatcccggaagtggtggagcgcgaacagccggaaccgctgcgcgactattttcgcgagcgcttggcgcactaccgcgcggaatcccacaagttttcgcgcctgccgtacgagccgaaggccaaataa

SEQ ID NO: 422760 - DNA, 519 bp, Serratia marcescens
atgctgacgcaagaaatgactcaaaagctgaatgagcaactgaatctggagttctactccgccaacctgtacctgcaaatgagcgcatggtgcagcgataaaggctttgaaggcgccgccgcatttcttaaagagcactctcaggaagagatgcagcatatgcaacgcctgttcgactacctgagcgacaccggctctttgccgctgctgggcagcatcgccgcgccgccggtggcgttcgaatcgctggcggacgtgttccagcagacctacgaacacgaacagctgatcacccgtcagatcaacgaactggcgcacgccgccatgaccgcacacgattattccaccttcaacttcctgcagtggtacgtggcagagcagcacgaagaagagaaactgttcaaatccgtgctggataagctggcgctggtgggcaccagcggcaaaggcctgttcttcatcgacaaagatctgaagaaaatgggcgcgatgggccagggcggcaacggccaggcttaa

SEQ ID NO: 422761 - DNA, 384 bp, Serratia marcescens
gtgatcggtaaaattcgttcctcttgtcgcctgctttccaccgttttcgtcctgttcgtcggcctgtcttcgcagcaagcgctggcgcacgcccacctgaaagtggaaacgccgaaggccgacgccagcgtcagcccggcgccgaaggcgctgaccctcagcttctccgaaggcatcgagccgaacttcagcggcgtgaaaatcaccggcccggacaacgccgtggtgaaaaccggcaagctgcagctcgatccgaacaacaacacccaggtcaatgtgccgatcgaaggcgagctgagcgcgggcaaatacaacgtcagctggcatgtggtttcggtcgacgggcataaaaccaaaggccagtacagcttcaccgtaaactga

SEQ ID NO: 422762 - DNA, 882 bp, Serratia marcescens
gtgagtctggcgaccctgttcgttctgtgtcgcttggtgcactttgcggcggtgatgctgatgttcggcatcagtctgttcaccgccttattgtcaccgcagcgcctctccccgatcctctcccgcgatgtgcgcccgctgctgcttgccggcacctggattgccgggctttccgccgtggcgctgctggccattcaggccgggcaaatgggcgacggttgggaagacgcctggcggctggaggtctggtgggcggtgctcggcaccaccttcggcgaagtgtggcgctggcatctggggctgtcgctgctggcgatcctgagcctgctgctgccggaacggccgcgtgcgcaggcgttggcgctgtgttcggcgctgctgctggtcagcctggcgttcatcggccacgcggcgatgcacgaaggcacgctgggcgcgctgcaccgcgccaaccatgcggtacacctgctggccgccggctactggttcggcagcctggcgccgctgctggtttgcctgcgctatctgcagccgccgcagtggcgcagcgacgccatcaccacgctgatccgtttctcgcgctgggggcacctggcggtggcggcggtgatcgtcaccggtatcgtcaacagcctgatcattctcggcggttggccgctcaacctcagctcgccttatcagcgcctgctgctgattaaaaccgcgctggtggcgctgatggtgatggtggcgctggccaatcgctacgccatcgtgccggcgatgagccgcgtaccggcgctggcgcagcgcggcgtggtgctggcctgctggctcgaagtcgggctggggatggcggtgctgctgctggtcagtttatttgcaacctatgcgccggtttga

SEQ ID NO: 422763 - DNA, 342 bp, Serratia marcescens
atgaaatcggtattactcggcattacgctgctggcaaccgcgaccggcgcgctggcggcagacaaactggtgaacatcaccaaactggaatacggcaaacagtgggcgttcaccaaggaagaagtgacgctgcagtgccgcagcggcggcgcgctgttcgtgctgaataacagcaccctgatgcaatacccgctcaacgacgcagcggagcagcaggtgaagaagggccatcagcgcgcgcagccgctggaggtgctcctgctggacgaccctgccgaaccggggaaaaaaatgagcttggcgccgtttatcgaacgcgccgagaagctgtgcgctgactaa

SEQ ID NO: 422764 - DNA, 1056 bp, Serratia marcescens
atgcgcttaccgaaaaacctaacattccgccgaaaccggaacgcgttctactggcgcaatccagtcaccaagaaggagatctctctcggtcagatttcgcgacgcgaggctatcgcccaggcgattgaagccaaccactatatcgaacaaaattactctcccgttctgctcctggagaaaatcaagggcagccacgaatacacgctaaacgcctggctcgatcggtacgatgtcctattcaagcggcgagaactggccgagaacacatacaaagtgcgcgccggccaaattgccattatccgggaacgcctgggcgacatggtgctgacaaaaatcacgacacgccacatcgccgaatttctcgagttttggatcgcccagaacaaaaagacaatggccgcaaccatgcgatcggtactgtctgatatttttcgcgaggcgatcgtggaaggccacatcgaaaacaaccctgtgaccccgacccgcgcggcgaaagctgtcgtaaagcgcgaacgtctggagctgaagcaatacgggccgattcgagatgctgcggagacaatgccgacgtggttctgcctggcgatggatctcgcgctggtctcaggccaacgccgcgaggatctgacacaaatgcgctttagccatatcgttaacgggcgcctgcaggttgaacaaggcaaaacgggggctttgctctccctcccccttgatcttgaactgaaatgcatgggcctgcggcttggcaccgttatcgaccgatgccgattggtcagcacgacagacttcatgatcagcgccggcatcaggaaaaatagccaagatggttcgatccatcccgacgggttaacgaaaaaatttgtggccgcacggaaagcatcaggtttggagtttcaggaaagcccgccgacgttccacgagatccgaagcctgtccggccgcctgtacgaaaagcagaacgacaaggcatttgctcaaaagctgctggggcatacaacggaaatgatgacgctgaaatatctcaaaacgagggggaaggagtacgtgatgctgtaa

SEQ ID NO: 422765 - DNA, 276 bp, Serratia marcescens
atggctaaatggatgactctcgaagaatggcgagatgataactacaccgataaaaaaccaagcatccagacgctctggcgctgggcgcgcaacggaaacttttacccgccggcggagaagcacggcaagcagtaccggctgacaccagggactatttacatcaaccccaaggacttcaacctggggagaaaaataaaggaagcgcagagccctaatcccgcgaggctcgcgttcatggagaaagtgatcaatggcacggcgaagggagggttatga

SEQ ID NO: 422766 - DNA, 1068 bp, Serratia marcescens
atgagcaatatcagcattcctgaagaaaaaacggcgtcggtcactgactcgaacatcgcgctgttcaacccgcaatacctgaccgctatcaaccaatttgcgcaggtcatggcgagcggtacagcgacgatccccgcccatctgcgagggaatccggccgactgcatggcgatcgccatgcaggccgcccagtggcaaatgaaccccttcgcggtggctcagaaaacgttcatcgtgagcggcgttctcgggtacgaggcgcaactggttaatgcggtgatttccacccgcgggccgctggtcgaccgcatcaactatgactggttcggtccgtgggaaaaggtgatcggcaagtttgatattcgcaagggggataaaggtgagtatcgcattcctggctggcgcctggctgatgaagaagggattgggatccgcgtctgggcaacgctgaggggggaggataaaccgcgggagttggtactcatgctggcgcaggcccgcacccgcaactctacgctctgggctgatgatccgcgccaacaactggcctatctggcagtgaaacgctgggcgcgcctgtactgcccggaagtgattctcggcgtctacacgatcgacgagttggaaaagacggaagaacgcgaaattaacccgcagcgcggcgcctcgcgcgtcagtgtgagccagcttgcggacggacctgccgccgcacccgtgcagcagagcgccccgcctgtcgatacggatgatattgccggcggcattcggacagctatcgatcaggcagaaacaacagaccaagcatcaaatatccgcgcacaggttgaagagttacgtcaaaagctggggatcaccgcttacaccgagttgaaaaacaaagtgattaaacgccaccggcagatcaccgcatgcggcagcatcagtagccaactgaaagactgccggagcgccgaggagttcgccgcggtagaggctctggtgcgacggtcagagcgagatctaagcgctgatgacatggagcgtttccagctagcgctcgacgatatgcgcccagagtttcagggctga

SEQ ID NO: 422767 - DNA, 2643 bp, Serratia marcescens
atgcaaaacgtctacgcctaccacttaaaggcaaagcaaaagtcagggaaaccctcgcttttcatctggtttgaagcaaagaacgatgcgcgggcaaaacgtgacctcgaaaaccacatcgaggacgccgagctggatcaatccgcttacttcaagccggtgcgcacaaattaccccgttgttgacgatctgccgccagaagcggcgttctgtgatacctggtgcctgcactacaagctcgacgataacctgtcgtggcaagtgatccctgcgactgaacgcgaacaagtgcaggagcagcacaaccttgcaggtgatgctgctgcgccagaaactaacagcagccaaaggccaccggtagacgaggcgaccagtgacggcggggagccagcccacgggcaagagccgcgagcgtacttcgcaaaaatgagtgctgacacgcgggctgtcgccgtcatcctgcacggcttcgaggtgatcgacaccgtgctgagtaaatcgcagatgatcaatgtcatcaacaccgcattgagcggcgaatccgcttatatcgccgatatgctgcaggctctacgcctgcctgccgtttcctgcatggatcccgagcgcttcgcggctttcgttgccggggtcgcgcgtcgctatgaagaaaccgatcctgaatcgaccttcatcaatatccgcaaatacgttgagcagctgctgaaaccggccccggagccggaagcagaaacgacgaaaaccgtacataagcgcggctatacccaaacgcatgacgcccttgaccgtgagatcgcctgcgcgctgtgggtcggtgatgtcgactgccaaaatatcgccggtgagatcgatcgctgggcgcagaaaaaaataaaaaacgatgacgaagactttaagcgttggtcaatggcgctgcgcgctgccccgaacatcctaaaatacagccgtgagacaattttcggcgtgatccgcaatgttccatcgtctgatatgtaccacttccctgccacactccgcggctggattgagaaatatttgtctgagcatggagtctatgaatttggtgcggcgccggatgccgtgcagttggctgcagagccagagccagagccagagccagagccagagccagagccagagccagagccagagcttgtcagtttaggcggtggccgcttcgatgtgtccagtcttttcgaagcctccccgctggctacagtgcaggttgatagcgagccgggcaaagatgccgagcagcagccgttaccagagcaaacatgcaatgacgcctcaaacgactgtgaaaaagcggaagtagcgcagcggcaagaaagtgagcctgcagcagattgcgagcaggcgtatttcgagccaggccgttacgctgatatttcaaacacagcctatcacgctgcgaacggcatcagcagcacacaggtgaaggacgcgcgcatcagcctgatgtattaccacgggcgccacgtcatcaaaacgatcggccgggaacgcagcgacgcgctgacgttcggctcgctggtgcacacgctggcgcttgagccagagaatctggagcgagatttcaacgtagagccgattatcccggacggcgccttcacgaataccgcctcaatgcgcgcatttattgaacagcacaacgatacgctgccgaaaatggcggatacggacactctgcgcaccgtcattgatgaacacaacgcgaagctgccaacaccttacgcgctgggcggtaatgcagacgaaataggccgaatttactccctgctgccgccggaattccagaccattcctgacggccagaagttcaccgcaacagccatgaaagcctgcatcaaagagtacaacagcacgctgcctgaaccgcttaaggtcagcggtggccgcgatgcgctaatcgagcagttggcaatcatcgatcctgagtttgctgcgcgtgaagttgcgatcccggccccgctgtcggtcagcgggaccaaggaagaaatggcggcgcgcatcaaaacaattctgccaacagccatctttgccgacgaactgctcgatgcctggaaaaattccgacgacggccgccagctggtcacccagcagcaaatgctgcatgccaaagccattcagcgtgcgctgtttacccatccttcagcgggtccgctgctgcagcatgagcatcgtgctgttgaagcgagttatttcggctttgatgaggaaacaggcctcgaggtccgtgtccgccctgaccttgagatcgatcttaacagcgtgcgcgtaggtgtggatttgaaatcagtcagcatgggccgcgtaaagcaagacgcgctgcgcgccaagctgcaccgggaaattatcgagcgggactaccacctcagcgccgccatgtatagcgacatcgccgcctttgaccagttcttctggattttcgtcaacaaagacgagggctatcactgggtagctatcgtcgaggcttctcctgacctgctagagcttggccggcttgagtacaaaaaggcgctgcgagaaatcaaaaacgcattcgacaccgacacctggccggcaccgatcaccgaagagatcgtcgacgacttaaacgactatgaccagcgccgcatggaagcgctgcgcgttgcgtaa

SEQ ID NO: 422768 - DNA, 231 bp, Serratia marcescens
atgcaaactttcaacactgaattagcaattgaggcccaaagccaatattgcaatgacaaccgccttccgaatttctcgccaattgacgggatttgttaccgttgccacaaagatgtttatgttccagttgagaataaatacggcgactttgtctccggaatctccgtagaaaaggcagcgagcacccacattattgattgtccgcactgccgaatgagttattgcgattaa

SEQ ID NO: 422769 - DNA, 195 bp, Serratia marcescens
atgaccaagatcgtcccaaacagcggtaaggccgtcagcctccgcaacacgcgcaccggcgcgccgtgggtggcatcgttcgattacatccggggccgctaccggttcgaaccggtcggcaatctacgggccatcaagcgcccttttgaatccctgcggatcccgccggaattcgagccagccggcacgcactaa

SEQ ID NO: 422770 - DNA, 246 bp, Serratia marcescens
atgagtgcattggataaagccatccgcattgcggggaatgcgagcaagttggccgagcaactcggtatctcttcgatggccgttagccattggaagaaccgatataaaggcgtgattccatcagatcacgtactcccgatttttaatttaaccggcgtgactccgcacgagttaaggcccgacctttaccccaacccaacggacggtttaccgccagaacagcaggataccaagcctgcagcctaa

SEQ ID NO: 422771 - DNA, 462 bp, Serratia marcescens
atggaaatcaaacacgagcagatccgcgcagcgcttcgcggatgggccacggaggccactcagcgcacggtcgcggcggaaatcacccgcgcttacttcaagttggagatgcaggcgccgcaactggcgcagatcgagcgcgccgacggcagcgttgatgatgctgcatggcacaacaacaagcagcagatctttcgctggctcgacagcgatagtgctggcgcccgccagaaaattcaggaactgcagccggcaatccttgctgcgctgccggcggtgctgcgcgcccgcctggtggcggggaacagcatcgaatacctggcaatccgcgcgctgaaggaacaccaggaggcgatcgccgccgcgctgctgcacgcatcaccggctgattttgaaagagagtgcgacgaggcagagcgcagcttctacgagctgcggcgagcttacagcgcactgcattaa

SEQ ID NO: 422772 - DNA, 237 bp, Serratia marcescens
atgaccattaatcacgacaatttcctgcaaaagcagatcaccgcgcagctgcgcgaggcacggttcgacgaggcggtcgccacgacgtcggcggcggctgccgtacaacaccagcgccataacccgaatatgaaactgcccgacctattggtctgggcgcgaagttttgcaaagcactgccagcgtttgaaagggaagccagcgccgcagggagcacgcgcgacggcgcgaaactga

SEQ ID NO: 422773 - DNA, 681 bp, Serratia marcescens
atgcgaccagatacaccgcagcagccgctaccgctcagcagcaggtcagggccgcacgaaacgcagaacgggagcgacaaggcttggctcctctgggagacgatggcggggatctacgccaaccgctgggtgaccaagaacggggtggcaccatccacgatctggggccaggcgatttcgaaattctccgatgaccagctggcctacgccgcgcgccggtgcatggaacgctgcagcgtcggtaaccactggccgcctgaccttgcggaatttaccgcgatcgtcggcgagtgcacggccaacccgttcggcctgtcggtggacgacgtcatgaccgaataccggcgttggcgcaacgaatcttggcgtttcgacggcgcagatagtttcgactggcgccacccggtgctgttccagatttgcccggagctccgccgcgccggcgtagagcgcaagctgggacacaacgaactcgccgcactggctggccggctgctggcgaagtgggcaaagcaggtggaaatgggattctcaatcccgccagtgcgaaaaacgaaagcgttggagaacaggccgccgggcgacgcacaagtcgctgacacggacggccgctatcagcgaaagggcatggaaatgctggcacggatccgtgccagcatgaggaacatcagcatgaaatag

SEQ ID NO: 422774 - DNA, 798 bp, Serratia marcescens
atggcaattgattcactacctataaccataaaatcgcttgcggctctttactcgaatagaaaggcgattagcgagtttgtagcaaaatctatttattggatgaaaaactctgatgtggtcgtcacaggttatccaggtgtcggaaaaagttattttttcgaatctctaaggaaagaaatatcaggtaagcgagcagtaaagcctgagatttcaacatcagttgagaataaggttttttatctaggtgatagcatattccctaataagcttacaataatccccggacagatggtcaataaagcacatgtaaacatagtcgataatatagttaacaataaaaaactaaaaggtgtaatacatattcttgattggggacatgcacatcacaggcatgaaacaataaaaacagtcgtatcatcacatggtattaagagcatcgatgatttaatagatttcaatagaaagatggagctttctcatgtcaaatctatggtggaaatacttgagtcgaggagtgaaaaaatcgattggtttgttttcgttttaaataaagttgatttgtatgatcgaggaagagctttaaaatactatactaacgatgacagcttcaaagaaattataaagagaatcgcaagcttgacaagaaatggttccgagattaacttcattccagtttgcagtgaccgttgtaactatgaatttcaaggaaaagaaattcgctcgagaatgataagaagcgaagaagaaaaaataggattattccgaaacttccttacagaaatgaaaatgtacttttga

SEQ ID NO: 422775 - DNA, 597 bp, Serratia marcescens
atggcgcagtattcgttttacaaatcccaaggcgggatcctcgtgccggcaacgcccgacacggccgatttcgtcacgaaaaaactcaagctgggggcggtcgtcactggcgagtttaagcgcgcccgaaatcccggactgcaccgcaaatttttctcactcctgaatctcggttttgaatactggaccccgactggtggcgcagtatcaacgtttgagcgccaatttctccgcgggtatatcaatcgcctggctcgccatgttaacgatgctggcgtgttctatgcgctggcggacgagtacctgcagctggttgccgagaagcgcgccgaacggctgacgattacaaaatccttccacgctttccgccgatgggtaaccgtcgaagcggggcattatgatctttttgaactccccgacggttcgactctgcgcgagccgcgatcgatctcattcgcaaaaatggacgacctcgaatttaacgacctgtaccaggccgcgattaacgtgctgtggaccttcatcttaaacaaatctttcccaaccatcgccgaggcagagaacgccgcggctcagcttatggagttttcgttatga

SEQ ID NO: 422776 - DNA, 561 bp, Serratia marcescens
atgatctaccccgacaacatcggtaaaggcgacggcaaagagctgcatttgcgtgcattggagcgcgtttggatacaagggcgactgaaaatgtggggccggtggtcagggatggaaagtttcggtagggccggcaacatgtttaaccgacttctgacgagcaacaaggtgacaaaagcggcgatcacccaggcgctcaatcagctgaaaaaggcgggatgcgagcaagaagaattgcgccagtatttgctcgacattctggagggaaaacaaaaaagcagcctggcattttgcactgattcggaggcggcgattatggatcgggtgatcggggccgtcctgctggattacccagggctgaaatttatcattcagcagcgctatattgggaaaggaaaaagcctgaaggagatggccgcagatctgcatgattatcgccctgattggtgcatgcgaacctgcgagacgcgcgtcgcggtatgggtaaaaacggcggaattcatgctttaccgtccgatgagtgatgcatttgagatgaatagcgaacgattttatcgttga

SEQ ID NO: 422777 - DNA, 834 bp, Serratia marcescens
atggttgaagaaaacatcacaactactcatcttagcaaggaggactttttcttagcccttcgaaattttgattgtgcggtttgtgaggcgcttgctgtgagccaatctgttggcgtaagggaggccgaagcttatatgggctggtctacgcatatttttgcgaggatatgtgttaacgcaacaatcatgattgggaatataccaggctcccgatgggggaaaagagattatgatttttgggatttctcgcttgttgcgccatatacacgagcacttatagagtctgagttgcttttattttatctgtcgaggatacctagctcacaagcagagtggtcagcaaaactcaatgttatgcacatgagcgactgcatgaaaagaatggagcacttttctcccgaccctgaatcagatgcagctttcgaagagcagcgtgaaatgatagcaaagaggttgaatgaaaatgagcattttaacgctttagatgctgggaccaaaaaaagatgtttgagcggaaaagctctaacaattaaaaatagagatgagatactagatgacatgggggttgacagaaagcagtttaaaaagatttttgacctcttatctcattatacccatgtattaccgatgtcttattaccgtatggaggctaatgggcgaggtacggggtgttttaatcaggtggattattcatatatatatcttgctatggagatttgcacagaggttctgacaagatgtacggatataatcactgagatgttcccagacacaaaaaaaagcatgaaaggtttaaaatccaaatttagtttgggtcctaaaccgaggaaatag

SEQ ID NO: 422778 - DNA, 723 bp, Serratia marcescens
ttgaaaaatcattcaaatgctgttgtatcacgcgccagcggaaagccggcgccgatcgtctatgccggcgaaaccgtcggttatggatgtgacgatctccacgttgcaacgatcccggtttggctggcccgcctggtgatcagcaactttcactacagcaagcgcgtagtgaacaactcctatctgcacctgggtattttcgacggccgcgaactggtgggcgtcatgcagtggggctacgcgatgaacccgagcagcggggcgcgcgtcgtgaccggcaccggcaaccgcgaatacatggagttaaaccgcctctgggtgcatgaccggatgccgcgcaatactgaatcacgcgcaatcagctatgcgttgaaaactatcaagttgctctatcctgcggtggattgggtgcagacgtttgccgacgaacgctgcggccggttcggtgtcgtgtatcaggcgagcaatttcgattacgtcggcagccatcaaacgacgttctacgagctcgacggagagtggtatcacaagatcgccatgaccacgaaggggcgcaaagctggcacccgaggtaattttttgcaggagaatgcacaccgcgccactgctcatacgttcaaccaattccgctatatccgctttttgaacaagcgggcgcgccggcggcttaacacgaaattgttcagcccgaagccgtatcctaaacccgaaatttcaccctag

SEQ ID NO: 422779 - DNA, 273 bp, Serratia marcescens
atgaaaatgaacgacagctactcgaacgctacctattggctcgcgggcatatctgcctttttcgccgggttaacgctgcaggactggggtttcatcattggcctggccgtcagtatcgccctgggcatattgacctaccgactcaatcggcgagagcagatgaaacgtacgcagatcctgcgcgacattttgagcaagaccaacagtgccaacccatcagccaccgcgacaattgtcgcagaattggaccaaaaagctccgagagaaatctga

SEQ ID NO: 422780 - DNA, 492 bp, Serratia marcescens
atgaattccagcctgagaaataaaatcgtcgctgccataaccggtggcggcggggcgattgcgatcgccactgcaatgctcggcggccacgatgggttagagggccggcggtatgtggcctatcgcgacgttgtcggcgttctgacggtctgcgatggacataccggcgccgatattatcctcggcaagcgatacagcgacgcagaatgcgatgcgctgttgaaatctgacttacagaaagtcgcacggattgtcgatccggctatcaaggtgaaaaccaccgaaacccagcgcgccgccatctactcattttcctacaacgtcgggccttatgcctttatcggctccacgatgctgaaaaaattgaatgccggcgacccggccggcgcgtgcggtgaactgaagcgctggaagtatgccggcggcaaagaatggaaagggctgataacccggcgtgaagtcgaaaccaccgtctgcacctggggccaataa

SEQ ID NO: 422781 - DNA, 387 bp, Serratia marcescens
atgaacggctggatgagcaagatcgccggcggcagcctggcgcttctgttgctggtggctatctgccttggcggttacagctcgctgctgtcgcaccagttgcagctggcacgccagcaggccgcagaacagcagaagacgctggcacagcaggccgggctgatagctacgctgcagacgcaagatgcgcagaaccgcgcgctgatggcggcgcagcaacaacgcgagcagtacctgcgccagcagcacgacacagcccaaaggaaataccgtgaagcgattaaaaacgatccctgcgctggtcagcctctgcctgccgctgtgcttgagctcttgcgcccggccaccggcacagcccccggcgccgttaatcctccttccccctga

SEQ ID NO: 422782 - DNA, 138 bp, Serratia marcescens
atggccggcgatacatggggagacgccgtcagctatacgctggcactacaaacctcactgaaaatttgtgccggcagaattgccacgctgaatgcctggcgggccggcttactggagaagacgagtgaaaaaaaatga

SEQ ID NO: 422783 - DNA, 231 bp, Serratia marcescens
gtgaaaaaaaatgatactgacgtgctggctgtcctgctggtgggcggcggcgccattgccattgtgatcggtctgggcctgttgttctcctggggcatgctggccgcgtggaatctgttggcatcgtccgccggctgggcgtccatcgtgccaattaactggggaacggtattcggcctgatgctggtgatcatcttcgtgcgccagctgctgcgccgcaaaaaagaatag

SEQ ID NO: 422784 - DNA, 693 bp, Serratia marcescens
atggcatcctggacttgtccatattgcgggcagatagcaactgagaaggcagttcctgcaaaagcagaatctatggtttttcgagaagatactcgatatggcacgcctattatgatgacctctttgatagaggtatgccctaatgacgagtgtaaagagattgtggtttcatctggactttcaatcgctaagtttgtggatgggcagtggactccacaagagaggttagaagtatggaaactgcggcctcaagcagcagtgaaggtatttcctgattatatccctcgagcaatacttgatgattacaaagaggccgcactgatatgtaacttatccccaaaagcatctgcaacactagctagacgatgcatacagggaatgataagggacttttgggctgttaaagctggaaggttggttgatgaaattaatgctatagagggtcaggtagatcacgggacatgggaagccattaacgccattcgaagcattgggaatattggtgctcacatggaaagagacatcaacttaattgtagatgtcgaacctgaagaagctgagttactcatccagcttatagaagtgttgcttaaagattggtacgtcgaaagagaagaacgccatagaagaacaagcaaaattgtggaactagccaaagcaaagcaggcggaaagaaaggccacacaaaactaa

SEQ ID NO: 422785 - DNA, 732 bp, Serratia marcescens
atggcaaaacaggattggggagccattcaaaagctgttcctcgccgaatacgccaaaaccaaaatctccccgaaagaatggtgtgaggctaacggctacaactacgccaccgcacgccggcatataaaaattcctgcgcaagggaaagaaaataaagcgcagaaaaaaatgcgcagtgcgcaagatgcgcaaattccagaaaatcccgcgcccgttgcggccggcgtttcagctgctggtggcgatgaggaggggaagggcaaagaaagcccaagccttttaaaaccacagcatgaacaattcgcgcagaacattgcgcagggcatgccgcagaaagaggccgcgatttgcgcaggctacgcgccgacgaatgccgaatcgcaagcctcaatcctgatgagccggccggacgtaaaagcccgcgtgcaggagctgcgcaataacgctgcgctgttggtttccttcaacgctggccacctggcggagctgtcgtataaatctgcgcagttggcgctggcgaataaaaaatttggtcaggttgcgccgaacgtgaagaacgctgcgcaactgaccggcatcgacatgagcacgaataaaaccgaggtgaatgtcgatctggccggcctgagctacggcaaagtttgcatcgtgaccccggcgaactgcccggcggacgtgtgggctgctcacatggaaaagctgcgcgagggaaagccgacggcccagtcataa

SEQ ID NO: 422786 - DNA, 1302 bp, Serratia marcescens
gtgggctgctcacatggaaaagctgcgcgagggaaagccgacggcccagtcataattgacggcgttctgtacgcattcagcagtgactgggcgacagatgtcctgtacgacgccccgatcggttccgtgcgctggcgctggacctacggcgggcgcggcggtggtaaatcggtagagattgcgcgcgcgctggttatcctcggtgctatcgatccgatgatcattctctgcgcccgcgaattccagaactcaatcagcgattctgtgctggcgctgctggaggccgaaatttatgccctgggcctcaaccatttctataccgtaaaaaataacgagatcaccgggcgcaacggcacccgcttcacgttcaaagggctgcgcaccaacctgcaatccatcaaatcgatgtttggcatcaagatttgttgggtggaggaagcgcagaccgtttcccaggagagctgggacaccctcggcccgacggtgcgcgccaataattccgaggtctgggtttcgttcaacccgcgggaagccaccgacccgacctacaccctgatgaagcgccacgaggtcgatccaccggacggcggcgtcatcattcgtcaggtcaattatcccgataacgcgtttttcccggacgtactccgacaggaaatggagtattgcaagcgcgttgactatgaagcctatgagcacatctggttagggctgccgaaggcgctcagcgaggcggttattttctccgggaaataccgcgttgaggcatttcctgacgatctctatctgcaggccgaccggcttttctatggcgccgacttcggcttctcgcaagacccttccacgctgatccgctgcttcatcatcgggcgaaaactctacatcgaatacgaagcctacggcgtcggcgttgagctggacgaaatgccgcagttttacgattcgatccccgaggctcgcaagtggccgattcatggcgactgcagccgccccgaaacgatcagctacatggcgcggcagggcttcaacatcgacggcgccacgaaatgggccggcagcgttgaggacgggatcacctacctccgcggcttcgaagaaatcgtcatccatgagcgctgcaagcacatgatcgacgaggcccggctttattcctacaaaacagaccgcctcacgggtgaggtgttaccgatcgtcctcgacaaacacaaccactgctgggatgcggtgcgctactcgctggacggttatatcaccagctccgacggcctcggcacctgggcgcaattgggtagacaagacgcatga

SEQ ID NO: 422787 - DNA, 1464 bp, Serratia marcescens
atgagccaaaaaaaagacggggtgcgcgcgtggttccgggacagttaccagaacttcacggcgcgcctggggcttcgcacgcccaatatgagcagcgacggcacctatcagccgaactggaccagccgaaaccgcctgcagattgagaacgcctatcgcagctcctggctggtgggcgtggccgtggatgccgtcgctgatgacatgacccgcaaaggcatcacgatcaccggcggtttgaagcctgaagaaaaatccaagctggataacgcctgggaggaattggcgctctgggatcgcctgaacgacacgattaagtggggccggctctatggcggcgcgatcggcgtcatcatgatcgacgggcaggacatgagctcgccgctgcgcatggaaactgtaggcccgggcgcgttccgcggcgtgatggtcctcgaccgctggatggttaccccgaccacgcaagaccgcgtcacagaaatggggccggatttcggtacgccaaaattttatcaggtggtgacgacggccaccgggatccccccgtggaaaatccactacagccggatcattcgtttcgacggcgtcacgctgccttatcagcagatgctgaccgagaacgattgggggcaatctgtggttgagcgcatcttcgatcgtctgatggcattcgatagcgccaccaccggcgccgcgcagctggtctacaaagcgcacctgcgaacctactcgataaaaggcctgcgttctgtactgggcatggggcagaacaccgcggcttacaaagggctgatggcccacatggacatgatccgtcagtaccaaagcatcgaagggatgacggtcatggatgcggaggacgcattcgagactcacagctacacgttcgccggcctgtccgacgttctggcgcagttcggccagcaggtcgccggcgcggtaggaattccactggtgcgcctgttcggccagtcaccggcaggattctcgaccggtgaaaccgacctctccaactactacgacaacgtcagcacgcagcaggaacgccggctgcgtcgaccgctgcataaagtcatgcaggtgctgcacatgtcgctgttcagccggccactaccggacgatttctcattcgaatttaatccgctgtggcagatgagcgaacccgatcgcgccggcgtggccgtgaacacggttgatgcggtggtgaaagccgtcgacgccgggctgatgacgccaaaagccggcgcgcagcagttgaaagaatcgtcacggatcactggcgtgggttcaaccatcaccgacgaggacatcgaaaatgcgcaggacatcgacccgccggcgttcgagggcaacgatctcgacccagacgccgaaggggctacagcgccagtacgcaacgcagctacgaaagatagcgcaggtggtcggggacatcgtctcgacttcttacgatggttccgataa

SEQ ID NO: 422788 - DNA, 654 bp, Serratia marcescens
gtggtcggggacatcgtctcgacttcttacgatggttccgataattccgtcatcctcatcaacacccgcctgacccgttactccgaactgatcgccccctgggcggaatccgttgccctgaaaatgtttgatgccgtcgcgcgccgagaggcgacacagtggcgccagatctcgcaggaaatttctgccgggctgcgttttcagatggagagcacctcagttggccaggtggcgcgcaatatcgttgaggaaaacatcaagctgatgaaatcgctgccgctgcatgctgctgaccgggtgagcgggatccacgcccgcgccatcgaggcgatgatcagcggcgagcgcagcaaagattttgccgctgaaattttccgaagcggtgatgttgcctggtcacgcgcgaagctgatcgccaggacggaaataggccgcgccacgcaggcgttgacgcaagcccgggcgaccgctattggctccgagggttacatctggcgaacggcgcacgacggcgacgtcagacactctcacgccaaaatggaaggcaaattcgtccgctggggtgacccgccgacgcttgacggcatgaccggccacgccggcgcgctgcctaactgccgctgttactgcgaagttgtcatcccggaaaaataa

SEQ ID NO: 422789 - DNA, 1224 bp, Serratia marcescens
atgaaatatttctttaatacccggctcggtaacacccgttacgagttagccgacggctccctattgtgcgaagccgtaccgatcgcgcgggttggctggcaggtctacaacgccgcagaactcgacgagatcgagcctgacagcgatgacgaaatttccgtttatcgctcccccgaagaagttttccgcccggagacgatcgcctcattcgaggggatgacgttcaccgttttacaccctgagcaaatggtcaacccgtcgaactggcgggagaacgcccacggccatgcgaccaatatccgccgcggcagcggcgaacagtcggatttgttgcttgcggatctcgttgtgaaaagcagcgaggctatccaggcgatttatcagggcgtggatcaaatctcctgcgggtacgacgccgaatatcggcagacggccccgggaaaagccgagcaatacgacattgtcggcaatcatgtcgcgctggttcctgccggccgcgcgggaatccgctgttcaattggagatagcagaacaatggcaactaaaaaaacgtggtttgattcgctgcgccgcgcgctgaaaaccaaagacaacgcggcgatcgaagaggccatgagtaatgcgccggccgaactcaccaccgatgatggcgagggcgggggcgatttgccgaaggccatcaacatcaacatcagcccgcaatacccactcccggataaggatccggagatgggcggcggcccgggtatcactaaagatggtgaggaggacgtgccggcctgggcgcaagccattctcgcgcgcctggataaattggaaggcggcggcacgaacgacggcgatcccggcgacgatgacgacgaagaggaaaagaaaaaggccaccaccgacgccggctatcagcaggcggtgatcgcccgggctgaattgctggttccggggatcaaactgcctgagggtggaaagctggcgacgtttaaacgcgaagtgctcgatgctgcattccgcacgcaaaaaggcgcacagatccttgtcccgttggtcggcgacaagcccgattttaaaaccatgccgaaagcgtcgctggatgccgcatttaccgcggccagcgaaatcgccaagcgcgccaaccagcccgcagcccagctgcgcaccttcgaccatcaaaaccgcaactcaccggcagcgctgaacaaagccttcgccgaatactggaaaaaataa

SEQ ID NO: 422790 - DNA, 492 bp, Serratia marcescens
atgactgcttacacgtaccggatgcctgcgggcatcgccggggctgtttcacgccctcatcacctcactgcagagcctgtcgcgctgaataacgccaaagcgttcggcgcttacggcctggcgggtaaagacgtaggcggctatttcgtgccgctggaagccggcgacgccgtcggcgtgatcctgggcttctacattcgcccgtacccaaccacctcgacgcctgatatggtccgccaggtgggcaccgataaaaacctcaccggcgaccgcctgcgccgcggctacatgaccgtgaatgtcggcgttgacgcgtccggcatcacgccgcatacgccggtgaatatccgcatcgccaacccgagcgcgacaagccagcttggcgcgccagtggccgcagccgtggctgatgaaaccgtcgtcctgccgaccgcatttttcaccggccccggtgatgccgctggcaacgtcgaaatcgaatacaacatttaa

SEQ ID NO: 422791 - DNA, 945 bp, Serratia marcescens
atgtcacttcatacctttgaccaggcgaccgtagacagcaccggcgcatttctgatcggcgagctggaacggctcgaccaagaactgaatatgccgctggtgggctatacgtggagccgcgatattgagctgcgcgaggacgtgtcgatcgctgacgacatttccagctttacaaacaccgagcttgctgcctccggtacgccaaacccgaacggcaaaaactggatcggcaagaactccaccgagatcgcgaccgttaatctcgacatcaacaaaaccggtttcccgctgaccctgtgggggatggaacttggctggactgttgttgagctggctgccgcgcagcaggtcggccgcccggttgatgcccagaaattcgaaggcatgcaactgaagtggaacatggacaccgacgagcaggtttatcgcggcgatacgctgatcggcgtgaaaggcctggtgaactacaacggcgtgttgaccaccaacgccccgaaagtctggacggcctcaactgctgacgaaattcgtcaatcgatcaactccgcactgtcggccgcctgggccaactccggctatacgatcgttccgcgtgatctgttgctgccgcctgagcaatttgcgctgctgtcgagcatcatcgtttcgtccgccggcaaccagtcgctgctgacctacctgcagaccaacaccatcgcctaccaccagaacggcgtcccgttgaatattcgtgcggtgaaatggctgaaaggcgccggtgcgggcggcaaggatcgcatggttgcctacaccaacagcaaaaagttcgtgcgtttcccaatggttccgctgcagaacgtcccgatccagtatcgcgggctgtaccaactgaccacctactacggccgtctgggcgcggtggagtccccatatcgcgaaaccctggcatacgtcgacggtatctaa

SEQ ID NO: 422792 - DNA, 393 bp, Serratia marcescens
atgaagcaatcactggtaaaaatccgcgtgcatacgccgttcactttcacgcacccaaattatgaggtggaaaaattctccgctggcctgcattcggtggcgccagaggtagccgagaactggttcaccctggagcatgcggaagttatcgacggcggcaaaagtgacaatgccggcgcgccagcggaggcgctggcgcagatcgccgacctgcagaagcagctggcggaggaaaagagcaaagtagtcgacctgacgacggaacgtgacgaacgcgatcagatcatcgccgagcacgtcgccactatcggcaaatgcgatgacacgatcgccgacctgcagaagcagctggcggcggcgctgactgagggcgcgaaaggtggcaaaaaataa

SEQ ID NO: 422793 - DNA, 405 bp, Serratia marcescens
gtggcaaaaaataaccatctgccgaccgtcgataaattccgcgaagatttcccgcagttcggcaacgccgtcacctttcccaacgctcaaattcaattccgcttaaatctggctgaccaactgctcgatgaaaacaacttcggcgaggtattcccatacctggccgagctttttgtcgcgcattacatggcgctccaggcggcggataaccgggcggcggcgatcggtggtggtggcggggcgaatagcggcattgtgtcgtcgaaatcggtcgacaaagtcagcgtgagctatgacagcagcgccacgatgaacccggacgcgggcttctggaacaacacccgctatggcgccgaattctggcagctgatccagatgttcggcatgggagggcggcagctatga

SEQ ID NO: 422794 - DNA, 564 bp, Serratia marcescens
atgaaaagcgggttgaaggtgcgggccgatcggtcgcaggccgttttttctgcgctgaatgaaatcgcgcgccgcgacgtgctggtcgggatccctgaatcggcatcagaacgacagccggaggatggcgaaaagcccgggataggcaacgcacagatcggctacatcaacgagaagggatcgccggcgcagaacatcccggcgcgcccgcatcttcagcccggagtgaaatcggtgcatgccgaaaccaccgcgaaaatgaaggccgcggcgcaagcggtgtttgatggtcgcgtcggcgctgctactgcggcgctggagtcggccggcacgatcgcgagccaggcggttaaaagctacatgaccagcgccgattttacgccgctgtcgccagcaacgctaaaagcccgggcgcgccgcgggcgcaaaggtgcggctaaagaattgcagagccgcgccgccggcaacgctccggacaacgccaacgctcgccccctgatcgatgaggggcaataccggcgcgcgatgacctacatcgtgagggacaaaaatgccaactcttga

SEQ ID NO: 422795 - DNA, 390 bp, Serratia marcescens
atgccaactcttgacgttacagacgtgctcttcgatcccgatttttgcgatacctccctgattgtcacccgaaaccagcagaccgttgacgatgacggcttcgccaccaacgccccggtaaaaatgccgtttgccggagtggttaccgtcgatcggtcgctcgaagcgcggcgcatgatcgcgggccaggtggtcaccggcgcaatcctggttgtgaccactgagcggctcaccgccgggcagacggcgcgcgacgcagacatcgtgacctatcagaaccgtgattaccgtgtgacctttgtcgacccttacacggcctacggtgcgggattcgttcaggcgcattgtgagctgctgccgttcgatggagggatccccgttgagcaataa

SEQ ID NO: 422796 - DNA, 549 bp, Serratia marcescens
ttgagcaataacaccagcacgcaggccggttacctgacgccaatttcgcccggccctgattatgatgaggcgctcgaacgtgcgctaaatcgttgggtgctcggtataaccgggctgccgccgggcaacgtgcggccgcgctggacacccacacagccaccattgatgccgcctgatgtggactggtgcgccgtggggatctccggctttatcggtgatgataatccagcgtttacgcggcagagcgacgacagtgcggaattgtggcgccacgaggtgaccgagtgcctggcgtcgttctatgggccgcatagccagcgcatagcgtcaatttttcgtgatggtttgaccctgtcacaaaacaacgatcagctgatcgccgtcggtctgtcgctcggcagcatcggcgacatcattcctttccctgaactcatcaacaaccagtgggggcgccggtatgacattaccgtccgcctgcgccgcaaggttgtccgcgagtacggcatcaagccgatcgcagaggcaacggtaaaattcttcggagaataa

SEQ ID NO: 422797 - DNA, 1482 bp, Serratia marcescens
atggctcagcaggggttacctgttcgtaacgtcgtcggcgttgcgattaatatggccttgcgcgcggcgcaggctcgaaactttggttcgttgctgattatcggggcatcgccggtgattgacgccagcgagcggatgcgcgcttattccggcattaccggcgtgcaatctgacttcggcatccaggcgcctgaggcgttagccgctcaggtttactactggcagcgcccgcagccgattgatctgtacgttggccgctgggtaaaagtggacactgccgccgcgttgcgcggggcaatcctgaatactgcgcagcaggcgatgaccaatttcacaaccgtgaccgatggcgcgatgaaaatcagcgtcgatggaacggtaaaaacggtatccggcgttgacctgtcggcagaaaccaacctgaacggcgtcgccgcccgcgtggcggaaaagctgaccacggcgaccgtcgtctgggatgcgaataacgcgcgctttgttgtgacgtcgaaaaccaccggtgagacgtccgccgttggctttgctacgccaaacgccacgggaaccgatatttccgcgctgatgggcattcttgaaggcaccggtgcgaaaactatcgcccgccagccggcggaaactatcgctgaatgtgtcgcgaagtttatcgacctgtcgtcgaaatggtatggcctgtatatcgccgagacgatttctgacgatgaagtgctcgcggtcgctggcctgattcaatccgatgacgtttcccgaatctacgcccacaccacgcaaaataccgcagtgctcgatgcggacaacaacacggatattgctagccgcctgaaagccgccgcttttggcacaacctgcgtgcagtattccagccagagtccttacgccgcggtgtcgattctgggccgtgcttttacggtcaatttcgccggctggcgcaccacgatcaccatcaaatttaagcaagagccggggatcgtcgcggaaacactgacacaaacccaggcgctgaccctgcagcagaaaaactgcaacgtgttcgtcaattacgacaacgacacggcaatcctgcaagaaggcgtgatgtgtaacgctgatttcttcgacgagcgccacggcttggactggctacagaactacgttcagaccaactactacaaccgactctataccagctcgacaaaggttcctcagaccgatgagggtattaccgatctgctgaccaacgtcgaagcatcgctggcgcagggcgctgaaaacggtttgatcgcgcctggcgtgtggggtggcgacggtttcggtgcgctgaataccggcgacacgctgacaaaggggtattacgtctactccccgccgattgcacagcaggcgcaagcggagcgcgaagcccgcaaagccccggtgatgcaggtggcaatcaaactggccggcgccgtgcacttcggcgacgtcatcatcaacgttaaccgctaa

SEQ ID NO: 422798 - DNA, 441 bp, Serratia marcescens
atgcctacttatagctttttggatgtgtccgccaatatcaccggcatcggcggttcgattgacctcggcaacggtgcggcgacgtctgacgaagggatcgtcgttgcaatgggcggcgacaaaaacacgatggtgaccggcgcagatggtgaggggatgcacagcctgcacgccgacaaatcggggacgatcaccgtcaacctactcaaaaccagcccgacgaacgccaagctgtcggtgatgtataacgcgcagtcgctgtcatctgcgacctggggcaacaacgtcatcgtgatccgcaacaaatccagcaacgacgtgaccacggcgcgcggcgtcgcgttcaagaaattgccggattggcagaacgccaaagacggtaacaccgtcgcctgggtgttcgactgcatcaagatcgaccaactgctcggcacgttttaa

SEQ ID NO: 422799 - DNA, 429 bp, Serratia marcescens
atggaatttgaaattaagggccaaaaataccgcgcggccaaactgaatgttttcgagcagttgaaagtttcccggaagctgctgccgctgctgtccggcctgctgggggaaattaaggtgttgcgccagctgaaaaccgggcagatttcgattgaggatgcgctcaaagtggcgctaccggtgatcgcacaaacgctggcggacgtcagcgacgatgacagcaacgcgattattcatccctgcctggcggtggtgtcacgccagaatggcaccgtctacacgtcgatctttaccagcggtcaactgatgttcgatgacatcgacatgatggacatgctgcaaatcgtcgcgcgcgtggtcggggactcgttgggaaattttttgcccgcactccccgacagcgagacgaaagaccagccgccggcctga

SEQ ID NO: 422800 - DNA, 126 bp, Serratia marcescens
atgtgcagctttgaggcgctcaaggatgggcgcctcgatttgttcgacgtcgcgctgatgaatgattacctggacatgaaagcggataacgaagcccggatcgccagatggagagaggatcaatga

SEQ ID NO: 422801 - DNA, 2007 bp, Serratia marcescens
atgaacgctgaaaccatcaaggattttttgatttctctgggcttcgaaatcgactgcaccggcgagcgaaaattctcggctgttgtcgccggcgtcacggcgaacgtgctcaaaatgggggcggctgtagaaggggctgcgctgacgatcgtcggcttcaccacgcagatcgccaatggcctggataaagtctattttgcatcgcagcgcaccggcgcctcagtggcgggcattcgcgcgttgggatatgccgcctcgcagatgggcgcagacgcggcagctgcgcagggctcgctggagagcctcgcgagattcatccgtaacaacccgggcgcggaaggtttcctgaaccgcctgggcgtgcagacgcgcggtgcgaacggtcagatgcgcgatgccgccaccatttttaccggtgtcggcgataagctgcgcagcatgccgtattaccgagcgaatcagtatgcgcagatgctggggatcgacgaaaacacgctcctcgtcatgcgccgcggcattaacggtttcactgccgattaccagagcatgctgaaagccaccggcctgaacgccgaccgcgcggcgcagcagtccaataaattcatgacctccatgcgcagcctgaccgcgctgcttggcatggcaaaagacaaaatcggctcagttctggccggcggcctgagtggctcactggatacgctgcgccggcgaatcatggataatttcccgaagatagagggattcatcaccaaaaccgttcgaggcgttctctggttagccgaggttttcggacggatgctttaccgtggctatcaggctatcgatcaggtgatcacctggtggaaaagcctcgataccgaatcgcgcaaactgatcgggattttcggcgcgctgctggttgcctggcggctgttgaatagcgctttcctgatgtcgccgattgggatgatcactgcgcttatcgtgggtatcggcctgctgtgggacgattaccgcatctggaaagaaggcggaaaaagcctcatcgactgggcgaagtgggagccggctatcacccaggccaagaacgcgatgatctggctgcgtgacaagctgctcgaactgaaagacgccgtcggcggctggaaaactgcgctggaaattttggccggtttcgtggctgttacctgggcggcgaaaatggtcagtgcgatcggctccgtgactaaaagcgtcggtggcctgtcaaaagcgatgggcggcttgggcaaagtcggcgtgatcggtggcttgcttgcggtagaagaggctgtcgttaaaccgctcgaggggaaatactcctggctgaccaacaaccccgtcgccaatttcctgaaccagctcccgggcagtgacacggtcgacgaatgggggcgcaaactgctgccgtggcgccgtggtgaatctacgcaatacggccagtcggtacgccggccgcaggcgacaaaagcaggggcggcgctgttgggctggctgcagcccaaactgacgcagctcgaggcaatgtacaacctgccggcgggcctgctgcgcagcgttgcgctaaccgaatctggcggcaatcagtttgctgtttccggtgccggcgcgaaaggcttgttccagttcatgcctggcaccgcccgggacatggggctacgtggcgatgacgtcttcgacccgtccaaatcagcggcggccgctgctcgctatctgggtatgctgctgcgcatgaatggcggcgatctggaaaaaacgctggcgtcctataactgggggatcggcaacgttcaaaagcacggcatggggctgatgccgacggagacgcgcaactacataccgagagtgctcagcaacatgccaggcgccggcgggaacagcctgaatcagcagacggtgatcaatatccacggcgttaacgatcctactcgcgcagggatggaagtcgccgatcgtcaaactggcgtgaactcccgcctgacccagcaactctatgcgaggccgcaataa

SEQ ID NO: 422802 - DNA, 606 bp, Serratia marcescens
atggatattctctccgtcctgttttcgcagcagacccggaagataggcggcatcatcccgagcgtggctatttcggaaaagcacagcgacacgctggagatcaccgagcacccgatcgaggatggcgcgcctgtcagcgaccacgcctacaagcgtccgccagaggtgacgatggagctgggtttcgccggcggcggctcgctgctggatggcgtcgacacaacccagtttatcgacatcaacagcggccggacgctcagcagcggcccgcgggaagtttataagcagttgctcgcgctgcaggaaagccgcttgccgttcgacgtcaccaccggcaagcggcagtaccagaatatgctgatccgctcactggatgtcacgaccgatcgcaccagcgaaaacgtgctgatgtgtgtactgacgctgcgcaacgtcatcatttcccgcacgcagagcgtttcggttgcggacaaagccaacatggccgacggcgtcagcacgtcggcggtgcagaactctggcactaaatcggccaagccggtcaacgaaagtttgctctcccaggcgcagcgcggcgcgctgggagtgctgggaggtttcgggtga

SEQ ID NO: 422803 - DNA, 306 bp, Serratia marcescens
gtgaacattcaggaaattccgctgacgccggacaatcagcaattcgggatcgctctgggtggccagcagatgaatatgcggctgacctggcgcgatgaggccggctggttgctcgacctcatggacagcgccggcggcgcgctggtgaatagtgtgccgctggtgcctggcgccaacctgctggcgcagcatgcgcatctggggtttaccggtgcgctgatcgtcatggtcgacaacaacgaaccagagctaccgacgaaaaccaacctcgggatcggcagtcatctttattttgtgcaggagtag

SEQ ID NO: 422804 - DNA, 1062 bp, Serratia marcescens
atgagtcagaactggatgcggcattttgagctgcagctgcttgaccagcagggcaacggcatcagcttgtcagattttaaagtcactttccgcattgagtgggccgatacgcggtggccgcgcgtcgccaacgtcaaaatttacaacctgtcgctggatacccaaaaccggattctgggcagcgagttttccaaaatccgcatgattgccggctatgacgggatcgccccagatgcagacgccagtcaggtcggcgtagcgcggccggtagacccggcgaaatccggccagcgggacggccagaactttggtctgatttttgagggggatctgcgcttcacgatcaccggcaaagacaacccgaccgattcctgggtgttgattcaggccgtgggcgatcatgaggcgtttctctatgcgacggtgaacactacgctcgccgccggttataccgtggccgacgtgtacaatgccgccctgaaaagcttcaacgcctacggcataacccaggggatcaccggaacttttcccgataccgtttttcctcgcgggctggcgctgttccaatctgcgcgcgatgtcatggactctgttgccggcatgtgtaaagccacctggcagctgatcgacggcaagctgcagatggtcaacgagaacaaatacatccacgaggctatcgtgctgaacagcgaaacagggctgatcggcatgcctcagcagacgatgggcgccggcgttaacgtgcgctgcctcatcaatccgaatattcgcattaatggcctgatccaactcgaccagacatcagtttatcgaacagcactatccgacagtgagatcgcccaatccggcggccgcatcagagaaaccgaccagaacggaaatcgagttgtcgccggttccctgcagcagcccgccagcgttgcgacggacggcgtgtatatcgtgaaggcgatcgactatactggcgacacacggggccaggcgtggtacatggatctgatgtgcttcgcgcgcggctctgctgatcttcttactgattcagcaaagaacaggacggtttaa

SEQ ID NO: 422805 - DNA, 339 bp, Serratia marcescens
atgttgaaggcgctcgccgcagtcgttgttcttatctctccatcttgccttgcggatactcaatgcgggccttttctgctcactccggggcctagtgatgggtggttcaggatcaacaacgctaagccagaatcgcaaaaagttacgtttttgaaggcaaaagaagactacgacaacatcaaaattgattggagggttgcgtctaatcaacctggtaaatgggtggggctggagtacatcaagcgtgatggtaaagcatttttaaatgcccaattactccaggccagcatggacgcgccgcgccagtatgcgacgtatgactgcataaaaataaactag

SEQ ID NO: 422806 - DNA, 228 bp, Serratia marcescens
atgaaccttcacaagatatctaagggctgcgtcatctacttcgaagaccacggagactattacactggcacagccaaaggcgcagatgtaagggatgaaatgacggcagtaattgccacatccttagatgacctgattgaaaagcttaaaggcgttatgattgaacctgccccagacatggtctgggacggcatccgagaccaattaactaaagatggatatcggtaa

SEQ ID NO: 422807 - DNA, 759 bp, Serratia marcescens
atgcccgtatccctcacatctcaaatcggcgataagcagcaggccgaccaggcgctgatcgacgccatcaacgcgggaatgcgcgtatcgatccccggcatcattcaatcctttgacgcggatacggttacctgtgttgtcctgccggccgtgaaaggttacgagccagaaagcgccggcggcggaaattctgccagcttgccgctgctggtagatgtgccggtcattttcccgcgtggcgggggcgttacgctcacgtttccggtcaagtcgggtgatgagtgccttcttgtgtttgctgaccgtagcatcgatttctggtggcaaaacggcggcgtgcaggagtcggccgccgaacgcatgcaccacctgtctgatgccctcgctattgtcggcccgcagtcgcaggcccagaaaatcagcggtatcagcaccagcgccgcgcagctgcgcaccgacgacggcgcggcatttatcgaactcgacccaggcagccatgccgttaacgtcactacgccgggcaagctgaccgccagcgcgcagggcggtacggagatcaactcccccgaaattgtgctcaacggcaacgtgaccatcaacggcaacctgtcgcagggcatgggggacggcggcggcacggcgacgatgctggggccggttaacgtgacgaacgatgttaaggccggcggcatcagcctgcagacgcacaagcacggtggtgtagaaactggcggcggccagacgggaggcccgcagtga

SEQ ID NO: 422808 - DNA, 351 bp, Serratia marcescens
gtgagataccggaaagaagacaagaatggcgattacagcttcgggcgcggcgagggggatttcttcattaacacgcctgaggccgtgggcatggcggtgatcagccgcctgcagctgcgaaagggtgagtggttcctcgataccaccgccggcaccgactggacgcagatactcggcaaatacacgtcgggcctctatgacatcgtgatccgcgagcgcatcctcggcacgccgaacgtgaccgagatcgtcgagtaccagagccagcgcgatgttgatacgcgcgacctcctgatcaccgccacgctaaacaccgccttcggccaaacctcggtaacaacctatgtatga

SEQ ID NO: 422809 - DNA, 1191 bp, Serratia marcescens
atgtatgaagacattatcgattcgatgctgccaaaaataacggcggcagggatgatcgcgcctgaattccagaccatcctcaccgggtggcagacgatttttcgcggcatctatggcgatgacatctacatcgagccagacagcaaagacggcgtgctgttgtcgctgatcgcctacgcgatgcacggcggcaacaatgcggcgatcgccacctggaatgcatttagtccggcgaccggcaccggcgcagggttggcgagtaacgtcaaaatcaacggcatcagccgcaaggcgccgtcaaattccacggttgacgtgaagctgatcggtcaggttggcatagtcatcagaaatgcctcagtacgcgacagcgccgggaacctctgggatttgccagcagaggtggaactcgacattcacggccaggcggtggtaaccgcgacggcgcagaaggcaggcgccatcaccgcgctgcccggcgatgtttcgcaaatcgccacacctacgcgcggctggcaatccgtcacgaaccctgaagcggccaccgccggcaagccggtagaaactgatgcagagctccgccagcgccaggcgctcagcgtcgcgctaccgtcacgaactgtcatggaggggttgataggcgccattgccaatatcaccggcgtgacgcgctataagggctacgacaatgacacttcggaaaccgacatcaacggcgtgccggcgcatgcggtttcgatggtggtagacggcggcgatgcagaagagatcgcccggatcatcgcgataaaaaaatcacctggcgcgccgacgttcgggactacgacggtgatcgtcaaagatgcctatggcacagacaagccgatccattttttccggccgaccaaagttccgatttacgccgctatcaaaattaaggtgcttcctggctacaccagcgacatcggcgaagacataaaaaaagccgtgtctgactacatcaacacgctttacatcggcgatacggtctatttttcgcggctctacgttcccgccacgctgggaaatgccgccagcgggaaaacctatgacctgatgacggtaagcattggaaaagatgcggtcacgatgagcgaggccaacattccgatcctgtttaacgagtctgcgacctgttcgccggagaatatcgcaattatcacggtggcatga

SEQ ID NO: 422810 - DNA, 576 bp, Serratia marcescens
atgaccaacaaatacaccgcattaatacccgcttatcactgccaattccccaactactacgccaccctcagtgcggttactgaagcgttcgcacgtcaacaggacagcacgcgcggcatcgtgccggcctttgacctcgacaacgccatcggcgctcagcttgatgttatcggcctgtgggtggggcgcgggcgccgcatacgcgcaccggcagtgaaccattatttttcgttcgatgatccggacctaggtttcgacctgggaacgtggaagggacgttatgactccggcgatgagtatatcgatctggatgacgacacctatcgaacggtgctccgcgccaaaatcggcgccaacaattgggacggcacagtagaaacgctgcccgccgttctggctgccatttatccggaaggcggtatcgcgatcactttttcggacaacctagatatgagcatgacgatcactgctagaggcgccgtaatacccgcaatcaccaaggaagtcattcgtcagggctatctctcgatcaagccgatggggattactgtcaattatgaagttgtggagggataa

SEQ ID NO: 422811 - DNA, 780 bp, Serratia marcescens
atggcgaagaatgaatttaaaccttttgccatcggtgaatatgcgaacgtgctatcacagaatgaatatgaagcactccccgctgtaggggcgggatttactgccggcgttgcaaaaagcgaagaactcaacaaggtgtggcggcaatcttctgtgatgtcatctgtattaggtgatttcattgccattaactctggtgatgatgttttagatgatggtgacacgaacaggattttacagtctctaattaaagcattatcaaaaccaataattgatgttagtcaccctgtcggtatagttgcctggtttgctcaaaataaaaatcctaacgaactgtttcctgggactacgtgggtatatcttggtgagaatagaaccattaggttatcgaaatcagatgggagtgatttgcttgagtcgggtggggcggatcaagtatctatcagtaaaggaaatctgccaaatatatcgctatctgtcagtggcactgctaatgaagtagatctcggctctcgacaaacagatacccagggtagacatagccacaggtctggcatggcaggcccgggcgctacataccaagattatatcgttgggtctgataatgactcacataggccgcttacttatacaagtgacgatggcgatcacgcgcatacggtaaatattggtacgcacgcacataatgttagtggttcaacggaagcccttggttctggaaattcaattaatattaccaacgcttacatcaagttgatgggctggtatcgcaccgcataa

SEQ ID NO: 422812 - DNA, 1107 bp, Serratia marcescens
atgacaccggtcagcgagcaagataaggcgacgctgaacgacatgagttaccagagctataggcagggaaacatactgccgatgtataacgcactgttgcacgccaaccccggcaaccaggtatttattcatgccccatttgcggcaggtgggcgctcctttgccgagataagcaaagggacgatcccttatcaaaactcgctggatttggtgcggcttgggaaaaatgcagccgatggggtagggaaacgctacacgttcaaattcatgacgtttgagcacggagaaacggacaacgacaacggcagttcgcagaatcctggcgactatctcgcgaagatgacgccctatttttctgggctgcaagttgacttcaaagcgattaccggccagaccgataatttcttagaagtagcggggcaggtcggcagtcgcatcaacaccaaaaatcagcaggtagacgatcaaggcaagccaatcggcgagcctgtggtcgtacagtcgtattctgttgcggcaactgaccaactgacatatgtgcggcagaacgccaccaaggccatcatgtacggccccaaatacccgctcaactggctatttaacgatgagacattgagccatctcaatgctgcggggaaggtgttacaaggggaatatgccgcgcaggctatttactggcacctgtacgaaccaggaaaaaaaggcacatggacggggctcaaagctcgctcattatccgtgaacaatagcaccatcgatgtcgtgttcgacgtgccttatccgccgttggtgattgacacaacaacgatcgccgattgcccaggacagggtttctcgctgcaggatgcttcagcggcggttcactcggtagcagtagttgctccaaacacgatacgcctgacgctttcacaggcgccggcaatgagtgatcacttgcttatcggattcacaaacactgtgccagccgttaaagacttcgtctatccgttggtgtgcctgcgtgacagctccacgcagacatcgcgttggatcaccaagaacaaccaacccttcccgctttacaactgggcatgcctcgatcgcctgccgctgaacggagaattttaa

SEQ ID NO: 422813 - DNA, 906 bp, Serratia marcescens
atggtagcagtaaaccaaactgggaaagcctactacggctttcgcacagctttagacctatcagcctctattcttgacccacaggcgctatttaatgcctataaagcgcgggtactggcagacggaggcacaatcccagatgaagctggttgtctggcccggttttcatttctgctaaataacggcatgtatgagaaaaccacgatctgcgctgcaccggcattcgggctaaaggttgatggttctgggaacatccagaccatttacaacttcctcggcgatgcaggcgatttaatcgctggctcgcaaggtacgccgcctcgcgctatgacttacgatgcgactgctcgcgcggtgattatccaggtgacgtcaggcggcgggcgcttccttaaaagtcgcgccaaccaaatcattcaaaaaggcaaatcgtaccttattgctgggcgaatgagtgacctcgacagggcggacaataacggtatcactgcgggatacaacatcaataatttggcgctggcatatttccgtaccatgatcaccaacaaccaaggaacgactgaagcgtggcgctatgggacacgtgatagtgcatggccggcaggaacgggcggcgccatttacgctgcaacgagtgtctatgctgattatgtgccgtccgctggcctgttaaaagttgaacaagggattattgaggggtacgagaaaggtaagttgcttgcgaactccgatccggcggcgacgggaaaacttgcagatctgagcagtagtacagctcctttgctgatcggcggagcgcaaactgcaagtggtgttgctgcgtgctatggggcattcatggacattctatgccttcacaccgctgacgaatccgacgcgatcctcgcgtcacgtttggggatgtaa

SEQ ID NO: 422814 - DNA, 399 bp, Serratia marcescens
atgggaatgatgccaaaatttgccagcccggcagcagactacgttgagcgccgtttgagccttgacgagatctgcatttcaaaaccgagcgctacttatctgctccgtgccgccggccaggcgctggcggtcggtatccacgctgacgcgttgctcgttgtcgattcgtcggcgacgccggtgcacggcagcattatcgtagccgccgaggaaggcgcacatgtgttgcgccggcttcgtctttacccgtatcgcgcgcttgagtttctcgatggctcgggacgggaaactgaactcggtaatgaggattcggaagaagggatcgaggtgttcggcgtggtgatgtactgcgtgaacgatatgcggagttgtgagtgggatgatctgcctgttatttga

SEQ ID NO: 422815 - DNA, 408 bp, Serratia marcescens
gtgttgaacgatcggctgagccagttgaagagagcgttgcccgcctatcttgaggcgtggcgtgagggggctttaccctctgactgggggcagatggccaaccccgaagtggttgccgccctgttggcggagtgggaggcgctgagcgaattggtgtcgctgttcgaaaccgcgactgaaaccccaaccgatcccgccgcgttttggcaggcgcgcgccgagctgatggcacagcgcaatcgtgagctcagtgctcacctggcgacgccaatccgtttgcccggcgcacgggtagccttctttggctatgtgaaaacggcggtgatggacgccaggcaggtgaaggcggcaattcgcgatgccggttttaccattgcgggcgacagccaaaatgagaacacggcttaa

SEQ ID NO: 422816 - DNA, 219 bp, Serratia marcescens
atgtttaaactgttccgtaccttgtgcctgctactcggcttttggatcgccaccctgctgctcagcggcgccggggtttcttttactcacggctacgccgcgccgaaaaacctgtcgcatttcgtcgtctcgctggtggtggtcggcgcaatgctgctgtggacccataaattgctgcggttcttttttgccgagaaatttgagaagaaaccgcgttaa

SEQ ID NO: 422817 - DNA, 150 bp, Serratia marcescens
atgcaagagatcgaggccaaatacttccacctgatcgccggctcaggtaacttttccgacaaccgcggcagcaacggccgcgtcaacaacaacggtggcaacaagaacaacagcaacagcaataaaggcggcaatacctgctctcgctaa

SEQ ID NO: 422818 - DNA, 282 bp, Serratia marcescens
atgaatcagcccgcaaacgagaaaggcggccaaacggaagtgttgctggtgaacagtgcgctggtggactgcgtgggcgtcgccccgatgaagtgcatgcaggtgcgccgctccgcgcagcagccgtgggagttgttctataccggcatcgaaggtttcaccttcgaaccgggctatcagtatcggctgaaagtgcgcgttactccggtagagaacgtgccggccgatgcctcatcgctgcgttacacgctgattgagcagttggaaaagaacaaggcgtga

SEQ ID NO: 422819 - DNA, 1200 bp, Serratia marcescens
atgattatcaaacctaaaattcgtggttttatctgcaccaccgctcacccggcaggctgtgaagccaacgtccgtgagcaaatcgcctacgttaagtcgcgcggcgaactgaaaaacgggcctaaaaaggtgctggtcattggtgcatccaccggttacggtctggcctcgcgcatcaatgccgctttcggcagcggtgcggccaccatcggcgtatttttcgagaagcctggcagcgaaggcaaaaccggttccgccggttggtacaactccgccggtttcgacaaggcagctaaagaagaaggcctgtacgcgaaaagcatcaacggcgacgcattctccaacgagtgccgtcagagcgtgatcgatctgatcaaaaaagacctgggtcaggttgacctggtggtttactcgctggcttcgccggtgcgtaagatgccggaaaccggcgaagtggtgcgttccgcactgaagccgatcggcgagccgtacaaatccgttgcgctggacaccaacaaagacgtgctggttgaagccgtggtcgagccggccaacgagcaagaaatcgccgacaccgtgaaggtgatgggcggccaggactggcagctgtggatggacgcgctggacgaagcgggcgtgctggcggataacgcgcagtctgtcgcttactcctacatcggcaccgatctgacctggccaatctactggcacggcacgctgggcaaggcgaaagaagatctggatcgcgcggcgcacgccatcaaccagaagctgcaggccaaaggcggcgcggcttacgttgcggtgctcaagtcggtggtgactcaggcttcctctgccattccggtgatgccgctgtatatctccatcgtgttcaaaatcatgaaggagcagggtattcacgaaggctgcatcgagcagatccagcgtctgttcgccaccaagctgtacagcggcgcggcgccggacaccgacgaaaaacaccgcctgcgtctggatgactgggaactgcgcgacgaagtgcaggaaacctgtcgtgccatctggcagcagctgaacgacaacaacatcaatgaactgaccgattaccagggctacaaggcggaattcctgcgcctgttcggctttggcctgcagggcgttgactacgacgccgatctgagcggcgaagccaacttcgacgtgatcgagctggtctaa

SEQ ID NO: 422820 - DNA, 219 bp, Serratia marcescens
atgacatggcgttattgtgccacggtatcgttgtttttgttgagcggctgcagcgcgattcagccgacgtcgacgtccccagactggtctcagccgcagcctgccacgcgggagcagcggcaacgcatcatggcgggtgagtccgcctcctcggtattacatgaaggaaacgtcggcattggcggcacctttgatggggcgaaaatattcgatcgttaa

SEQ ID NO: 422821 - DNA, 306 bp, Serratia marcescens
atggcgaaggagatggccgcgatctttctcttgctgttgctgccgttaagccaaagcgccggcgcggcgcgttacgacaggccgtgcgaaggcgtgtcgccggtgctgtttcaaaagcgcctgaaagcgttggcgcaggatttgcggcaggaaatgagtgaggaagcgacgccgacagagcgcgatgcggaggagctggcgcgcttggcggagtgcggtatcgagcccggcaaagcgcccgtcaccggtgggcagcgagcgccgcattccgaggaaaaaccgccggcatcgccaaacggttgttga

SEQ ID NO: 422822 - DNA, 336 bp, Serratia marcescens
atgaaaaggatagtgttggccggcgtggccttgtgtagctgctgcttcgcgcaggcgcgggtggatttggaataccatgcggcgccgccgaaggacagtaaggtcaccgaggagtaccagaaaaagcgcgacgcattgcgccacaaggtgtggaatgtcgataacctgacgctggccaacgagcaggcgattgcgcgcgaacagcagcgcgaggcggcagagaccgccgagcggcagcagcggaacctggagcagcagcagaaaaagcagcgctgcctgcggagacactcgaaagatcctcaccgcgaggcgaagtgttacacgcacagcttctaa

SEQ ID NO: 422823 - DNA, 720 bp, Serratia marcescens
atgattaacgtactgattgtcgacgacgacccgatggtggcggagctgaacaaatactacctgagccaggtcggcggttttcactgccaggcgacggtcgccactctgagccaggcgcgcgcgctgctggccgatgccggcgtcagcatcgatttggtgctgttggatatctacatgcagcaagagaacgggctggatctgctgcccggcctgcgcgagctcggcgagaagaccgacgtgatcatcatctcctccgccagcgacgtgaacacggtgcaaaaagcgctgcactacggggtggtggattatctgatcaaaccgttccagttcagccgcttcaaggaggcgctgagccactaccggcagcagtcgcagctgttggcgcagcgcgagttttcgcaggccgacgtcgacagcctgctgcgccgccagcccggcggccaggagagcaaaaagctgccgaaggggctgaccagcatcaccctgagcacggtctgcgagtggatcgaacagcagcacgataacgagttttccaccgacaatctggccaacgccatcggcatttcgcgggtgtcctgccgcaagtacctcatctatctggcggagagcggcattctcggcacccgtattctgtacggcgccaccggccgcccggtctatctgtatcagctgaaaccggacgcgatcgccatgctgaaggagcattgccgcccggcctaa

SEQ ID NO: 422824 - DNA, 1614 bp, Serratia marcescens
atgccaaaacaacgggtgccgctcaagctgagcacctccatcacgctgatggtgtccgccatcatcgcttcggtgctgctggtggtgttcgcgctgtttttcgtgcagatgagccgcgaggggcaagatcagctgcagcagaaagccatcgccgtcgccaatacgctggcgctctccagcaccgtggttgacggcctgcagcggcgcgatcaaagcggcgccattcagcgcttcgccgagcaggtgcgccatcaaaacgagctgctgttcgtggtggtggtggatatgcagggcatccgctattcgcaccccaaaccctggctgatcggcaagcattttatcggcgacgatctggcgcccgcgctgcaaggccacgtcaacagtgccatcaaccgcggcacgctggccccggcgctgcgggtgttcgtgccggtgtatgacgcgcagaaacaacaaatcggcgtggtggcgctcggcatcgcgctggacaccgtgcagcgggtggtggcggagagccgctggatcatctattggaccatcgccttcgccgccctggtcggcagcctgggcaccttcttcctggtctccgcgctcaaacgcatcatgctgggtttcgagccttacgaaatctccaacctgttcgaacagcgcaacgccatgctgcagtcgattaaagaaggcgtgatcgcggtcgataacgaatcccgcatcaccatcgtcaacgacgaagccaagcgcctgctgcgccagagcggcccggtggaaaacctgctgctggaagccgccagcaagcactggccggcgcagctgcatctggcggaggtgctggccagcggccaaccgctgcgcgatcggcagatcggcttcaacggcagcgaactgctgaccaataccgtgccggtgatcgtcaacggccaggtgaccggcgccatcgccaccttccgcgacaagaccgaggtcagccgcctgctgcagcggctgagcggcatggcgcactacgccgatgcgctgcgggtgcagtcgcacgaatttatgaacaaactgcatgtgatactcggcatgctgcacatgaaggcctaccagcagttggaaaactacatcatcaacaccgccagcaactatcaggaagagatcggcgcactgctgcgcaagatccactcgccggaagtggcgggcttcttcatcggcaagatcagccgcgcccacgaagccggcattgaactgaccatcgaagaaaccagcctgctgccggaaaccgacgatgcggaaaccacccacgtgctgatcagcgtgctcggcaacctgatcgaaaacgccatcgacgccatcgacggcgttgagggccacgagatcggcctgagcttccatcatcacgacgatcaattacactgtatcgtcagcgacgatggccccggcatcgatccggcgatcggcgcgcgcatcttcgaacacggattttccaccaagggaaccggacgtggcatcggcctggcgctgatccgcagccatctggagaaactgggcggcagcatcgatttcgagtccgaaccgggcgagctgacccaatttttcgtgcaccttccctatcaggccaagagcagaactcatgattaa

SEQ ID NO: 422825 - DNA, 843 bp, Serratia marcescens
atgcagctcagcagcaaggtgcggatgaaccgcctgttcaacaacggcaagtgcctggacgtggcgatcgatcacggcatcgccaacgaaccggatttcctgatcggcctggaagatatcgaacgggtgatgggcaacctgatcgccgcgcgccccgacgccattcaggtcaactacggccaggcggatctgctgcagcgcgcgccgcagcgcgaaaaaccggcgctggtgatgcgcaccgacgtcggcaacgcctataacgccgcccgccaccgcgagatgtgggcagtgctgcacaatccggaggcgccaatcctcgcggcgctgcaaatggacgccgccgcggtggtggtcaatctgtatatgatcccggatgagcccggcattttccgccagtgcgtggagaacatcggccgcctgcgccacgcctgcgatcgctacgccatgccgctgatgatcgaaccgctggtgatggcgccggccggccagggcgccgcctacggctcgctcggcgacgtggagaagatcgtgccgctggtgcggctggcgcgcgaactgggtgccgacatcatcaaggccgacccaaccgcgcgggtggaagattttcaccgcgtggtggaagcggcgcgctgcccgacgctggtgcgcggcggcggcaagggggagctggggccggtgctggagaaatccgccgcgctgatggcccagggtgcctccggcatggtttacggccgcaacgtctatcaacacagcaatccgtcgcaggtggtgcgcgcgttgatggcaatcatccatcagggcgccagcggccaacaggcgctggagatctaccaccagcagtga

SEQ ID NO: 422826 - DNA, 930 bp, Serratia marcescens
atgaagctgaagaaactgatcgccgcctcggtactgatgtgcatgctgccggccagcgtgctggcgaaagacatcaagatcggcgtttccatggcttacttcgatgacaacttcctcaccattctgcgccagtcgatgcaaaacaaaatgaaggccgacggcaacgtcagcggccagttcgaagacgccaagggcgacatcgcgcagcaaattcaacaaatcgaaaacttcgtcagccagggcgtcgacgccatcatcctcaacccggtggatacccagggcgtcaagccgatgatcaagctggccgagaaggccaagatcccgctggtgttcgtcaaccgcaagccggaagtggcgctgccggccggcatggcctacgtcggctccgactccaagctggccggcaagctgcagatggaggaactggccaagctgatgaacggcaagggcaacgtgatgatcctgatgggcgagctgtcgagcgaagccacgcgcgaccgcacccgcggcgtggaagaggtggcggccaactaccccggcatcaagattatcgataagcaaaccgccaaattcttccgcaaagaggcggtagacgtcaccaccgactggattttgtccggccagcagatcgacgccatcgcctccaacaacgacgaaatggccatcggcgctattttggcgctgaagcaagccaagaaatccggcgtgctggtggccggcgttgacggcacgccggacgcgctggagttcatcaagaagggcgatctggcgctgagcgtgttccaggacgccaaaggccagggcgaaggcgcggtgcagaccgccgttcaactggtgaaaggcgagaaagtggagagcaacgtgctgatcccttaccagctgatcacccaggccaattaccagcaattcgccgataaaaacaagaaataa

SEQ ID NO: 422827 - DNA, 1485 bp, Serratia marcescens
atgtacccttatgttcttgaggccgaaggcatcagcaagcagttccccggcgtcaaagcgctggataaggtctcgattaaaatcaaacccggcagcgtgcacgcgctgatgggggaaaacggcgcgggcaaatcgacgctgatgaaatgcctgatcggcatctaccacccggacgaaggctcgataaaaatcaaaggccggccggtcaccttcagcgacacgctgcaggcgctgcattcgggcatttccatgatccaccaggagctgaacctggtgccttacatgacggtggcggaaaacatctggctggggcgtgagccggcgcggctggggttcgtcaaccacgaacagctgaacgaacaaacccgcgagctgctggcgcggctgaacatcaaactgcagccggacacgctggtgggcgagctgagcatcgccaatcagcagatggtggagatcgccaaggcggtgtcctacaacgccgacgtgctgatcatggacgaaccgacctcggcgctgactgaaggcgaagtggtgcacctgttcgccatcatccgcgagctgcgcgagcagggcaaaggcatcatctatatcagccacaagatggacgagatcttcgccattaccgacgaagtgagcattttccgcgacggcaccttcatcgcctgcgacaaaaccgaaaacctgaccaaacagtcgctgatcaccatgatggtggggcgcgagctgacgcagatgttccccaaattcaacaacaatatcggcgaggaagtgctgcgggtggcggggctgcgccgcagcggctggttccatgacgtgtcgttcagcgtcaagcgcggcgagatcctcggcgtcgccgggctggtgggcgccgggcgcagcgaagtgatggaaagcctgttcggcatgcacccggcggacggcggcgagatctttatcgaaggccaggcggtgaaggtggattccccggcgaaggcgatcgagagcgggctggcgttcctcaccgaagaccgcaagaaatccggcctgtttctggtgctgtcggtggtcgagaacatgagcatcgtcaacctgtcggaatacatcggcaagaacggtttcgtcagccatgtgcagatggccaaagactgcatggagcagattaaaaagctcaacatcaaaacgccgaccatggatcagatcatcaataacctcagcggcggcaaccagcagaaggtgctgatcgcgcgctggctgctggcgcagccgaaaatcctgatcctcgacgaaccgacgcgcggcatcgacgtgggggcgaaagcggaaatctaccgcctgatcagcgagctggccaaccgcggcgtcgccatcattctggtctcctccgagctgccggagatcctcggcatgagcgaccgggtaatggtgatgcacggcggccgcatcaccggcattttggacaaagacgacgcggaccaggagaagatcctggcgctggcctcagaataa

SEQ ID NO: 422828 - DNA, 1041 bp, Serratia marcescens
atgagtaacgtaaagattgagaagccgctctccgccgattcaacgggcaagggaacgctgttctccgggctgagcggcaaaatgccgaaggataccggcatcttcatcgtgatgatcggcatcgcgctgatcttcgaaatcctcggctggtacatgcgcgatcagtcgttcctgctgaatccgaaccgcctgctgctgatcgtgctgcaggtggcgatcatcggcatcattgcggtgggcgtcacccaagtgatcatcaccaccggcatcgatctctcctccggctcgctgattgcgctgaccgcggtggtggcggccagcctggcgcagacctcggacagcatctcgccgatgtatccggggctgctcgatctgccggcggcgatcccgatcggcgcggggatcggggtgggcatcgtctgcggctttatcaacggcttcctgatcacccgcaccggcattccgccgttcatcgccacgctggggatgatggtgtcggcgcgcggcctggcgcagtactacaccaagggcaacccggtcagcttcctgtcggacggcttcacgtcgatcggccagggcgcaatgccggtgatcatcttcctggtgattgcggtgatcttccatatcgcactcaagcacacccgctacggcaaatacatctacgccatcggcggcaacatgacctcggcgcgggtttccggcatcaacgtcaataagtacctggtgacggtttacaccatcgccggcggcctggcggggttggcgggcgtggtgctggcggcgcgcgtcagcagcggccagtcgagcatggggatgtcgtacgagctggacgccatcgccgcggcagtgatcggcggcagcagcctgatgggcggcgtcgggcgcatcaccggcacgctgatcggcgcggtgatactcggccttatcaaaagcggcttcacctttatcggcgtcgactcttacattcaggacatcatcaagggcgtgattatcgtcgccgccgtgtcgatcgacatgcggcgcaaccgcaaaaaacactga

SEQ ID NO: 422829 - DNA, 921 bp, Serratia marcescens
atgaactacctgaaagggctgtggctggcggtggcgctgtgcgcgtctaccccggcatgggcgcaaaccatcggcgtgtcgatggcctatttcgaccagaacttcctcaccatcatccgccaggcgatcgacaaggaggccaaggcgcgcggcatcaccgtgcagttcgaggacgcgcgcggcgacgtcggccgccagaccgatcaggtgcagagctttatcagcgccggggtggacgcgattatcgtcgatccggtcaactcggccagcacgccggtgatgaccaaaatggtgcaggccgccggcgtgccgctggtgtacgtgaaccgcacgccgggcgataccaaactgccgcagggcgtggtgttcgtcggctccgacgagcgggaatccggcacgctgcagatggaagagctggcgcggctggccggctatcagggcaacgtggcggtgatgatcggcaacctgaccgacgccggcgcgctgcagcgcaccaaagacgtggagcaggtggtgagcaagtacccgaaaatgaaggtggtgcagaagcagagcgccaactattcacgcagtgaaggtatggatctgatgatgaactggctgaccaacggcgaagcgatcgacatcgtcgccgccaacaacgacgaaatggcgatcggcgcaatcatggcgctgcagcaggcgggcaaggcggacaggaaagtgctgatcggcggcatcgacgccacgccggacggcctcaaggcgctggcctccggcaagatgcaggtcactgtgttccaggacgcggtcggccagggcaaagcctcggtcgatgtggcgcagcgcatgatcaacggggaaaaactcgaaccgtattactggatcccgttcgagctggtgacgccggccacgatgcagaagtatgcggccaggccgtga

SEQ ID NO: 422830 - DNA, 765 bp, Serratia marcescens
atgaatgcattaaacggcaaggtggcggtgatcggcggcgccagttcggggatcggcaaagcggcggcgctgctgttcgcccgccagggggctgcgctggtgttgggcgcgcggcgcgagccgctgttggcggagctggtggaggacattcggcgcgagggcggccgggcgcttgcggtggcgggcgacgtgcgtgacgaagccttcgccgaacggctgacggcgacggcggtcgacgaattcggcgggctggatatcgccttcaacaacgccggcaccttggggccgctggggccgtcgctggcgttgagtgcctcagagtggcgcgaggtgctggaaaccaacctgtccagcgcctactacggcgccaaatatcaaatccccgccatgctggcgcgcggcgcgggctcggtgattttcacctccaccttcgtcggccacaccgcagcgtttcccggtacggcggcctatgcggccggcaagtcggggctgatcggcctgacgcaggcgctggcggtggaattcggaggacgcggcattcgggtgaacgcgctgctgccgggcggcaccgatacggcaatggggcggcagatgagccataccccggaggcattggcgcaggtggccgaactgcacgcgctgaagcggttggcgatgccggaggagatcgcgcaggcggcgctgtatctggcgtctgacgctgcttcattcgtcaccggcaccgcgatgctggtggacggcggcgcgtccatccagcgcggctga

SEQ ID NO: 422831 - DNA, 1191 bp, Serratia marcescens
atgtacgacgcgatcgttatcggtgccggcctggtggggctcggcgtggtgaatgcgctgcaggaagcggatccgcagcggcgcattctgatcctggaaaaagagcgcggcccggcggcgcaccaaagcggccacaacagcaacgtggtgcattccggcatctactacacgcccggcagcctgaaagcgcagttggcaaaacagggcaaccgcagcatgttcgccttctgccgcgaacacgacctgtatcacgaccaatgcggcaaggtgattgtcgccacccagctaaacgaactggatcggctggagaacatctatcagcgcggcctgcaaaacggcctgcaggtcacccggctgtcgcaggcgcagctgcgggagcgcgaaccgcacgtcaatggccttgaagcgctgctggtgcccgacgccggtatcgtcaactacgcggaggtggccgccaagctggcggagatcatcgtgcggcgcggcggcgagattgcctacggccatcaggttgaggccatccgcgaacacgccggcggcgtcaccgtcaccgccgccggcgacaccttcgagggaaaactgctgatcaactgcgcggggctgttcagcgatcgtatcgccaaactggccggttacgaaacaggcatgaagatcgtgccgttccgcggtgaatactatgtgctggacgacgcgaaaaaccacctggtcaaccatctgatctacccggtgcccaacccggatttccctttcctcggcgtgcattttacccgtatgtataacggcaagcgcgacgtcggccccaatgcggtgctggccttcaaacgcgaaggctaccgcaaatgcgacttcagcctgcgcgatctgagcgaggtgctcggctatcgcggtttttggaaaatcgccggcaactacctcggcgaagggctggcggaaatgcgccgttcgctgtcgcgccgccgctttgccgagaacgcccgtcggctgatcccggcgctgcaggagcaggatattcgccccggcccggccggcgtgcgcgcccaggcgctgaccgccgacggcaagctggtggacgacttccacttcgtgcagggccaacgctcgctgcacgtatgcaatgccccctctccggcggcgaccgcctcgctggagatcggccgcgagatcgtgcgccgccacctgtccgctttctga

SEQ ID NO: 422832 - DNA, 720 bp, Serratia marcescens
atgatccgcaaggtcacgcgccagaaagcctctcatcaggtgctggcgcagctgaaagccggcatcaacgacggcacctttccggtcggcgagaagctgccgtcggaaaacgtgttggcggacgcgttcggcgtcagccgggtgccggtgcgcgaggcgctcggcgtgctggaggtcagcggcatcatctcctcacgccagggcggcggccaccgggtggaacagcattcgctgctgagcaaatacgaaccgctggtgatggaggtagccgaccgccgcgaggtggaagcgctgctggaaatgcgcgaagtcatggaacagcaggcggcgcgcatggccgccgaacgccgcaccgaacaggagttgcaggcgatcgaacaggcgcacctcgcctttcgtgactgtacgctgaacgacggccagatcggctatcggcaggactacctgttccaccgcgccatcatgcaggctgcgcataacccgtttttcgtgcagatcctcgataacatgcacgagctgtatctgggggtgctggtgtactcgctcagcaaaaacctagggcggcaagccgagcgccagcgggtgatcgacgaacatgagcgggtatttatcgccattcgcgacggcgatgcggcggcggccaccgccgccatgcaaagccatctgaacaacgtacgcggcaaattacgccgcctggaaaacgaggagcaagagccgtga

SEQ ID NO: 422833 - DNA, 1956 bp, Serratia marcescens
atgagcactcacccttcttcaccgcagcccgccgtcgatctggacaaggaagccggcgccggcaaccggccgctgagcggcatctatttgcagctggcaaccgtcctggcgatcgccatttccgcctatgccatctacgccaacgcgctgtccaacacgcaggagttctaccgcaacaccacgttcctgagcggcattctgatcctgggctttatcctgttccccttctcggcccggcacgccacccgcagtttcaaccgctgggactatctgttcatcatcctgacgctggtcagctacggctatttctacgttaactacgtcgatctgcacgtggtgcgcaagagcatccccaacgccaccgattatgtgatggcggcgatcggtatcggcgtgctgttcgaagccgcgcggcgcaccaccggctatttcatccccggcctggcgactttcgccatcctctatgcgctgttcgggcagtacttcatgggcattttcggccacgggggcttctcggtggaacgcctgctgtatcggctgttcatgaccagcgaggggattttcggcatcaccctgtccaccgcctccaccgccatcgtggtgtttattctgttcggcgcctttctcagcgtcagcggcgcaaccgcgctgttcaacgatctggcgctggccgccgccggacgccgccgcggcggtccggctcaggtggcggtgatctcgtcggcactgaccggctcattgagcggcagcgcggtggccaacgtcgccaccaccggcaccttcaccattccgctgatgaaaagcatcgggctgtcgtcccgcttcgccggcgccgtggaagccaccgcctccaccggcggcatgatcatgccccccatcatgggcgcggcggcgtttatcatggccggcttcctcggcatctcatacgccaccatcgtcatcgccgccatcgtgccggcgctgctctattacgccgcgctgatcatggccatcgatctggaggccaagaaacagggcctgaagggcatcaacaaggagaacatccctcaggtgcgcgcggtgctgaaggcgcgcgggctgttgctgctgccgctcgtcatcgtcatcggcacgctgctgctgggcaaaacgccaatctatgccggcttcctcggcatcattgccatcatcgtcgccagctggctcacccccgacagttcggtgcgcatgacgccgaaaaaaatcgcgctggccttgaacgacgcggcgcgcggctcgatccaggtcaccatcgcctgcgccgccatcggcgtgatcatctgcgtggtgaccatgaccggcatcggctccacgctggcattcaacatcgtcgccatgaccgacaacaccctgtggatgatcctgctggtggtgatgctggtgtgcatcgtgctcagcatggggctaccctccaccgcgctctacatcgtggtggcggtgaccgtgtcgccgatcctgatcaaagccggcgtgctgccgctggcggcgcatttcttcgtgttctggttcggcgcgttgtccaacatcacgccgccggtggcgctggccagctacaccgccgccagcatcgcccgcgccgatccgatgcaaacctcgtgggacgcggtgcgcctggcgctgccgggttttatcatcccgttcattctggtctacaacccgatgctgttgatgcagggcgacgatctcaacccgctgtcggtgctgcatatggtgatcagcgcgctggtggggatctacgccctgtcgatcgccagcgccaatttctggctgatgaagaccctctggctggagcgggtgctgtttaccgcggcggcgattttactgatcaaaccgggcctgatgaccgatctgggcggcgcggccctgatcgccgccgccgccgccatgcacctgctgcgctataaacagcgcgccgcgctgccgggaggcgcgtcatga

SEQ ID NO: 422834 - DNA, 1035 bp, Serratia marcescens
atgaaaaatagaaaaatcaaagcgttgcttgttacctgcgccgtggtcggcgccgcgttgctggccatcgccggtaaagcggaaaacgccgataaaaccttcctctccgtcgccaccgcctccaccggcggcacctactacccgatgggcgtcgggttggccaacgtctggagcaaccggctgaaacgccaggggatacaggtcaccggccaatcctccgccggttcgatcgagaatatcgacctgctgcaaaaagacgaggcgcagctggcgattttgcagagcctgatcgccgtcgaagcctatcagggcgtgcgcaacttcgacggccgcgcctacggcgatctgcgctccatctccatgctgtggcccaacgtcgaacacttcgtgatgctggaaagccgggtgaaagacggcacgctgaacgatatcgctggcacgcgcttttccgtcgggccgcaggccagcggcaccgaacagtcgacgatgatcatcctgcagggtgttaacctgaccaaaaagtcgctgtcggcggaatacctcggctacggcgatacggtttccgcaatgcgcgacgggcgcctggacggcggcgccctgcccgccggggtgccggccgccgccgtcaccgacatgtatgccagtggcgtgccggcacgcatcctggaagtcaccgacgaacagctggccagcatcaacgccatcgccaattcctggttccgcttcgacatcaaggcggagacctacccgcgccagcccaaggcggtcgccaccatcgcgcagcccaatattctggtggccctcagccggctcgatgaaaagctggtgtacgacctaaccaaaacgatgttcgagaacctgccggaagtgcaccaggtgcatagctcggccaaatacatctcgctggagaatgcgctgaaaggcgtttccgtgccgctgcacctcggcgcctatcgctactaccgcgaagccggcgtcgagatacccgattatctgatcccgccggaagccgccgcgctggccgccaacccctaa

SEQ ID NO: 422835 - DNA, 816 bp, Serratia marcescens
atgacatttacgctgaaaaacctcaccctggcgctggccgccgccggcacgctgctgctgaccgcctgtggcccgacggcacaggacgatcaccacatcaaggtcggcatcagcgccggcatcgatcagtcgctgtgggcggtggtgcaaaaggtcgccaagcagaaatacgatctggacgtggaggtggtgaccttcaacgactacgtgctgccaaacgaagcgctgaataacggcgatctggacgtcaacgccttccagcacaagccgtatctcgacaagcagatgcaggaacgcggctacaagctggcggctgtaggcaacaccttcgtctacccgatcgccggctattcgaagaagataaccgcactcagccagctgccggacggcgcgcaggtggcggtgccgaacgatccgaccaacctgggccgctcgctgctgctattgcaaaaacaggggctgatcactctgaaagacggcgtcggtctgctgccgaccgcgctggacatcgtcggcaacccgaaaaagctgaagatcgtcgagattgaagcgccgcagctgccgcgcgcgctggacgatcagaaagtgacgctggcgatcatcaacaccaactattccagccagatcggcctgtcgccggccaaggacgggctgtttgtcgaagacaaaaactcgccgtacgtcaacatcttcgccagccgcatcgacaacaaagacagcgagaaagtgaaggatctggtcaaggcctatcagaccgatgaagtggcagccagcgccgccgatatctacaagggcgacgccgtcaaaggctggtaa

SEQ ID NO: 422836 - DNA, 519 bp, Serratia marcescens
atgcgattgaacacttggagcaaggcgctgctgccgctggtggtgttggcctgcgtctcggcgactcaggttcgggcggcggagagcgataccgggccgatccccaaacagctgctgggcaactggcgcgtcagtaaaattgtgccgactcagaccaccggctgctgggatcaacagcaggcgcagagcctgatcggcggtaaaatcagctataaggcggatgcattcagctggaacggcacggcgctgaaaagcgaaggcgccaccgtcagcaccgtagaagcgcaggagttcgtcgaggacaattccggcagcagttcctacatcgatttcccgatgctgggcatcagcacgccgtcggtcgagcgcgtggccattcagcacgcggataccgtcatcaaaggcattaccgatcagggcaccgatggggtgcccggcgataacgtgctggtgaaagacgccaacacgctgatcctgtcgctgtgcaacgtctggtttgaggcgcagcgcgaaaagtaa

SEQ ID NO: 422837 - DNA, 426 bp, Serratia marcescens
atgtgttaccaccatattgtcatcgccaccgatctgagcgatgacggcaaacgattggtcgaaaagggggcgctgttagcggaggcgctgaaggccaaactctcgctgatctatgtggacgtccactacgacacttaccatgcggcaatcggcttttcggagcacagctatgagggcgcgtcgttcgaagagaagatccgcaaagagctggaacccaccacgcaaaacgtcaattatccgatcacggaagtgattatcgggcgcggcggctttgttgacgaactgcgcacggcagtggtggacaagaatatcgatctgctggtgttcggccaccaccacgatttgtggagcaacctgttttcttccacccgcaacgccatcaaccagctgaatatcgacgtgctggtgatcccgatccgctcataa

SEQ ID NO: 422838 - DNA, 2376 bp, Serratia marcescens
atgaacatgactcccctgaccccgctggccactgccctcaccctcgcgctgacgctgacgggctgcgcgccgaaaacgcccgacgccgacgccccgttggccgagcgctataaaaacgtcatcgaccgccgcggcgcgccgcactttatgctcgattatgatttcgacgatcaccagcgcttcaatccgttcttcgatctcggcgcctggcacggccacctgttgccgagcgggccggaaggcatgggcggtttccccggcccggcgctgctgacggaagagtacatcaactttatggccaacaatttcgatcggctcagcgtctatcgaaacggtaaaccggtgcatttcaccatgacggcctacagcctgcccggtgccctggtgcagcggctcagcgcgccgggcgtggccgtcaacctgacgctgcgcttcgctggcgcgcgcacctcgctgctggaaacccaaatcctgaccgacacgccgctggagctggtgtgggacggtgaattgctggagcgctacgcggccaaagagcaaaaaccgcagccgccggcgaccctcgagcaggcatttcctgactacacgcgccgcattgtgccaacggctgacggcctgcgcgtcaccttcggcaaagtgcgcgcgccgtcgcagctgatgacctccggccagtccgagtatcagatccacaaatcgctgccgcagcgcaccacggtcgacggccatcgcttccgcgccacggcgcgcatcgccggctccaccaccctgtacaccacctactcgcacctgcttaccgccgaagaagcgcggcgcgaacaacgcgccatcgccgacatcctcgctcacccgcagcgctatatggccgcgtcggcccagcgttgggaacgctatctcgccacagggctcagcaacccgcacgccacggcggaacaaacccgcgtggcggtcaaagcgatggaaacgctcaacggcaactggcgcggcgccgccggggcgatgaagttcgactcggtcaccccctcggtgaccggacgctggttctccggcaaccagacctggccgtgggacacctggaaacaggcctacgccatggcgcacttcaacccggacgtggccaaggacaacatccgcgcggtgttcgccttccagatccggccgggcgatgccctgcgcccgtgggacgccggtttcctgcccgaccttatcgcctacaaccccagcccggagcgcggcggcgacggcggtaactggaacgagcgcaacaccaagccgagcctggcggcctgggcggtgatggaggtgtatcgcgtcaccggcgataagggctggctggcggagatgtacccgaagctggtggcctaccatgactggtggctgcgcaaccgtgaccacaacggcaacggcgtgccggagtacggcgcaacccgcgacaaagcgcacaatacccccgacggacgcatgttgttcaccgtcaaacgcgggcagcgcgagcaaacgctggccggcctcgacaattacgatcgcatcgtgcgcgaggggcagtacgacagcatcgagatcccggcgcagaccgccgcctcctgggagtcgggccgcgacgacgcggcggtattcggctttatcgatccggatcaattggcgcgctacctggcgcagggcggcaaacgcgaagactggcaggtgaaattcgccgaaaaccgagcgccggacggcacgttgctcggctattcgctgctgcaggagtcggtggatcaggccagctacatgtacagcgacaaccgctatctggcggagatggccgatattctcggccacggcgccgaggccgccgccttccgcgccaaagccgaccggctggcggcctacatcaacacctgcatgttcgacaagcacagcggtttcttctatgacatccgcatcgaaaagcggccgttggccaacggctgcgccggcaaaccgatcgtcgaacgcggcaaagggccggaaggctggtcgccgctgttcaacggcgccgccagccagccgcacgccgatgcggtggtcagggtgatgaaggatccgcgcgagttcaatacctacgtgccgctcggtaccgcggcgctgaccaatccggcgttcggcgcggacatctactggcgcggccgcgtgtgggtcgatcagttgtatttcggcctcaagggcatggaacgctacggctatcgcgacgatgcggtggcgatggcgcaggctttcttccgccacgccgacggcctggtcgccgacgggccgatccgcgagaactacaacccgctcaccggcaagcaacagggcgcgccgaacttctcctggagcgcggcgcacctgtacatgctgtataacgacttcttcacgcaataa

SEQ ID NO: 422839 - DNA, 1071 bp, Serratia marcescens
atgaaatcactaagccatcacgccctgttgcccttgttgctgctcgttaacgcgcccgcctgggcggcgcaggaatcggtgaccccggcggagcgcaatcagctcccaccgccgccgctacccgatagcgccgcgaccgtcctgcgtttttacggcgagctcggcatcggcggcagcgtctatttgaacggcgaacatcagcataaatacagcgacggcacctatatcgaaggcggcctggagatcaaacggggccactggttcggcctgatttacggcgaaggctggaccgtgcaggcggacagccagggccacgcctggacgccgggccacggttggggcggcttcgagggcgggttgaaccgcttttacggcggttaccgcaccgacgacggcaccgagatgatgctcagcgtgcgcaacgactcgtcgctcgacgacctgcaatggtggggcgacttcacgccggaatacggctacgtgatccccaacacccgcgatctcagctacgccgccaagctgcaaaacctgaccgggcgctttcgctacagcgtgacggcggcgccggaaagccgcatcgacgagagcaaggcgctgctgcacttcggcaaatacgatcgctattccgacaagtacacctatcgggcgatgatcaacggctacacccagtacgacctgcaggacaatctgacgctgctgaacggcctggaagtgaccgacggcctggggcagctgtttttgctggggctgcgcggccaacacctggccggccgcgtctggcaccacaccggcaaaggcgacagcggcggccattccggcagcgagtcgggcctgatgctcagcgcgatgacggaaactgccaaagggctgtatctctccaccgcctacagctacgcccgccaccggtttgataatgcggcggatactgccacctcatacgcccagtgcggcgtctggtatgaatacgccggcggcaagctggccaccgcgctggacagcaaattcttcatgcgcaacgacagcaccggcgccagcaactcggtgttcctgatgcaatatttctattggtaa

SEQ ID NO: 422840 - DNA, 981 bp, Serratia marcescens
atggccacactgaaggaaattgctgaagccgctaatgtgtccgtcgccaccgtttcgcgcgtgttgaatgacgaccccaccctgagcgtgaaggcgcaaacccgccagaagatcctggaagcggcggaacgcctcgaatacaagatcgcgccttccaaacggcaaagcgggcaacgcctgcatttcgccgcgctgttcacctatacgcagggcgtggagatcaacgatccctattacctggcgatgcgctacggcatcgagacgcagtgcgaaaagctgggcgtggcgctgagcgccggttacgactgcaacggcgacaaggcgctgccggcggccgacggcctgctggtgatcggccggccacagcccgcgctgtatgagcagctcaggcagcaggaaacgccggtggtgttcatcgacggcgtggtggaggatgagcggttcgactgcgtcaatgtcgacctgtacaagatcagccgcaaggtgatcgactacttcatcggccgcggctatcagcgcatcggctttatcggcgggcgcgaccatccggccggcatcgaccagcgcgagcaggcattcgtcgagtatggccggcagcaaaatgtggtgcgagcgcaggacatttaccacggcgatttcagcagccagtcgggctaccagtgcgcgaaagcgatgttgcagagccagaatggctatccgccggcgctgctggtggcgaccgattcgatcgcgatcggcgtgctgcgcgcgctgcacgaacacggcattcaggtgccggggcagatcgcgctgatcagcgtcaacgacattcccaccgcccgctttattttccccgccttgtccacggtgcgcatcccttcggaaaccatgggcgcacaggccgtcaacctgctgacggagcggctgcgcgatgagcgcaccgtcccgctgtcgatcttcgttcccagctcgctgcagctgcgcgacaccaccgtcgcctga

SEQ ID NO: 422841 - DNA, 3090 bp, Serratia marcescens
gtgaataattgggaaaacattgaaaaacagtcggagcaccggttggcgccgcgcgcgagcttcttcagctacgcggacgccgggcaggcgctgagcttcgatcgcaacgccagccggcgtttccaactgctgagtggccgctggcgctttcgcttcttcgagcacccggcgcaggtgccggcggcattttaccgggagccgatgaacgactggggcgatatggcggtgccgggcatgtggcagctggaagggcacggccacctgcagtacaccgatgagggcttcccgttcccgatcgacgtgccttacgtgccgaccaataaccccaccggcgcctatcaacgccactttacgctcgacgccggctggcaggatcagcaagtgctgatcaaattcgacggcgtggaaacctacttcgaggtgtacgtcaacggcgactatgtcggcttcagcaagggcagccggctgtgcgccgagttcgacatcagcccctatgtgcggcagggcgagaacctgctgtcggtgcgggtgatgcagtgggccgactccacctacatcgaagatcaggacatgtggtggatggccggcattttccgcgacgtctatctgatcggccagagcgctacccaccttcacgatctgacgctggtcaccaccttcgatgagcgctattgcgacgcgcagttggcgatcgatgccgagctgcgccatctcggtgtgcaggccgccgagggctgccgcctgcaggcgcagctgttcgacggcgatcgctgcgtggcggagcagtggcacgacgatctgcgcgtcgagcgggcgctgaactgccgtttcgaactgccggtcagctgcccgcagcagtggaatgcggaaaatccctatctgtatcagctgttgctcagcctgtatgacggcgccggcaacctgctgggcgtggtgccgcagcgggtggggttccgcgagattgcggtgcgcgacgggctgatgtacgtcaacggccgctacctcaagctgcacggcgtcaaccggcacgatcacgatcaccgcaaagggcgcgccgttgatatggcgcgggtggagcgcgacatcgtgctgatgaaacagcacaacatcaactcggtgcgcaccgcccattaccccaacgatccgcgcttttacgagctgtgcgatctctatggcctgtttgtgatggcggagaccgatttggagagccacggcttcgccaacgtcggcgatctgagccgcatcaccgacgatccgcgctgggagcaggcctacgtcgagcgcatcgaacgccacgtggcggcgcagaaaaatcacccgtcgatcattatctggtcgctgggcaacgagtccggctacggctgcaacattcgcgccatggcccggcgctgcaaggcgctcgatccgacccgtctaatccactatgaagaagatcgcgacgccgaagtgaccgacgtgatcagcaccatgtattcccgcgtggcgatgatgaacgccttcggcgaatacccgcaccccaaaccgcgcatcctgtgcgaatacgcccacgcgatgggcaacggccccggcgggctgttcgaataccagtcggtgttcaaccgccacgccagtttgcaggggcactacatctgggagtggtgcgatcacggcctgctgagccacgacgaacaggggcgcgagcgctaccagtacggcggcgattacggcgactatccgaacaactacaacttctgcatggacggcctgatctacccggaccagcgccccggccccggcctgcgggaataccagcaggtgctgtgcccggtggaggtgacggcggaggaaggcgcaggcgacgtgctgcgggtgaaaaaccgctattggttcagctcgctggcggacatcacgctgaaggtcagcgtcaagaccgacggccgccaggtggcgagttacgaattcaagctgccgcatctgcagccgggcgagagcgaagacatgcacctgccggtgttggcgctggggcagggggaaacgctgatcgacgtggcggtgcataaggacagcgccacccgctacagcgagagcgaccagcggctggggcattatcagcatctgcgccgggcggcgacgcggcgaccggctccaccacaggccgatgcgccggcgctgcaatgccgcgaggaaaatcatcggctgatcgtcagcggcggccggttccagctggcgttctcgctgctgagcggcgaactgctgtcgtggcgggtagacgatgaggacgtggtggggcgcgcgccgcgcatcaccttcttcaaaccggtgatcgataaccataaacaggaatatgaggggatttggctgccgcatcacttccccatcatgcagcagcacttccgccgcctcaatcggcaatggcagggcgaggatctgctgatcgaggtacacagcctgatcgcgccgccggtgttcgacttcggcatgcgctgcacctaccgctggcgcatctccccgcagggctacgtcagcctggatctggccggtgagccttacggcgatttccgccagattatcccgaaaatcggcctcgatttcggcatcagccgcagcttcgagcaggtggaatactacggccgcgggccgggcgagaactaccgtgacagctgccgggccaacctgatcggccactaccggcagcgcgccgacgcgctgttcgaacactatccgttcccgcaggacaacggcaaccggcaggacgtgcgctggctgagcctgcaggacgcggcgggcaaggggatcttcatccagccgcggcggccgatcaatttcagcctgtggccctacagcgccgagatgctgcaccaggcccagcacatcaacgagctggaaccgagcgactgcctgacgctgaacctggacgaccagatcctcggcctcggctccaactcctggggctccgaagtgctggatacccaccgggtctatctggcgccgttcagctacggtttcacgctggtgccgttcgacgggcggcaaacgcagggcgccgcgctcgccggttatgacttcgcgcccgctcaccatcacccgcagtctgcggaggaaaacgcatga

SEQ ID NO: 422842 - DNA, 453 bp, Serratia marcescens
atgatcattctcgaatccctggcggagttccagcgcatctatcacagcggcaagaagtggctgcgctgcatggaggcgatcgccaatgtcgatcgcatcagcccgaacgtgtgccattcgatcggcgactcgctgacgtatcggctgagcgtcggcgccggccgccagcacggttggctggagggcaatcgccgttacttcgatgtgcactattaccttgagggggaagagaccgtcgaggtcgccgacaaacggtcgctgacgacggtggcgccctatcaggacgaaaccgaccgtgagtttttcagcggcgaaggcgagaggcgccgggtcggcaaaggcaacgtggcgatcttcgaaaatcaccaggctcaccgcttcacagaaagcggcaaggtaaaaaaagtcattttaaaagtgacggtggaagacagctattttgttaacaaatag

SEQ ID NO: 422843 - DNA, 1503 bp, Serratia marcescens
atggctgcgtcgaacagaaacaccatcggcaagtttggcctgctgtcgatgacgtttgcggcagtgttcagtttcaacaacgtgattaacaataatattcagctcggggtcgcctcgtcgccggtgttcctggtggcgaccatcatttacttcattcccttttgcctaatcatcgccgagttcgtctcgctcaaccgcaactccgaggccggcgtttatgcctgggtgaaaagcgcgctcggcgggcgctgggcgtttatcaccgcctacacctattggttcgtgaacctgttcttcttcaccgcgctgctgccgcgcgtcatcgcctacgcttcttacgcgttcctgggctatgactacgtgtttaccccgctgaccacggcgatcatcagcatcttcctgttcgccttctcgacctacatctccaacagcggcgcaaaactgctggggccgatgacctcggtgacctcgtcgctgatgctgctgctgacgttttcctacatcgttctggcgggcgcggcggtgctgggcggcattgagccggccgacccgatcaacgtgcaggcgatgacgccgaacttcaactgggcgttcctcggcattaccgcctggatcttccaggcggcgggcggggcggagtccgtagcggtgtacgtgaacgatgtgaaaggcggcagccgcgccttcgtgaaggtgatcatcgtttccgggctgttcatcggcgtgctgtattcggtgtcttcgctgctgatcaacgtgttcgtgcaccgcgctgacctgcatttcaccggcggcacggtgcaggtgttcgaaggcctgtcggcgcacttcggcctgccgacggtgctgatgaaccgctttgtcggcattgtctctttcaccgccatgttcggctcgctgctgatgtggacggcggcgccggtgaagattttcttcaccgagatcccgaagggcattttcggcgagaaaaccattcgtttgaatcggcacggcgtgccgacgcgcgccgcctggatccagttcttcatcgtcatcccgctgatgctgatcccgacgttgggttccagcagcgtgcaggatttgatgaacacgctgatcaatatgaccgccgccgcctcgatgctgccgccgctgttcatcatgctggcctatctgaatctgcgcctgaagtacgaccgggtggcgcgcgatttcaaaatgggctcgcgcctgcagggcatcgccatcgtcagcgtgctgatcgccatcttcaccgtcggcttcttcgcctcgacgttcccgaccggcgccagcgtcatgaccatcgtgttctataacgtcggcgggctggtggtgttcctcggctacgcctggtggaagtacaaccgctacgcgaaaagcctgagcgccgaggcgcgctaccacgaagacatgccgttggcgcgcctcgcgctcgaagcgcaggaaggggcgcaggccgggcaatccgcgctgaccacgcccgtttgcaataaaccgctgtaa

SEQ ID NO: 422844 - DNA, 315 bp, Serratia marcescens
atgaacgaaaatgacatcttcaaggcgctggccgatccgactcgccgcaccatcttcgacaagctcgccctcggcagtatgaacgccagcgcgctgcgcgaagggctgcccatcagccagtccgcgatgtcgcaacacctggcggtgctgcgcaatgccgggctggtgcgcgagacgaagcaggggcgcttcgtcaattaccaggtcgacccggaagggctggcgcagatcgccgattggctggcgaagtatcgcgcctggtggccggcgcgcatcgacgcgttgcaaaccttgctgaaggacatggatcaatga

SEQ ID NO: 422845 - DNA, 330 bp, Serratia marcescens
atgaacaaacgggctgagcagccgccgcgcgatcggctgatattggagtattcgctcgatgcgccgccggaaaaagtgtggcgagcgctcagcattcccgagctgcgcgagcagtggctgcctccgggggatttggcgcaggccgaaccgctggccgccacgccgggcgaagcggtgagctaccgtctgcgtgacgaccggccgccgttccttgaaagcgtggtgacgctgcagatagtgccggacgccgctggcggcagcctgctgcggattatccaccagctcgacgccgccaatgacggttcggtgacgatgatgctcgccgcctga

SEQ ID NO: 422846 - DNA, 594 bp, Serratia marcescens
atgcgtgagaagatgatgctcgtcccgatggtggtggaacagaccagccggggagaacgttcctttgatatttattcgcgcctgctgcgcgaccggatcgttttcctcaatggcgaagtcaacgacgacgtagccgaaatgctgtgcgcccaactgctgtttctggaagcggaaaacccggagaaaccgatccacctgtacatcaactcgccgggcggggtgatcaccagcgggctggcgatttacgacaccatgcagtatatccgcgcgccggtgcatacgctgtgcatgggcaccgcgcgctcgatgggctcgttcctgctgatggccggcgagccgggccaccgcatggcgctgcccaacgccagcctgcatgtgcaccagccgctgggcggctttcaggggcaggcctccgacatcttgattcatgccgaagagatgaaacgcaccaaagacacggtgatccggctgtacgccaaacattgcggcctcagctacgaagaggtggaacgggtgttggatcgcgatcgctttatgaccgccgacgaagcggcggcctgggggttgatcgatcgggtgctgcgggaaaggtaa

SEQ ID NO: 422847 - DNA, 867 bp, Serratia marcescens
atgagtctaagcagattccagctacagtttcacctggagaaacaggccaacaacatcaggcagtcaccggcatttcataccgccatcgtcaaacacggggaattattgaaggagacctacaagaaacatccgctgttttacaaaatcatcttcaggaacagccggttcatcatttgttccaccatcctgtccatttactaccaccagcccgccgccgggctgaaagacatcaaagccttttttaaagggaagaacatcatcagcgagaactccctggactcctttctgttctttttgcgggtcggccgccggctggaggtcaaaccctgtgaacatgacaagcgccagctgcgctataaacctacgccgcacgcgctggcggaaacccaggcgctgatcgcctcgatggcgcggccctaccaggcgctggcgccacagatgcctatcgcggcgctgctggcggcgcccgactttctgcccacctttttcgccgcctacgggcagctgatgctcaaggagatttacctgatcgatctggtgccgcaatccgggctgtttatcagcaaggacgccggccacatggtgctgctgatgctgcatatcgaaagcatccggcaggactccccctttctgctgctctcctcggcgaaaatcgccaagtcgtgctccgtctcacgcgcgcacgtgaatcgcattctgcaggcggcggaaaaatccggtctgctgaccaccaccaataacgtggtgatcgaactcaacagttcgttctttatcatggcggagcgctatttcagcctctatttcgcgatggtcgaattcgggcttgaacgggtttggcacacgccgcaggccgccgagccccgctga

SEQ ID NO: 422848 - DNA, 750 bp, Serratia marcescens
atgagaaagaaatatctgacgatcggatgcgccctgctgctggcgctggcggccatgggcgcgcaggcaggcatcatcgcctccgccacccgggtgattttccgcgagggcgacacggaaaaaaccctgatgttgctcaacaccaacggctatccgatcgtggcgcaaacctgggtcgataacggcgacgtcaacgccgcccccgagctgtcgcgcgcgccgtttgtcaccctgcccagcgtattcgccctgccgccttcggcgctgaaagggctgcggatcctgtttgccggcgcgaacctgcccaccgaccgggagtcggtgttctggcttaatctgtatgagatcccgcccagccagccgaccaggccgccgctgacgtcgcgcgtgacgctggcgatgaacacgcagatgaaaatcttctaccgccccaaagcgctaaagggaaacgccgaaaacgcggccgaggccgtctcgttctcgctgcaaaaatcgccgggcggctatctgctgcgctgtcacaaccgttcggcgttttatctctccttcgcccgcatcgccgtgcaaaccggcaggcgcgattacccggtgcggcaagaaagcgacatgatgaccgcaccgttcagcatgcgggattatcacctcgacggcgttgcggcgccgacgctcccttctcagatcaccgttcaggccaccttcatcaacgaccagggccagcagatcgtcaagtcatacacagcaaccccataa

SEQ ID NO: 422849 - DNA, 1341 bp, Serratia marcescens
atgaaacgcatttcttacccgatcgccgcccttgctctgctcgccctgtcgctgtgcggcgcgcccgccgcgctggcgcaatgcacccgggtcgccccctggatcgattccggttgcgatccctgcggggtgggcacggcgctgggccgggttaacctgaccagcacttacctgcagcccgtcggcacgccgctgggcaccagcgtgttcgatctcacctccggcacgcgctatcccgatcccaacaaagtgttgtatgagtgcgacgccggcgatgcggggcaaatctatgaagtcttcgccaccaacggcgacgatcgcgtcggcggctattacgatctgggcgcccaggacggtaaccccaactactacgccacctacttcccttacgtcggcatccgcctgacccatctggattccggcaaggtttttacccgctactggcagtcggcgccgattacccgctacgccaccgtcggcagcaaaattcagatccgggtgaaagacttcagcgccatccgcgccgatctgatccgcatcagctcgctgccgggcgcgggcgccagcaactactgcggctacagcgccagcaacccgctggtgggcatggcctcgaccaccggcaattcgaactatacctgcacgcagccgaacggctatgtcacctttcaggggcccggcatcgcctcggatcctatcggcagcgactccgccaccaactacgccacctggggcaccgggcgctggaacgcaatgggcatgggcaccgcaccaatctcctcattgacctataccgccacctgcgtggcgcgcaacgtcacgccgctggtgatcctgccgaccatatccgtcagccagttgaccgccgggcaaacctcacaggcgcagttcaccatcaatatcgaatgcgacaatgccgccgtgtccggcgtcagcagcaacaataccgccctcggcctgcaggtgccgtatgaaagctatgtcgcggcgcagcagctcgggctggtcagcgccaacggcggcgtgagctacctgctctccagcggctacggcaccgacagcagcgtcgccaccggcgtgggcatcgcgctcgccaacgccggcaacggcgcgccgatgaacttcgtcggctgggcgcgctgcagcgccgggcaatgcccgcagggcaacgacgccggctggtatccggtgctcaacggcgccagcggcggcggcagcaccgcggcggggttcacccactacaccacccagctcaccgccacgctcgcccggctgcccgggcaaacggtcaccgccggcaaagtggacgccagggcctacgtctgggttaaggtgcaatga

SEQ ID NO: 422850 - DNA, 2535 bp, Serratia marcescens
atgttcgatgctcgcaaggcggcgccgctgcccacacgctggtgttgcgcgctgctggcgctgccgctgggctgcgccgccgccgacggctataccttcgatcccgcgctgctgcgcggcagcgtgctgagcaacagcgccctgagccagttcaaccaacaggacgccgtcgctcccggcagctatcagatcgatctgtacctcaatggccagtttctcgaacgcgatcaaattcgcttcgtacgcgcaggcaagcaggtgctaccctgtttcgatcgggcgcagctgacgcgcttcgggttgaaaaatccgccgacggccgccgaagcggaatgcctgctgcccggccgggatctgaaggacatcacggtgaacgccgatatctcgcggctgcggctggatctgagcattccgcaggcgctgttgaacggccggccgcgcggcagcgtcaatcccgccagcctggacagcggcgaatcgatggccttcgtcaattacaacctcaaccagtaccacgtcagttaccgacaggggcaaacccgcgatctcgactcgacctacgccaacctgaacggcggcttcaacctcgggctatggcgctaccgccagcagtccagctaccgctacgatcgggagttcggcggccatctggacaccagccgccgctacgtgcagcgcgcgatcttgccctggcgcagcgaaatgctgttgggcgaaggctttaccgacgggcacttcttctccggcctgggctttcgcggcattcagctcagttcggacgaccgcatgctgccggattcgcagcgcggctatgcgccggtggtacgcggcgtggcgaaaagcaacgcgcgcgtgacggtgctgcagggcaaaagcacgctgtatgaaaccaccgtcgcgccggggccgttcgccatcaacgatctgtacgccaccaactacgccggcgatctcaccgtggtggtgacggaagccgacggcagcgtcagcaccttcaccgtgccattcgccgcggtgccggaatccatccgccccggccagtcgcgctactcggcgatcgtcggccgttcccgctacgtcggcgacaacgatctgttcagcgaggtgacctggcagcacggcctgaccaacgccctgaccttcaacctcggcaaccagctggcggacggctatcaggcgatgatgctgggcggcgtgtacagcagctggctgggcgccttcggcatggataccacctattcccacgccagcctgccggacggcggcgccgccggctggatgctgcacctctcttacagccgaaccttcagcccgacggacaccaccttgtccatcgccggctaccgctactccaccgaaggctttcgcgatctcagcgacgtgctcggcgtgcggcgcgccgccgccaccggccaaaactggcagtccgactcttaccgccagcggtcgcgtttcgaggtcgctgtcaatcagggaatgggcgcgttcggcagcctgacgatgtccggctcgactcaggactaccgcgatcagcgcggccgcgacaatcagctccagctgggctggggaaaaaccttcggcaacggcgtggcgcttaacctctccgtcacccgcacccgcagcctgggctacagcaacggcgactaccgcggctacgggccgctggataacgtctacagcgcgccgctggcgcagagcgcgcagaccgtcaccgccctgtcgctgagcttcccgctcgggcgttcatcatccgcccccagcgtctcgctgttggccaaccacagccagggccagggcggcaactatcaggccgcgctgtcgggcagcgtcggcgacgaacagccggtcagctacggcctgaacttcaccaccgacgacgatcgccaacaaagcatctggggcggcaacctgcaaacccgtctgccttacgccaacgtcaccggctcgttctccaccgcgcgccagtaccgacaaggttccctgtcactgcagggggcggtggtggcgcaccgcggcggcgtgacattagggccgtatgtcggcgataccttcgccctgatcgaggcgcccggcgccagcggcgcacgggtgatggacggccagggggcgcgcgtcgatcgctttggctacgcgctggcgccgtcgctggtgccctatcactacaacaccgtcgcactgaaccccgagggcatgaacgacaaagcggagctggaagacggccagcggcgcgtcgccccgtacgccggcgccacggtgcgcctgcgcttcaacaccgtgcgcggccaggcgctattgatcaccgcgcagcggcccgataacgcgccgatcccgatgggcgccaacgtcctcgacgcagcgggcaacagcgtgggcatggtcggccaggccaatcaggtgtatctgcgcagcgaccggaatgccggtgcgcttacgctgaactggggcgacgcgcccggccaacagtgcacgctgcattaccgcctgcccgccggggaagacggcccgattcaacggctcagcgccccgtgccgctag

SEQ ID NO: 422851 - DNA, 753 bp, Serratia marcescens
atgactcgctccctttatcggttcacgtttatgccgcagataacccgctccgcccgccgatgggccgccctgtcgctttgcctgatgagttttgccgctacccacgcctcggccagcgtgacgctgctcggcaaccgcgtgatctaccccgccgaggcgcgggaaaaaacgctgcagttcaccaacgacgacggcaccccggcgctgatgcagatctggctcgacatcaataatcccaaatccacgccggaaaacgccgatgcacctttcgtcgcctcgccgcagatcttccgcatgaatccgcacagcgggcagatggtgcggctgtcgttcgtcggccagccgctgccgcgcgatcgcgaatcgctgttctatctcaacttcctgcaggtgcccgccgtgcgccagacggacagcgacaagaacaaactgctgctggtggtcaccaatcggctgaaggtgttctatcgccccgccgggctggccggcgacgccaaccacgtcatcgatcggctcagcctgcgccaggccggcaacgcgctgcgcgtcgacaacccgaccggctactacgccaacgttagccaggccgcgatcctgagcggcgcgaagcgcatcgccatcccgcaggcggatctgatcccgcctttttcacaggccagttggccggtgaatggggaggtgcggcaggtcgcactgcgcgtcatcaatgactatggggtggaaatctcacgcaccctggacgtcgcgcgctga

SEQ ID NO: 422852 - DNA, 534 bp, Serratia marcescens
atgaatgttaaattagtcgcattatccatgctggctctctccggcgcctgtgcggccgcttcgtccaatacggtgcaatttaaaggcgaagtcagcacgcaaacctgctcggtgaatattaacggtaaccaatccaatccggtcgttctgctgccgaccgtcgccgccagcaaactcgccaccaaaggcgccaccaccggcgacaccaccttcaccgtcaacgtgaccggctgtgcggcggcaaccagcgatacggcgatcaaaaccgtgctggcgggcaacaacccgaccaccaacggcaacctgggcaacgcgggcgatgcggccaaggtgtccattcaactgctggacagcgacgccactacgccgctgtcgttcgccagcggttcgaccgtcaccacgtcggcgatgacgctggcgaaagacgccacctccacctcgcagaacctggtggctcgctactacgcggaagacaccggcgtggcggccggttcggtgatcgccaccgcacagttcgccattagctacaaataa

SEQ ID NO: 422853 - DNA, 579 bp, Serratia marcescens
gtgagagtgatttatatcgacggttcaccgctgtgccggctgggtatgaaaacattactgggcggcggcgtgataaccttatcctcacccaatatgaatattattaaaaatataattccggcgcctgatttaattattacggagtttcctcaggagatttaccggttcgaggcgtatttgaatttcattaaatattcacgtggtgaatataaagatgtccggttactgttctttatcgataagacttcgccgctgatcctggcgtttatcgccgcggcgcagccggatgcgattttgcacaaacgggaaacgctgcagatggtgcgggaaacctgcgcggcgctggtctgccgtgaggaggaaggtgagcggcgcgtgatgaactggcagcaggcggcggcaatcacgcctggcgaggcggcggtgctgtgtgaaaccgcgcgcacggaagatattcgcctgaccgcgcggcggttgaacctgcacccgaaaaccgtttattcgcacctcaataacgccggcaaaaagttcggcacccgcaatcgcgtggaactgctgaagatgattgcgctgctgtag

SEQ ID NO: 422854 - DNA, 1092 bp, Serratia marcescens
atgggattcaaatgcggtatcgtcggcctgcctaacgtaggcaaatccaccctgttcaacgcgttgaccaaagcgggcattgaagcagccaacttcccgttctgcaccattgaaccgaacaccggtgtggtgccgatgcccgatccgcgtctggataagctggccgagatcgtcaagccgcagcgcattctgccgaccaccatggaattcgtcgacatcgccggcctggtgaaaggcgcgtccaagggtgaaggcctgggcaaccagttcctgaccaacatccgcgaaaccgaagccatcggccacgtggtgcgctgcttcgagaacgacaacatcattcacgtcaacaacaaggtcgatccggccgaagacatcgacgtgatcaacaccgagctggcgctgtctgacctcgacacctgcgagcgcgccatccaccgcgtgcagaagaaagccaaaggcggcgacaaagacgccaaagccgagctggcggcgctggagaaatgcctgccgcacctggaaaacgccggcatgctgcgcgcgctggatctgagcgacgaagacaaagcggcgatcaaatacctgagcttcctgaccctgaagccgaccatgtacatcgccaacgtcaacgaagacggcttcgagaacaacccgtacctggacaccgtgcgtaaaatcgccgacgccgaaggctccgtggtggttgccgtgtgcgccgccgtggaatccgacatcgccgagctggaagacgaagagcgcgacgagttcatggccgagctgggcctggaagaaccgggcctgaaccgcgtgatccgcgccggttatgaactgctgaacctgcagacctacttcaccgccggcgtgaaagaagtgcgcgcctggaccatcccggtcggcgccaccgctccgcaggcggccggcaagatccacaccgacttcgaaaaaggctttatccgcgcgcaaaccatctcttatgacgacttcatcacctacaagggtgagcaaggcgccaaagaagccggcaaaatgcgctccgaaggtaaagactacatcgtcaaagacggcgacgtgatgaacttcctgttcaacgtctaa

SEQ ID NO: 422855 - DNA, 1530 bp, Serratia marcescens
atgtttaacctgagtaacgtcaggatcgcggacgttaaaaatgaagtcctggcgggctttgtggtggcggtttcgatgatccccgaggcggtcggcttttcgctggtcgccggtctttcgccgatcgtcggtttgcacaccgcgtttattatcggcctggtcacggcgctgttcggcggcaagccgggcatggtttccggcgccgccggctccattgtggtagtgctgatgagcctggcggcgcagtacggcatgggctacgtgctgtgggccacgctgtttgccgggggcattcaaatcctgatcggcgccttccggctgggcaagttcattcgtctggtgccgctgccggcgatccacggcttcgtcaacggtctggcgatcgtcatcatgctggcgcagctgaagatgatcgccgggcaggggccgctgatgtacggcctggtggcgctggcgattgcggtggtggtgctgttcccgcgcctgaccaaagccattccgtcttcgctggcggcgctgctggtggtttcggcgttggcgatcggcctcaatctgcacacgctgcgggtgggcgatctggcggacatttccggcgcgctgccgcacttcagcctgccgacggcgccgttcaccctagaaatggtgcgggtggtgctgccctatgcggtggtgattgccctggtcggtttgattgaatcgctgctgaccatgacggtgctggatgaaatgggcggcaagaagggcaacggcaatcgcgaaagcatcgcgcagggcgccggtaacgcagtgtgcggcctgttcggctgcttcgccggctgcgcgatgatcggccagtcgatcatcaacttcacctcgggcgggcgcgggcgcctctccggcacggtgggcgccatcctgctgattctgttcgtggtcagcctgtcgcgctatatcggcctgctgccggtggcggcgctggccggggtgatgctggtggtgtgttacaacaccttcgagtggagttcgctgcgccgtttgcgccgtatgccgaaggcggacgcgctggtgatgctcgccgtcacgctgatcaccatctttaccgatctggcggtggcggtgatcagcggggtgattatctcggcgctggtgttcgcctggcagcaggcgcgcattcgcgtgcgccagcggcaggtaacgggcgacgtggcggtgtatcagctcgatggcccgctgttcttcggctctgccgccgctttcgccgagctgttcgagccgcaaagcgatccgcagaacgtggtgctggattttgccggcacccgggtgatggattccagcggcgtagaggcgatcgataagctgacggcgcgttacctggcggcggggaaaagcattcggctgcgccacctgagcggcgactgcgtgcgtttacttaagcgcgccgggccgttttgcagccatgagctggacgatccgcagtattacgtggcggaggaggggtttaccgccgatgaccgccgcgtgagcgaggagaccttcaacccgcgcggctag

SEQ ID NO: 422856 - DNA, 576 bp, Serratia marcescens
ttgatagttggcctggccaacccgggcgcggaatatgcccaaacgcgccacaacgccggcgcctggtacgtcgatctgctggcccagcgccacaatcagcagttgaaagaagagagcaagttcttcggctataccgctcgtttgaacctggcgggcaacgacgtgcgcctgctggtgccgaccaccttcatgaacctgagcggcaaagcggtgctggcgatggccaacttttaccgcatcgaaccaaacgagatcctggtggcgcacgacgagctggatctgccgcccggcgtcgccaaaatcaagctcggcggcggcaacggcggccacaacggcctgaaagacatccagaacaagttcggcaacaacccgaacttctaccgcctgcgcatcggcatcggccatccgggcgacaagaacaaggtggtgggcttcgtgctcggcaaaccgccggccagcgagcagaagatgatcgacgaagcgatcgacgagtcactgcgctgcaccgagatgctgatgaaggacgggctggaaaaaaccgttcagcgcctgcacagcttcaaggcgcaggcctga

SEQ ID NO: 422857 - DNA, 279 bp, Serratia marcescens
atgaaacgtagaagcgcggacagaatgggcaacttttttatggggctggggctggtcgtgatgatcggcggcgtcggatactccattattgctgaagtatcccagttcaatttaccgcaatttttcgcccacggcgccatcatgagtatcttcgtcggcgcgctgttgtggctggtgggcgcgcgtatcggcggccgcgagcaggtggcggatcgctattggtgggtaaaacactttgataaacggtgccgtaacgaccaacatcgttcgtcgcattga

SEQ ID NO: 422858 - DNA, 948 bp, Serratia marcescens
gtgcctgatatgaagctttttgctggtaacgccaccccggaactagcacaacgtattgccaaccgtttgtacaccagccttggtgacgccgctgtaggtcgttttagcgacggcgaagtgagcgtgcaaatcaacgaaaatgtacgcggcggtgatattttcatcatccagtccacctgtgccccgaccaacgacaacctgatggaactggttgtgatggtcgacgccctgcgtcgcgcctccgcaggtcgtattaccgccgttatcccttacttcggctatgcccgccaggatcgccgcgtgcgttccgcgcgtgtgccgatcaccgccaaggtggttgccgatttcctctccagcgtaggggttgaccgcgttctgacggtggatctgcatgctgagcagattcaaggcttcttcgacgttccggtagacaacgtgttcggcagcccgatcctgctggaagacatgctgcagcagaacctggaaaacccgatcgtggtttccccggacatcggcggcgtagtgcgtgcccgcgccatcgccaaactgctgaacgacaccgacatggccatcatcgacaaacgccgcccgcgcgcgaacgtttctcaggtgatgcacatcatcggtgacgtggcaggccgcgactgcgtgctggtcgacgacatgatcgacaccggcggtaccttgtgcaaagcggctgaagcgttgaaagaacgcggtgccaagcgcgtattcgcctacgcgacgcacccgatcttctccggcaacgccgtggacaacatcaagaactcggtgattgatgaagtgatcgtctgcgacaccattccgctgtcgccggaaatcaaggcactgaaaaacgttcgcactctgaccctgtccggcatgctggctgaagccatccgccgcatcagcaacgaagagtcgatctctgcaatgttcgagcattga

SEQ ID NO: 422859 - DNA, 867 bp, Serratia marcescens
atgatccgccagtggccctcccccgcgaaactcaacctgtttctgtacatcaccggccgtcgtgaagacggctatcacctgctgcagacgctgttccagtttttggactacggcgacactctgaccattgagccgcgccaggacgatcgcattcatctgctgacgccggtcgacggcgtgccggacgagcagaacctgatcgtgcgcgccgcccgcctgctgcagcgctattgcgatgaacgcggcctgcagaccacaccgcgcggcgccgacatcagcatcgacaagcgcctgccgatgggcggcggtttgggcggcggctcctccaacgccgccaccgtgctggtggcgctgaacgaactgtggcgctgcggtcttggcgacgaccaactggccgagctggggctcagcctcggcgccgacgtgccggtgttcgtgcgcggccacgccgccttcgccgaaggcatcggcgagcgcctgcagccggccgagccgcaggaaaagtggtatctggtggcgcatcccggcgtcggcatcccgacgccggttatcttcggcgaccccgaattgaaaagagacaccccggttcgctccttaagtgagctgttgcaggcaccgtacgcaaatgattgcgaaccgatcgcaagaaaacgttttcgcgaggttgaacagcttctttcatggctgttagaatacgccccgtcacgcctgactggcacaggtgcttgtgtgtttgctgaattcgacacagaaatcgccgcccgtcaggtgttaaatcaagccccggagtggttgtgtggttttgtagcgcgcggcgttaacgtctccccactacatcgcattcgttccgggcggtttgagtcgtag

SEQ ID NO: 422860 - DNA, 624 bp, Serratia marcescens
atgccaatacgcaaagttagtttgctccgtctgatcccgctggccagcctggtgctggccgcctgtaccaccaccaagccgaccggcccggccaccagcccgacctcaccgcagtggcgcgcccatgagcaggcggtgcagcagctcagcacctatcagacccgcggctccttcgcctacttgtctgatcagaaaaaagtctacgcccgcttcttctggcagcagttctcgccggagcgctaccgtctgctgttgaccaacccgctcggcagcacggaaatggatctcaacgtgcagaaaaacgtggtgcagttgaccgacaaccagggcaaacgctacgtcagtgacaacccggaagagatgatccgcaagctgaccggcatggcgatcccgctgaacaacctgcgccagtggatgctcggcctgccgggcgaagccggcgattttgcgctggatgaccaatatcgcctgagcaagctgacctaccagcaaggaggccagacctggaaagtggattaccagggctacagcaacgaggtgcagccgacgctgccgaaccgcctggagctgcagcagggcgaccagcgcatcaagctgaaaatggacaactggacgctcaaatga

SEQ ID NO: 422861 - DNA, 1263 bp, Serratia marcescens
atgaccctgctggcgttaggtataaatcacaaaaccgctccggtttctctgcgtgaaagggtgaccttctcgccagagtccatcgatgaggcgctgaccagcttgctccaacaaccgttggtgcagggcggcgtcgtgttgtccacctgcaaccgcaccgagctgtacctcagcgtagagcagcaggaacacatgcacgagcagctggtcgcctggctgtgcgcctatcacaacctgcgcccggaagaggtgaagaaaagcctgtactggcatcagggcaacgacgcggtcagccatctgatgcgggtggccagcgggttggactcattggtactgggcgaaccgcagatcctcggtcaggtgaaaaaggccttcgccgagtcgcaacgcggccagtcgctctccggcgagctggagcgtctgttccagaaatccttctccgtcgccaagcgcgtgcgcaccgaaaccgacatcggcgccagcgcggtttccgtggcgttcgccgcctgtacgctggcgcggcagatcttcgaatcgctggccgatctcaacgtattgctggtgggcgccggcgaaaccatcgagctggtggcgcgccacctgcgcgagcataaagtgcggcacatgatcatcgccaaccgcacccgcgagcgcgcgcagctgctggcggacgaggtcggcgcggaggtgatcaccctgcctgaaatcgacgaacgcctggcggacgccgacatcatcatcagttccaccgccagcccgctgccgatcatcggcaaaggcatggtggagcgcgcgctgaaggcgcgccgcaaccagccgatgctgctggtggatatcgccgtaccacgcgacatcgaaccggaggtcggcaaattggccaacgcctatctgtacagcgtggacgatctgcacgccatcattcaaagcaatctggcgcagcgcaaagcggcggcggtgcaggcagagtcgatcgtgcagcaggaaagcaccaacttcatggcctggctgcgctcgcagggcgcggtggaaaccatccgcgactaccgttcgcaggccgaccaaattcgcgcagagatggaagccaaagcgctggccgccatcgcgcagggcgccaacgtggagcaggtgatacacgagctggcccataaactgaccaaccgtcttattcatgcccccaccaaatccctccagcaggccgccggcgacggcgacgtggagcggttgcagttattacgcgacagcctcgggctggatcaacattag

SEQ ID NO: 422862 - DNA, 1086 bp, Serratia marcescens
atgaagccttctattgttgccaaactggaagcgttacaagagcgccatgaagaagtgcaggcgctgctcggcgatgccggtgtcatcgccgaccaagaccggttccgcgcgctgtcgcgagaatacgcgcagctgaccgacgtcagccgctgcttcctggaatggcgtcaggtgcaggaggatctggagacggcggaaatgatgctggacgatccggagatgcgcgaaatggcgcaggaagagctgaaacaggcgcgggcggccagcgaagagctggagcagcagctgcaggtcttgctgttgccgaaagatccggacgatgagcgcagctgcttcctcgaagtgcgcgccggcaccggcggcgatgaggcggcgatcttcgccggcgatctgttccgcatgtacagtcgttacgccgaaggccgccgctggcgcgtcgaggtgatgagcgccaacgaaggcgagcacggcggcttcaaggaagtgatcgccaaagtctccggcgatggcgtgtacggccagctgaagtttgaatccggcggccaccgcgtgcagcgcgtgccggaaaccgaatcccaggggcgcatccacacctccgcctgcaccgtggcggtgatgccggaagtgccggaagccgagctgccggacatcaacccgggcgatctgaaaatcgacactttccgctcctccggcgccggcggccagcacgttaacaccaccgactcggcgatccgcatcacccacctgccgaccggcatcgtggtggagtgccaggacgaacgttcacagcacaaaaacaaagccaaggcgatgtcggtgctgggcgcgcgcattcgcgccgccgagatggccaagcgccagcaggccgaggcgtccactcgccgcaacctgctgggcagcggcgatcgttccgaccgcaatcgcacctacaacttcccgcaggggcgggtgaccgaccaccgcatcaacctgacgctctaccgtctggacgaggtgatggaaggcaaactggacatgctgatccagccgatcgtgcaggagtatcaggccgaccagctggctgcgctgtccgccgagcaagagtga

SEQ ID NO: 422863 - DNA, 834 bp, Serratia marcescens
atggactatcaacactggctgaaagccgccgccgcgcgtttgacccacagcgacagcgcccggcgcgacgcggaaatcctgttgggtttcgtgaccggcaaggccaggaccttcctgatggcgttcggggaaaccctgctgacgccgccgcagcaacagcagctggagacgctgctggcgcgccgcgagcgcggtgagccggtggcctatctggtgggcgagcgcgagttttggtcgctgccgctgtcggtttcgcccgcaacgctgatcccacgcccggataccgaatgcctggtggaactggcgctggcgcgcctgccgccgcaaccctgccatttcctcgatctcggcaccggcaccggcgccatcgcgctggcgctggccagcgagcgcccggattgttcggcaatcggcgtcgatgtgcagccggaggcggtcgcgctggcgcaacacaatgcgcacaagctgaagatcgacaacgtccgatttctacagggcagctggtttgcgccggtggcggggcaacgcttcgcgctgatcgccagcaatccgccctatatcgacgccgccgatccgcatttgtcgcagggcgacgtgcgcttcgagccgggcagtgcgctggtcgccgccgatcatgggctggcggatctggtcgccatcgtgggccaggcgccgcaccatttgcagccgcagggttggctgctgttggaacatggctggcagcagggcgagagcgtgcgcgcgctgctgcaggccgccggattttccgctgtcgccacccaccgtgattacggcgacaacgaccgcgtgacgctcggccaatggccgggataa

SEQ ID NO: 422864 - DNA, 399 bp, Serratia marcescens
atgactgcatacaccgcgttgaaacatttccatttgctgacggtcgccatcagtattaccttgtttgtgctgcgtttcttttggcagtggcgccgctcgccgatcatgggccgccgctgggtcaaggtagcgccgcacctgaacgacacgctgctgttcgtcagcggtatcgcgctggtggtgacgttcgggttttatccgctgctgggtatggactcatggctgaccgagaagctgtttggcgttattatctatatcctgcttggctacgtcgcattgggcaagaagaccaaaagtcagcggctgcgaaccgtggcgttcgtgctggcgttgggctgcctgtacctgataattaaacttgccacgacgaaaataccgtttctgatgggatacctatga

SEQ ID NO: 422865 - DNA, 810 bp, Serratia marcescens
atgagtagcattgctgattttgaatttaacgcctcgccgctgagcgaaggggtgatcctggtgtcgcagtcggtgcggcgcgatttcccggctgccgacgtggagcgcaagctgcaacagctggtggacgaagcgcgcgcggcggtgccggccgatatcactcaggagcagcaactggatgcgctcatcgagctgttttacaagacctggggcttcggcggcgccagcggcgtgtaccgcctgtcggacgccatctggctggacaaagtgctggaagggcggcagggcacgccggtctcgctgggcaccattttcctgcacatcgccaacgcgctggatctgccgctgctgccggtgattttccccactcagctgatcctgcgcgccgactggctggacgaagagctgtggctgatcaacccgcttaacggcgaaacccttagcgaacaccagctggaagtgtggatcaagggcaacttggggctgggtgccgagctggaagacgacgacctcgacgagtcggagaacatcatggtggtgcgcaagatgctcgatacgctgaaggccgctctgatggaagaaaaacagctggaaatggcgctgcgcaccagcgaaacggtgctgtgcttcgatccggaagatccgtacgagatccgcgaccgcgggctgatttacgcccagctggagtgcaaccatatcgcgatttccgatctcaactattttgtcgagcagtgtcctgaagacccggtcagcgaagtgatcaaagtgcagatccattcgattgagccgaaacaggtgacgctgcattaa

SEQ ID NO: 422866 - DNA, 909 bp, Serratia marcescens
atgactccgcgcagtgtgcaaggcgacggttacaaccttaacaaaggcgaaagcatgaaacagaaagtggttagcattggcgatatcgacgtagcaaacgatctgccgtttgtgctgtttggcggtatgaacgtgctggaatcgcgcgatctggcgatgagcatctgcgaacactacgtcaccgtgacgcaaaaactgggcattccttacgtattcaaggcctctttcgacaaggccaaccgctcttccatccactcgtaccgtggcccgggtctggaagaagggatgaagatcttcgaagagctgaaaaaaaccttcggcgtgaaaatcatcaccgacgtgcatgaagcggcgcaggcgcagccggtttccgaagtggttgacgtgatccagctgccggccttcctggcgcgccagaccgatctggtggaagcgatggcgaaaaccggcgcggtgatcaacgtcaagaagccgcagttcgtcagcccggggcagatgggcaacatcgtcgacaagttcaaagagggcggcaacgaccaggtgatcctgtgcgatcgcggcagcaactttggctatgacaacctggtggtcgacatgctgggcatcaacgtgatgaagaacgtgaccggtggccatccggtgatcttcgacgtgacccacgcgctgcagacccgcgacccgttcggcgccgcgtccggcggccgccgcgctcaggtggccgagctggcgcgcgccggcatggcggtcggcctggccggcctgttcctcgaagcgcacccggatccgaacaacgccaagtgcgacggcccgtccgcgctgccgttggacaagctggagccgttcctggcgcagatgaaagccatcgacgacctggtgaagagcttcccggagctggataccagcaactaa

SEQ ID NO: 422867 - DNA, 1689 bp, Serratia marcescens
atgaaaacgcatgaaataaacagaattcgccccttcagcgcgctgatagacgcctgctggcgggaaccttatagcctggcgcggttgctgaaagacgctatcgccggggtgacggtcggtattatcgccatcccgctggcgatggcgctggcgatcgccagcggcgtgccgccgcagtacggcctgtacaccgccgccatcgccggtatcgtcatcgccgtcagcggcggttcgcgctacagcgtctccggccccaccgccgccttcgtggtgatcctgtatccggtttcgcagcagttcggcctggccggcctgctggtcgccacgctgatctccggggtgtttctgctgctgatggggctggcgcgcctgggccggctgatcgagtacattccgctgccggtgacgctcggctttacctccggcatcgccatcaccatcgccaccatgcagatcaaggacttcttcggcctgcagctggcgcacacgccggaaaattacgtcggcaaactgcacgccctgctgcaggcgctgccgacgctggatttcggcgataccctgatcggcgcggtgacgctcttgatcctgatcttctggcccaagctcggcctgcgggtgcctggccacctgccggcgctgctggcgggcactgcgctgatgggactgctggcgctgtttgatcacccggtggcgaccatcggctcgcgcttcagctacctgctggccgacggcagcagcgggcagggcatcccgccgatcctgccgcagttgctgctgccctgggatctgccgggcggcggcgggcagccgttcaccctgagctggcaaaccgtttccgccctattgccggcggcgttttcaatggcgatgctcggcgcgatcgaatcgctgctgtgcgcggtggtgctcgacggcatgaccggcaagaagcacaactcgaacagcgaactgatcggccagggcgcgggcaacatcatcgcgccgttcttcggcggcattaccgccaccgccgcgattgcccgttcggcggccaacgtgcgcgccggcgccacctcgccggtatccgccatcatccacgcgctgctggtgctgctggcgctgctggtattggcgccgtggctctcttacctgccgctggcggcgatggcggcgctgctgctgatggtcgcctggaacatgagcgaggcgcacaaggtggtttacctgctgcgccgggcgccgaaggacgacattctggtgctgctgctgtgcatgtcgctgacggtgctgttcgacatggtgatcgccattaccgtgggcatcgtgctggcgtcgctgctgtttatgcgccgcatcgcccgcatgacgcggctgagcgagctgagcgccgaccacggccgcctggtgctgcgggtgaacggcccgctgttcttcgccgccgccgagcgcatctttaccgaactgctggcgcgcagcgaaggctaccgcacgatcgtgctgcaatgggatgcggtgccggtgctcgacgccggcggcctgagcgccctgcggcgctttatcgaggtgctgccggcggacaaaaagctggtgatcaccgacgtgccattccagccgctgaaaaccctggcgcgcgcgcgggtgcagccgatcgagggccgcttgcagttctacccgacgctgccggaagcgctggcggccaccgacgcctaa

SEQ ID NO: 422868 - DNA, 486 bp, Serratia marcescens
atgaatatcgacgatgaactgcaggcgctcagcgaacaggaagcgacgctggcctttacccattttgacgccgccaccgcctgggaactgggcgcggcgctgaaaaccgccgccgagcggcgcggcctgagcatcgccatcgagatccaactggccgggcaaacgctgttttattacgccatgccgggcgccacgccggacattgccgactgggtgcggcgcaagcgtaatctggtgaatcattttcacaaaagctcttacgccatcggcctgcgcctgcagcagcggcaaacgtcgctggaggaacgctacgggctgagcgtgcgcgactattcggtgcacggcggcgccttcccgctcaccctgaccggcctcggctgcgtcggcagcatcagcatttccggcgcgccgcagaaagaagaccatcagctgctggtgagtactttagcgaactttctcggcttatccctgcccgaactccactag

SEQ ID NO: 422869 - DNA, 3474 bp, Serratia marcescens
atgagcacttccgatagccgtaaccgttcctcatcccctcgttattctctgcccgatcgcgcaggcgatctgcgccagctggggcaactgaccggcgcggcctgcgccgtggagtgcgccgagatcgtcgaacgccaccctggcccggtgatgctgatcgcgccggacatgcaaaacgccctgcggctgcgcgacgagatccagcagttcaccgaccagatggtgaccacgctgtccgactgggaaaccctgccgtatgacagcttctcgccgcatcaggaaatcatctcggatcgtttgtcgagcctgtatcatctgccgaccatggcgcgcggcgtgatcattttgccggtcaataccctgatgcagcgcgtctgcccgcacgagttcctgcacggccacgcgctggtgatgaagaaaggccagcgcctgtcgcgcgacaagctgcgcgcgcagctggaacaggccggctatcgcagcgtcgatcaggtgatggagcacggcgaattcgccacccgcggcgcgctgctcgatctttacccgatgggcagcgatgagccttaccgcatcgactttttcgatgacgaaatcgacagcctgcgcatcttcgacgtcgatagccagcgcacgctgagcgaagtcgaggccatcaatctgttgccggcccacgagttccccaccgacaagaacgccatcgagctgttccgcagccagtggcgcgagcagttcgaggtgcgccgcgacgccgaacacatctatcagcaggtcagcaaaagcgcctggccggccggcatcgagtactggcagccgctgttcttcagccagccgctgccgtcgctgttcagctacctgccggccaacacgctgatcgtcaataccggcgatctggagggcgccgccgagcgcttctggcaagacgtcaaccagcgttacgaaagccgccgcgtcgatccgatgcgcccgctgctggcgccggatacgctgtggctgcgcgtcgacgcgctgttcggcgagctgaaggcctggccgcgcatcgcgctgaaaaccgatgagctgccggccaaggccggcaataccaatctggactaccatgccctgcccgatctggcggtgcaggggcagcataaatctccgctggataacctgcggcgctttatcgaaggcttcgacggcagcgtaattttctccgtcgagagcgaggggcggcgtgaaacgctgcaggatctgctcggccgcatcaagctggcgccggcgctgattcagcgcctcgatcagacggaaacggcgggccgttacatgatggtcggcgccgccgaacacggcttcctcgacggcctgcgccggcgggcgctgatctgcgaaagcgatctgctcggcgagcgcgtcagccgccgccggcaggacaaccggcgcaccatcaacaccgataccctgatccgcaacctggcggaactgcatcccggccagccggtggtgcacctggagcacggcgtcggccgctacgtcggcctgaccacgctggaggccggcggcatcaaggccgaatacctgatcctctcctacgccggtgaggacaagctgtatgtgccggtttcttcgctgcatctgatcagccgctacgccggcggcgcggacgaaaacgcgccgctgcacaaactgggcggcgacgcctggacgcgcgcgcggcagaaagcggccgagcgggtgcgcgacgtggcggcggagctgctggatatctacgcccagcgcgccgccaaggccggtttcgccttcaaacacaaccgcgaacagtatcagctgttctgccagagcttcccgttcgaaaccacgccggatcaggaacaggcgatcaatgccgtattgagcgacatgtgtcagccgttggcgatggatcgcctggtgtgtggcgacgtcggcttcggcaaaaccgaagtggcgatgcgcgccgccttcctggcggtggaaaacggcaagcaggtggcggtgctggtgccgaccaccctgctggcgcagcagcacttcgacaacttccgcgatcgcttcgccacctggccgattcgcatcgagatgatgtcgcgcttccgcagcgccaaagagcagcagcaggtgctggacgacgcggcagaaggcaaggtggacatcatcatcggcacccacaagctgttgcagagcgatctgcgctggaaagacctggggctgctgatcgtcgatgaggagcaccgcttcggcgtgcgccacaaggagcgcatcaaggcgatgcgcgccgacgtcgatatcctgacgctgaccgccacgccgatcccgcgcaccctgaacatggcgatgagcggcatgcgcgatctgtcgatcatcgccaccccgccggcacgccgcttggcggtgaagaccttcgtgcgcgaatacgacagcctggtggtgcgcgaggcgatcctgcgcgaagtgctgcgcggcggccaggtttactacctctacaacgacgtcgaaaacatcgagaaagcggcgcagcgcctggcggagctggtgccggaagcgcgcatcgccatcggccacggccagatgcgcgagcgcgatctggaacgggtgatgaacgatttccaccaccagcgcttcaacgtgctggtgtgcaccaccatcatcgaaaccggcatcgatattcccagcgccaacaccatcatcatcgagcgcgccgatcgcttcggcctggcgcagctgcaccagctgcgcggccgcgtcgggcgctcgcaccaccaggcttacgcctatctgttgacgccaaacccgaaagccatgggcgccgacgcccataaacggctcgaggccatcgcgtcgctggaagatctcggcgccggtttcgcgctggcgacccacgatctggagatccgcggcgccggcgaactgctgggcgaagaccagagcggccagatgaccaccgtcggcttctcgctctacatggagctgctggaaagcgccgtcgatgcgttgaaaaatggccgcgaaccgtcgctggaagatctcaccagcagccagaccgaggtggaactgcgcatgccggcgctgctgccggaagatttcattcccgacgtcaatacccgcctgtcgctgtacaagcgcatcgccagcgctaagagcgacggcgagctggatgagctgaaagtcgagctgatcgaccgtttcggccagttgccggacgcggcacgcaacctgttgcagtgcgcggcgctgcgcctgcatgcgcagaagctgggcatcaaacgcatcgagagcaacgagcgcggcggctttatcgagttcggcgacaacaaccgcgtcgatcctggttatctgatcggcctgttgcagggcaatccgcaggtttaccgcctggacggcccgagcaagctgaagttcacgctcgatctggccgatcgccaaaaacgcctgacgttcaccgaagagctgctggacgccttccgcgaacacacgctggcggcctga

SEQ ID NO: 422870 - DNA, 1203 bp, Serratia marcescens
atgtatcaacctgtcgcgttattcattggcctgcgctacatgcgcgggcgagcctcagaccgcttcgggcggtttgtttcctggctttccaccatcggcattacgctgggggtgatggcgttggtcaccgtgctgtcggtgatgaacggattcgaaaaggatctggagaacaacatcctcggcctgatgccgcaggcgttgatcaccagcccgcaaggatcggttaatccgcagcagctgcctgcctccgaggtgcagaagctgcagggcgtcacgcgcgttgcgccgctgaccaccggtgacgtggtgctgcaaagcgcccgcagcgtggcggtcggggtgatgctcggcgtcaatcccgacgaggccgatccgctgaccccgtatctggtcaacgtcaagcagcagcagctgcagccgggccaatacaacatcatcatcggcgaacagctggcggggcaactcggcgtcaaacgcggcgattcgctgcgcgtgatggtgccgagcgccagccagttcacgccgatgggccgcattcccagccagcgtctgttcaccctcatcggcaccttccacgccaacagcgaggtggacggctatcagctgctggtcaaccaacaggacgcttcgcgcctgatgcgctacccggccggcaacatcaccggctggcgcctgttcctgcagcagccgctggcggtcgataccctcagccaacagccgttgccggcgggcacggtctggaaagactggcgtgatcgcaagggcgagctgttccaggcggtgcgcatggagaagaatatgatggggctgttgctcagcctgatcgtggcggtggcggcgtttaacatcattacctcgctcggcctgctggtgatggagaagcagggcgaggtcgccattctgcagacccaggggctgacccgccgccagatcatgtcggtgtttatggtgcagggcgccagcgccggcatcatcggctcgctgctcggcacgctgctcggcgtgttgctggccaccaacctgaataacctgatgccgatcctcggcgccctgatcgacggcgcttcgctgccggtggcggtcgatccgctgcaggtgacgatcatcgccgtggtggcgatgacggtttccctgttgtccacgctttatccttcatggcgcgctgccgccgtacaacccgctgaggctttacgttatgagtaa

SEQ ID NO: 422871 - DNA, 705 bp, Serratia marcescens
atgagtaaccatcttttgctgcagtgtgacaacctgtgcaagacctatcaggaaggcaatctgcacaccgacgtgctgcgcaacgtcagctttgccatgcagcagggcgagatgatggcgatcgtcggcagctcgggttccggcaagagcaccctgttgcacctgctgggcgggctggactcgccgacctccggcgaggtgatcttcaagggcgcatcgctgaacgccatgtcttcggcggccaaggccgagctgcgcaaccgccagctcggcttcatctatcagtttcaccatctgctgccggacttcaccgcgctggaaaacgccgccatgccgctgctgatcggcggcgccaagccggcgcaggcgcaggagaaggcgcgggagatgctggcggcggtcgggctggaaaaacgcagcaaacaccgcccgtccgagctttccggcggcgagcgtcagcgcgtggcgatcgcgcgcgcgctggtcaataatccggcgctggtgctggcggacgaaccgaccggcaacctggacaaacgcaccgcggacagcatcttcgatctgctgggcgagctgaacgtgcgtcagggcaccgcttttctggtggtgacgcacgatctgcaactggccaagcgcctgagccgccagctggaaatggccgacggccacctgcaggcgcagctgaccctgatgggggccgagtaa

SEQ ID NO: 422872 - DNA, 1248 bp, Serratia marcescens
atggcgggagcctcactgtccttcctgacggccctgcgtttcagccgcggccgtaaacgcggcggcatggtgtcgctgatttcggtcatctccaccatcggcatcgcgctgggggtggcggtgttgatcgtcggcctgagcgcgatgaacggctttgagcgcgagctgaaaaaccgcattctggcggtggtgccgcacggcgagctcgagccggtaaatcagccgttcagcggctggccgtcgattctgcagcgggtggagaaggtgccgggcattgtggccgccgcgccgtacatcaactttaccggcctgatggagaacggcgcgcagctgcgcgcggtggaagtcaaaggcgttgatccgcagcaggagagccggctgagcgcgctgccgcagtatgtgcagggtgatgcctgggccaacttcaaggccggcgaacagcaggtgatcctcggcaagggtgtggccgacgcgctgggtgtgaagcaaggcgcctatgtgacggtgatgatccccaacagcgacccggaaatgaagctgctgcagccgaagcgcattcgcctgcacgtgaccggcattttgcagctcagcggccagctcgatcacagcctggcgctggtgccgctggccgatgcgcagcagtatctcgacatgggtgacagcgtcacgggtatcgccctcaagatgaacgacgtgttcgccgccaacaaactggtgcgcgacgccggcgaagtgaccaacgcctacatttacatcaagagctggatcggcaagtacggctacatgtaccgcgatatccagatgatccgcgccatcatgtatctggcgatggtgctggtgatcggcgtggcctgcttcaacatcgtttccacgctggtgatggcggtgaaagacaaaagcgccgacatcgcggtgctgcgcaccctgggcgccaaagacggctttatccgcgccatcttcatctggtatgggctgctggccgggctgctgggcagcctgagcggcgtggtgatcggggtaatcgcctcgctgcagctgaccaacattatccggggcatcgagaaactggtcggccactccttcctgtcgggcgatatctacttcatcgattttctgccttccgagctgcactggctggacgtgctgatcgtgttggcgaccgccatcgtgctgagcctgttggccagttggtatccggcgaggcgcgccagccgcatcgatccggcgcgggtgctcagcggacaataa

SEQ ID NO: 422873 - DNA, 921 bp, Serratia marcescens
atgtactacggtttcgatatgggcggcaccaagattgagctgggggtattcgacgacaacctgcagcgcatttggcaaaagcgggtgccgacgccgcgtgaagactaccggcagctgctggccacgctgggcgatctgaccctcgaggcggatgcgttctgtggccgcagcggcagcgtcggcatcggcattccgggcctgcccaacgacgatgacggcacgctgtttaccgccaacgtgccggcggcgatggggcggccgttgccccgcgatctggcggcgctgatcggccgcgaggtgcgcgtcgacaacgacgccaactgctttgcgctgtcggaggcctgggacgacgagtttcgccgctacccgacggtgctgggcatcatcctcggcaccggcgttggcggcggcctgatcgtcgatggcaagacggtgcctgggcgcaactatatcgccggcgagttcggccatttgcgcctgccggtggacgcgctcgaggtgctggggcgtgatgtgcctcgcgtcgcctgcgggtgcggccaccagggttgcattgaaaattacatatcgggccgcggtttcgaatggatgtacgcccatttctatggccggcacttgcccgccaccgagatcattgcgcattatcaggcgggtgagccgcaggcggtggctcacgtcgaccgctttatggacgtgctggcgatctgcctgggcaacctgctgacggtgctggatccgcacctggtggtgatcggcggcggactgtcgaacttcgacgccatttaccaggcgctgccgcagcggttgccggcgcacctgctgcgggtggcccggctgccgcgcatcgagaaggcgcgctatggcgacgccggcggcgtgcgcggcgcagcgttcctcaatttggtaaacagggaaaagtaa

SEQ ID NO: 422874 - DNA, 837 bp, Serratia marcescens
atgcacactcgccatcggctgtgtcagtttcgcaagagtaagcatgtgctgcatcagcgctttcgttcacgcatttttcaccgcgacaccatggcggcagccgagctgaaaaagccgtttgtggtggtgttgaccggggccggcatttcggccgagtcgggcattcgcaccttccgcgccgcggatgggctatgggaagagcaccgggtggaggacgtcgccacgccggaaggttttcagcgtgatccggcgctggtgcaggcgttttacaacgaacgccgccgccagctgcagacggaggagatcgccccgaacgccgcgcaccgcgcgctggcggatctggaagagtggctgggggaaaacttcctgctggtcacgcaaaatatcgataacctgcatgagcgcgccggcagcaagcgggtgctgcacatgcacggcgaactgctgaaggtgcgctgcacccagtcggggcaggtgttcgaatggcccggcgatctcagcgttgacgaccgttgccactgctgccagttcccggcgccgctgcggccgcacgtggtgtggttcggcgagatgccgctgggcatggacgacatttaccaggcgctgagcaaggccgatttcttcgtcgccatcggcacctccggccatgtctacccggcggccggcttcgtgcatgaggcgcggctgggcggcgcctacgcgatggagctgaacctggagccaagccaggtggagagccagttcgacgagaagcactatggcctggccagcgaagtggtgccgcgctttgtgcacaagttcctggtgggcaaggtggcgcgggccgacaggccctga

SEQ ID NO: 422875 - DNA, 1044 bp, Serratia marcescens
atgaaaaagtggtcacatctgctcgcagccgggatgatggcgctgagtatctgctctgcaaacgcctctgacggcaaaacactgtatttctataactggactgaatacgtcccgccggggctgctggagcagttcaccaaggaaaccggcatcaaggtgatttattccacctatgaatccaacgaaagcatgtacgccaagctcaagacctacaaagacggcgcgtacgatctggtggtgccttccacgtacttcatcgccaagatgagcaaggaaggcatgctgcaaaaaatcgacaagagcaagctcagccacttcaaggatctcgatcctaccctgctgaacaagccgttcgatcccaacaacgactactccatcccctacatctggggcgctaccgccatcggcgtcaacagcgacgagcaggatccctctaccgttaccgcctgggccgatctgtggcagccgcagtacaagggccgcctgctgctgaccgacgacgcgcgcgaagtgttccagatggcgctgctcaagctgggctactccggcaacaccaccgacccgaaagagatcgaagccgcctatcacgaactgcagaaattgatgccgaacgtgctggccttcaactccgacaacccgggcaacccgtttatggaaggggaagtcaacgtcggtatggtgtggaacggttcggccttcgtggcgcgccaggccggcacgccgctggagatcgtctggccgaaggaaggcgggatcttctggatggacagcctggccattccggccaacgcgcgcaacgtcgagggggcgctgaagctgatagacttcctgctgcggccggaaatcgcggtgcaggtggcggaaaccatcggttacccgacgccgaacctggcggcgaagaaactgctgtcgccggagatagccaacgacaaatcactctacccggacaaggcggtgattgagcacggcgagtggcaaaacgacgtcggcgacgccagcacgctgtatgaaagctacttccaaaagctgaaagccgggcgctaa

SEQ ID NO: 422876 - DNA, 702 bp, Serratia marcescens
atgaatttcaaacaggtcttcagccaggcggagctcagcaagacggatctgacgattttgcactgcattctcgataatccggacgcctgcatcgacgacggcatccgcgcggtatccgcacgctgctacagttccccctcgacgctggtgcggctggccaaaaagctgggctttcgcggctatctcgaactggtctatttcatcaaattcaacctgacgatggcgccggcctatcaggcggagcgcgctacgccggcggcaccgccggcgcagtttctcgatctgctcgacagcggcaagatcctgatccacggcagcggtttttcgcaattggtggcgcagtatatgtacaacaagtttatgacgctgggcgtagacagttacctgtcgctgtggccggatttcgacattcttgaccgtgagacgcgctttcgcttcgatatggtgatcgtgatttcaaagtcgggcaacagcggctcggcgctgagctggagcgaggcggtgaagcgtaaccgcatcctgttggcggccttctgcggcgacggcgacagcccgctggcgcagcaggccgacatgacctttctgtttgaggaccggcaaaaatacgatcacgatatctactatcccaatccgtttttcggccactgtctgttgggattcgagaatgtgatcaccgcctggtttgaacgacgcggccgctga

SEQ ID NO: 422877 - DNA, 1386 bp, Serratia marcescens
atgaaattaaccgttctcggcggcggcggcgtgcgttccccgttcctcgccaaatccatcgcctataacgcccatcgcatcggcattaccgaagtggtgtttatggataccgatgagcgccatctggcgatctacggcgccctggcgcagggcgtattccagcgcattcgcggcgacattgctttcagcctcagcagcgatgcgcgccaggcgctgcaaggcgccgactacatcatcaccaccctgcgcatcggcggcgaggaaggccgcatccatgacgagcgcatcgcgctcaatcaccagttgcttgggcaagaaaccaccggcgccggcggcttcgccatggcgatgcgttcgattccggcgatcctcgactattgccgcctgatcgagcagctttcctcgccggacgcggtgttgttcaacttcaccaatccttccggcatggtgaccgaggcgatcatcaaatccggcttccagcgccgggtctacggcatctgcgacgcccccagcgagttcatccgcgaactggccgagctgctggactgccgcgaagaccagctgagcgtcgactgcttcggcctcaatcacctttcctggttccgcaatgcgcgcgtcaacggcgagccggtcacggaacggctgctggcggatccgcgcctgtatcgcgaaacctgcatgaaatacttctcgccggagctggtggcgctgtcggacaacctgatgctcaacgagtatctctactattactactaccgtgagcaggcgatcgccgccatcgtcgagggcggcgagacccgcggcgaacaaatcgcggcgatcaaccgccaaatgctgtcggcgttgggcgagctggacatcccccgtcagttggagcatgccttctctgtctacttcagccattacctgcagcgcgaaaattcctatatgcagcgcgagtccagccagggcaaggtgaaaacgcgtgagatgctgacgctgcaacagtttatcgaacagccggacagcggcggctatgccggggtggcgatcgacattctggaggcggtcaacagcggccggcaaaaacgcgtggtggtatcgatgcaaaaccgcgacacgctcgattttctgcacccggaagacgtgatcgaaatcagctgcgaattgagcagcgccggcattcagccggtcaaaatgcgcgatattcccgacacccagaagaacctgatttcgcaagtgaaagagtacgaacggctggcggtggcggcgatcctgaccggcaaccgccagctggccatcaaggcgctgatggtacacccgctggtcaactcctactcgctggcgaaaacgctggtggaggagtacctgcaggcccaccgtcagtatgccgggcactggcgctaa

SEQ ID NO: 422878 - DNA, 1560 bp, Serratia marcescens
atgaaaggtattatcgataatatcttaagcaagctgcagcttttctccaaagccatgatggggccgatatttttcctgccggtgatcggtctgattctggcgctcagttctattctcaccaatgccacacttatcaatgaacattccgccgtgttctctatcggtaaaatgatcggcgataccttctggccgttattcggcaatctcgggctgattttctgcatcggcattacctacggcctggccaaagacaaaaaaagcgaagcggcgctggttgcggtgatgtgctttatcatgttcctcggcgccaattcgtcttatctgcaactcagcggccacgtcgcggccaagatcaacggcgaatattacggcaccgggcagactgaactgctgggctttaccgtggtggatatgggcatttttctcggtcttatcctcggtgtcaccatcgcctgggtgcacaaccgcctgtgcaacgtcgagctcaacggcgtgttctcggtctacggcggcgccaaactggtgctgatcgccatgacgccgatcatcatgctgtacgccgtcgccttcagctacctgtggccggccatctcacagggcctgatcgcgctgaccggctttatgaaaagctccggctcgctcggggttttcgtctacggcttcttcgaaaaattcctcatccccaccgggctgcaccactttatctggtcgccgttccagctcaccagcatcggcggttcaatcgtgcaggacggccagaccgtctccggctcgcaggcaattttcctggcctatatgcgcgacccgagcatctcgccgctgatgaacgaagcgctgcgcttctcgcagcaagggatggtgaccatcttcggcctgtcgggcgcggcattggctttctatcacacagccaaaccggaaaagaaaatgctggccaaggcaattctgatcccggccatcaccacctcgatcctggtcggcatcaccgagccgatagagttcaccttcctgtttatctctccgctgctgtgggtgatccacgccgtgttgaccgcgctgtcgcaggtggcctgcaacctgttccaggtgcgcccctggggcgccagcgggctggtcgagttcctggcctacaacctgccgctgccggtctccctcacccgttggccgctgtatgtggtcatcggcctggtgcagtttgcggtgtattacctggtgttcaaaacgctggtgctgaagctcaatctgaagacgccgggccgcgaagatgatcaggacgtcaaactctattccaaacaggattaccggaaccgcaaaaataacccggacgaactgagcggcatcattattcgcgcgctgggcggcaaggaaaacattatttccgtcgacaactgcttcacccggctgcgggtggaattaaaggatatggcgcgggtggatgaggccgcgttgaaaagcaccggcgccaaaggcgtggtgaagaatcgccgtgaagtgcaggtgatttacggcgtcacggtcggcaaggtcaaaaatcaggtagagaaatatttagcggcactctaa

SEQ ID NO: 422879 - DNA, 783 bp, Serratia marcescens
atgatcggacgtctgctgcgcggcggctttatggcgctggtgtacgcctatctgtatatcccgatcgtcatcctgatcgtcaactccttcaacgcctcgcgcttcggcatcagttggcaaggagccaccacccagtggtacagcacgctgctcaacaacgacagcctgctgcaggccgccggccattcgctgactatggcagtgctctccgctaccttcgccacgctgatcggctcgctgaccgcggtggcgctgtaccgctaccgcttccgcggcaagccgttcgtcggcggcatgctgttcgtggtgatgatgtcgccggacatcgtgatggccatctcgttgctggtgctgttcatgctgctgggcatttcgctcggcttctggtcgctgctgttctcgcacatcaccttctgcctgccgttcgtggtggtgaccgtctacgcgcgcctgaaaggcttcgacgtgaagatgctggaggccgcgcgcgatctcggcgcaagcgagttcaccattctgcgcaagatcatcctgccgctggcgatgccggcggtggcggccggctggctgctgagcttcaccctgtcgatggacgacgtggtcgtctcctccttcgttaccggcccgagctacgagatcttgccgctgaagatctattcgatggtgaaagtcggcgtctcgccggaggtcaacgcgctggccaccattttgctgctgctgtcgctggtgctggtgatcgccagccagtgggtgatgcgcgatcgcgcgcccaaggccgaataa

SEQ ID NO: 422880 - DNA, 861 bp, Serratia marcescens
atgaagaaatcgcgtaaagtcttccagaatgtggtgatcgtcggcgtcgtcgcctggctgttgctgttcgtgttcatgccgaacctgatgatcatcgccaccagcttcctgacccgcgacgacgccaatctggtgcagatggtgttcacgctggacaactaccggcgcttgttcgatccgttgtatgcccaggtgctgctgcactcgctgaacatggcgctgatcgccaccctgtgctgcctggcgatcggctacccgttcgcctttatcctggcgcggttgccgcagaaggtgcggccgctgctgctgtttctgctgatcgtgcccttctggaccaattcgctgatccgcatctacggcctgaagctgtttctcagcacccgcggctatctcaacgacgcgctgctgtggatcggcgtcatcgacaagccgctgcgcatcatgtacacctcggaagcggtgatcctcggcctggtgtatatcctgctgccgtttatggtgatgccgctctactccagcatcgaaaagctcgataagtcctgcctggaggcggcgcgcgatctcggcgccggcaagctgcagacctttatccgcatcatcgtgccgctgaccatgccgggcatcatcgccggctgcctgctggtggtgctgccggcgatggggctgttcttcgtcgccgatctgatgggcggcgccaagaatctgctgatcggcaacgtgattaaaagccagttcctcaatatccgcgactggccgttcggcgcggccaccagcatctgcctgacgctggtgatggggctgttgctgctggtctattaccgggccgcccgcctgctgaacaagaaggaggatctggcatga

SEQ ID NO: 422881 - DNA, 1116 bp, Serratia marcescens
atgactgagacatcctctcgagcaccccttgttgaactgcatgccctgagcaaagcgttcgatggcaaaaccatcattgccgatctcgaactgacgattaaccacggcgaattcctcaccattctcggcccctccggctgtggcaaaaccacggtgctgcgcctgatcgccggtctggaagacgccgatttgggccgcatcgtgctcgacggccaggacatcaccgccattccggccgagcatcgccacgtcaacaccgtgtttcagagctatgcgctgtttccgcacatgtcggtgttcgacaacgtcgccttcggcctgcgcatgcaaaaggtgccgacggcggaactgacgccgcgcgtcgaagacgcgctgcgcatggtgcagctggatgccttcgcccagcggcggccgggccagctctccggcggccaacagcagcgcgtggccatcgcccgcgcggtggtcaacaagccgaaggtgctgctgctggacgaatcgctgtcggcactggactataagctgcgcaaacagatgcagaacgagctgaaggcgctgcagcgcaagctgggcatcaccttcgtgttcgtcacccacgatcaggaagaagcgctgaccatgtcggatcgcatcgtggtgatgcgcgaaggccgcattgagcaggacggcacgccgcgcgagatctacgaagagccgaagaacctgttcgtcgccagctttatcggcgagatcaacatcttcgacgcggtggttctgcagcgcctcgatccgcagcgggtgcgcgccaacgtcgaaggccgcgagtgcgacatctacgccgatctgccggtggagccgggccaaaagctgaaggtgctgctgcgcccggaagacctgcgggtggaagaagtgaacgacagcgcgcagcacgacgggctgatcggctacgtgcgcgagcgcaactacaaaggcatgacgctggaatcggtggtcgagctggagagcggtaaaacggtgatggtcagcgagttcttcaacgaagacgatccggacgtcgatcactcgctcaatcagaagatggcggtgacctgggttgaaagctgggaggtggtgctggccgatgaagaaatcgcgtaa

SEQ ID NO: 422882 - DNA, 1230 bp, Serratia marcescens
atggacaaattacttgaccgctttttcaactacgtctctttcgacacccagtccaaagcgaacgtaaagcatgtgccgagcaccgacgggcagttgaagctggcgcgtgcgttgcagcaggaaatgatcgcgctcggcttcgagcgggtgtcgctcagcgaacacggctgcgtgatgggcacctggccgggcaacgtcgcctggccggtgccggcggtcggttttatcgcccatttggatacctcgccggatttcagcggcaaacacgtcaatccgcagatcgtcgagaactatcgcggaggcgacatcgcgctcggcatcggcgatgaagtgctgtcgccggtgatgttcccgatcctgcaccagatgctggggcaaaccctgatcaccaccgacggcaaaacgctgctgggcgccgacgacaaggccggcatcgccgagatcctcaccgccatggtgcgcctgcgcgcgcgcaaaatcccgcatggcgacatccgcgtagccttcaccccggacgaggaggtaggcaagggggcgcagctgttcgacgtggcggccttcaatgccgaatgggcttataccgtggacggcggcggggtcggcgagctggagtgcgagaacttcaacgccgcctcggtgacgatcaaaatcctcggcaacagcgtgcaccccggcagcgccaagggcgtgatggtcaacgcgctgtcgctggccacccgcattcatcaggcgctgccggcggacgaagcgccggagaccaccgaaggctatcagggtttttaccacctcagcagcatcaagggcagcgtagagcgcgccgaaatgcactatatcctgcgcgacttcgagcgcgaggggtttgaagcgcgcaagcgcaagatggtggacatcgcctgcgaggtcggcaaaggcttgccgcgcgattgctatatcgaagtgagcatcgaagacagctattacaacatgcgcgaacaggtggcggagcacccgcatgtgattgcgctggcgcagcaggcgatgcgcgactgcgatatcgaaccggtgatgaagccgatccgcggcggcaccgacggcgcgcagctgtcgttccgcggcctgccgtgcccgaacctgttcaccggcggctacaactaccacggcaagcacgaattcgtgaccttggaaggcatggagcaagcggtggcggtgatcatgcgcatcgcggcgctggccgccgagcgggcgcggtaa

SEQ ID NO: 422883 - DNA, 1140 bp, Serratia marcescens
atggcagaagaaaagaaaaatgctcaggtgattaacggcgttaacgacgatattgccgaactgaaatcgctgtctacgctgcgccagcgcgtggtcagcgacggtgaaatcgtctccaaatcggccaacggttttcggctggcaaatggcaataccggtgtgatgctgcgtaatgatggcgaggctttctacttactgacaactcaggctgggcaagctcaaaacggacaatggaacacctcgcgtcctttcgctttcagcctggcttccggcagggttgcactcggcaacggcgttgatatttccggtggtgcgatggtatcgcatgacgcgggtataggggctgtgaccactggacccactcccctgataaatgggcaggcatacaacgcaccgtatattcatacgcgcttcgtcaccagcggagtcagttcttctatgatgatgggcgcgcggattatccccgggaaagaagatacgggattactggcttatagcgaccttgcgggacgctggaatgaaattcaagtaaaggcgaacagcgagctctctgccgggcaactgacaaaacgtaacggcaatggctggattgtcgctgccggcaatattgacgtttcaggtaaagcagaacgtattaccaatggggtgcgtcttcagggaaatggggatctgagcgcagatatttatcatattgaacacattagccaataccatgccattgcattccatgtggccaacggcggggcgcaaggatggtatgagttccggaataacggtcatgcctacaccaacggcgcctggaacagcagctccgatgcccgcatgaaaacggacatcacccaaatcgaaggcgcattggacaaactagcccgcatcggcggctacacctacctcaaacagggcgtgccggaggccggggtgatcgctcaggaagtggagagcgtattgccgcagtcggtaacccaaaccgaattgaagctcaacgacggcagcgtactgaaggatgcgcggggcatcaatatcaacggcgtggtggcgttgctggttgaggcgcttaaggaagagcgagcggcccgagaagggttggaatcgcggttggcggcgttggaagccaggatttcaacatctcaaaatgtttga

SEQ ID NO: 422884 - DNA, 2178 bp, Serratia marcescens
atgggcggatttaactatggtggtggaaaaggggatgggactgactggagttctgaaaaaggagatactcccgaacccggtggcggctccaatggcaatggcggtcgagacagtggcaacgacaactctcaggcgggtgctttccaacgccagatgaccgcagtgctgaatgatccagcgattaaaagcatgctggcggatttgcaaaagcgggctctgcgcattagtccatcggcgaaagttgagttagtcagtgtagatgcccgcggtctgctgagtataagcctttcgggtatgcgtcgagagcagtctctcgccgtagagatggctttccagtcagtgcgaccgcgaatcaaaggggatttaatatcttcatttaccaccagcgagggcacagtaaatgaaaatacgcattatttaggaaaggttgaaaccggctaccgactcggtgattacgagcgtgggcccagcggtaacaatggtgatgccaatacggtggcggaaaacaacgttacgtttagtgcctattcctctgtttttcaagggaagataccatcgggctattggctgaataacaataaagtcatgactgaggttgtgattgagtatgagattaacggtggggggaaaggagacagtcggacggggtaccgaaaaaccacagtagaagttccttcgcttacccgtgcttaccaacagtggcaacagatgcttaaggatgtcgctgaggaacagcggaaagcagaagaagcccgcaaggccgaagaagctcgtaaggccgaagaggccggcaaagccgaagaagctcgtaaggctgaagaggcccgcaaagctgaagaagctcgcaaggctgaagaggctcgcaaagcagaagaagcccgcaaggctgaagaggcccgcaaggtggaagccgcaagaaaagcgttgttcgccaaagcggggattctggatgcaccggcatactccccggaaaagctaaaagcggccaatgcggcactggctgccgcaggcgccatggtgcttaaccgcgcgcccgcgatgctgcagacgtcgatggtcgggcaaggtgtgatgacgaccacgagcgaactggctggctgggcagcgagcgcgtcgtggcgggcggcctacgaagttggcagtatacgcgccggcaccgcagtcgccgccggatcggtgctgggggcttttgccctcggcttctacccgacggaggtcggtgcagggagcgatcgggtgccagggcgggatgtcaatctgtttgccctccaggcgagcctggcggcggcgggcagggcgaccatccagcccggcatgacctcggtcgatttgccggtgcgcggatttatcaccactgacgatgacgggagacaaagcgtcaacttcgtcagaacgggcgtcggcggcgtatcgccgagcgtgccggtattcagacccgttcgcgatgagctgacggggctggacaaaatcacgctgcccgcaatggcgggggtgccggcgaggacgatactgattaacccggtgccgaccgggccggcagcgccggcgcataccggtaacggctcaccggggcccaaatcgccagtgcataccggtaccggcatcaggcaggcggacagcatcgtggtaaccaccttcccggcggatgtggtgcaggatctgcaagactttatcctgtggcagccggatgcgacggagattggtgtagaggccatctatgtgatggtgagcaagccctatggtgaaaccaacgccaggggcaaatacagcggtcgtgaatacaacaccaataaagctggaggccccatccagaatctggattggaaaggggccagcatcgaccgtgctggcgtggataaggtgaagttgcatactgggcgttttacagagtcggacgctaacgaagtgatgatcggccgcctggaaaagatcttgaagggagaactgccccccaccgatactgacaggcgattttatacacatgagatcagggaattggagcgttatcgcaatttgggtattagagatggctctgtgccagataatcaaggggaagtgtggaataatacgcatactgcgacgttggaagattatcaattaggcaacagcgaggctttgctctatacgcaggaggctttagacgctgctgaacaacaagagttgaggatgctaaaatga

SEQ ID NO: 422885 - DNA, 273 bp, Serratia marcescens
atgattgatttagaacgcttggcaaaagaagaaaaaatttctgacgtcattgcctttttggtgagaaatgaggatgggtttggttatccccaaatggatcgattctttagtcgccataatttcgcagtaattgggaatggtgaattcaggcgggtgttcgaacagttacgtcagaatggtgttattgaatggggcgacaaaatgcttgttaaaaaaggccccaactggaaagagccgaaattcgtaaccgagaaaaaatacggtatcgaatag

SEQ ID NO: 422886 - DNA, 1089 bp, Serratia marcescens
atgagcaccgaataccgtatcgccagcccgcatttggcgcagttcgttcaggcgatttggcgccaggccggcagtacggcgcgcgaagccgagctggtggccgatcatctggtgcaggccaatctggccgggcacgactcgcacggcgtcggcatgatccccagctacatggcgtcgttggcgcaggggcaattgcagctcaatcagcacgccgaagtggtgcgcgacgccggcgcggtgctgacgctcgacggtgcgcgcggtttcggtcaggtggtggccagcgaagcaatggcgctgggcattgaacgcgccggcaagctgggcctggcggcggtggcgctgcacaacgcgcaccatatcggccgcatcggccattgggcggagcagtgcgcccgcgccggttttatctcgattcacttcgtcaacgtggtgggcgatccgatggtggcgccgttcggcggcagcgatcgccgcttcggcaccaacccgttctgcgccattttcccgcggccgggccgcacgccgctgctgttggatttcgccaccagcggcatcgccttcggcaagactcgggtggcctataacaaagggttgtcggtggtgccgggctatctgatcgacgaacacgggcggccgactgccgaaccgaaggtgatgcacgaagcgccgttcggttcgctgctgccgttcggcttgcacaaaggctacgcgctggcggcgatgtgcgaaatcctcggcggcgcgctctccggcggccgcaccacccacgccgccacgctgaaagccgacagcgacgccatcttcaactgcatgaccaccctgatcctcgatcctcaggccttcgacgccccgcaaatgcaggccgaggccgaagcgtttatcggttgggtgaaggcttcgccgccgagcggcgaacagccgatcgccgtcccgggagagtgggaagaggccaaccgcgcggcgcggctggagcagggcatcccgatcgatgccaatacctggcggcagatttgcgcggcggcggaacaggcgggcatgacggcgggggaactggcggattaccgcgcgcaggcgcgccagggataa

SEQ ID NO: 422887 - DNA, 1122 bp, Serratia marcescens
atggattatcaattagacctggactggaacgattttttgcaacgttattggcaaaagcgtccggtgattctgaagcgcggcttcaaaaactttatcgatccgatctccccggatgagctggccgggctggcgatggaaaacgaagtggacagccgcctggtcagccaccaggacggccgttggcaggtcgcgcacggccccttcgagagcttcgatcacctgagcgaaaacaactggtcgctgctggtgcaggcggtggaccactggcatgagccttccgcggcgctgatgcgcccgttccgccagctgccggactggcggatggatgacctgatgatctccttctcggtaccgggcggcggcgtcggcccgcacctcgatcagtacgacgtgttcatcattcagggcaccggccgccgccgctggcgcgtcggggaaaaaacgccgctgaaacagcactgcccgcacccggatctgctgcaggtggagccgttcgacgccatcatcgacgaagagatggagccgggcgacattctctacattccgccgggcttcccgcatgaaggctacgcgctggaaaacgcgctcaactattcggtgggcttccgcgcgccgaacggccgcgagctggtgagcggcttcgccgactacgtgctggcgcgcgaactgggcagcaaacgctacggcgatccggacgttaaactgcgcgaacacccggcggagatcctgccgcaggaagtggacgccttacggcagatgatgctggatctggtgcaacagccggaacacttccagcactggttcggcgagtttatctcccagtcgcgccacgagctggatctggcgccgccggagccgccgtatcaggccggggaaatctacgagctgctgcagcagggtgaagcgctgcagcgcctgggcgggttgcgcgtgctccgcgtcggcgatcgctgcttcgtcaacggcgagctgatcgacaccgaccagctgcaggccgcagacgccctttgccagaacttcagcgtcgacgccgccctgctcggcgacgcggtggacgatccgtcgttcctggcgctgctgaccgcgctggtcaacagcggctattggtactttaacgactga

SEQ ID NO: 422888 - DNA, 1458 bp, Serratia marcescens
atgttcaacaagaataaaaaaccgttttcgctgcgtgcccgcttcctgatggcgaccgccggggtgatcctggcgctgtcgctctcttacggtttggtggcggtcgtcggctatatcgtcagcttcgacaaaaccgccttccgcctgctgcgcggcgagagcaacctgttcttcagtctggcgcagtggaaagacaacaagctcaccatcgccattccccccgatatcgatctcaacttcccgacgctggtatttatctacgacgataaaggcaacctgctgtggagccagcgcaaggtgccggagctggagaagctgatcaacaaggaatggctggaggagtccggcttttacgaaatcgacaccgacacccgcgtcagtagcgaagtgctgggggacaaccccaaggcgcaggatcaactgaagaattacgacgataccgatcagaacgcgctgacccactcggtggcggtcaatacctatgccgccacgcctcgcctgccggcgctgaccatcgtggtggtcgacagcattccgcaggagctgcagcgatccgacgtggtgtgggagtggttcagctacgtgctgctggccaacctgctgctggtggtgccgctgctgtggctggcggcttactggagcctgcggccgatcaaggcgctggtcaatcaggtgggcgagctggagaacggcgagcgcgatcagctggatgagaacccgcccagcgagctgcgcgggctggtgcgcaatctgaacattctggtgcgcaacgaacgccagcgctacaccaagtaccgcactaccctgtcggatctgacccacagcctgaaaacgccgctggcggtgctgcaaagcaccctgcgctcgctgcgcagcggcaagcagaccaccatcgaagaagccgagccgatcatgctggatcagatcgggcgcatctcgcagcaaatcggttactacctgcaccgagccagcatcaactccggccagacggtgttgacgcgcgagatccattcggtgccggcgctgctcgacagcctggtggtggcgctgaataaggtttatcagcgcaaaggggtggtgatcacgctggacatctcgccggaagtgacctttatgggcgagaaaaacgactttatggaagtgatgggcaacgtgttggaaaacgcctgcaaatactgcctggagttcgtggagatcacctcgctgcactccgagaaaaacctcaccatcgttatcgacgacgacggcccggggatcccggaaagcaagcgccagctgatcttccagcgcggccagcgggtggataccctgcgccccggccagggtctgggtttgtcggtggcggcggagatcatcgagcagtacgacggcgaaatcgtcatcagcgacagcccgctcggcggcgcgcgcatgcaggtcaccttcgcccgccagcacgacacccaccacaacgagtaa

SEQ ID NO: 422889 - DNA, 672 bp, Serratia marcescens
atgcgagtactggttgttgaagataatggtctgctgcgccaccacctttccgttcagatgcgcgagatgggccatcaggtcgacgcggccgaagacgccaaggaagccgattacttcctgcaagagcacgcgccggatatcgccatcgtcgatcttggcctgccgggtgaagacggcctgagcctgatccgccgctggcgcgcgcaccaggccaagctgccgatcctggtgctgaccgcccgcgaaagctggcaggacaaagtggcggtgctggaagccggcgccgacgactatgtcaccaagccgttccacctggaagaagtgatcgcccgcatgcaggcgctgatgcgccgcaacagcggcctggcttcgcaggtgatcgtgctgccgccgttccagatcgatctgtcgcgccgcgaactgagcgtcaacgatcggcaaatcaaactgaccgcctttgaatacaccatcatcgaaaccctgatccgcaacgccggcaaggtggtgagcaaggattcgttgatgctgcagctctacccggacgccgagctgcgcgaaagccacaccatcgacgtgctgatgggccgcttgcgtaaaaaagtgcaagcggaatacccgcatgaagtgatcaccacggtacgtggccagggctatcgttttgacgcgaagtga

SEQ ID NO: 422890 - DNA, 1032 bp, Serratia marcescens
atgaagcagttaacccaggcggaacgcatagcgggcgcactttacggacagatgctgggcgacgcactcggcatgccttccgagctgtggccgcgcgagcgggttaagcgacacttcggctggatagacggctttctcgacgggccggcggagaacaccgccgcctgttatttcaaggccgggcaatataccgacgataccgcgatggcattggcgttggccgatgcgctggtggaggcgcaaggcgaggtggtgccggagctgatcgcccgcaacgtgatccgctgggtggacggttttgacgctttcaacaagaacattctcggccccagttccaaactggcgctgagcgagcagaaagcgggcacaccgatcgccgagttggaaaacaacggcatcaccaacggtgcggcgatgcgcatttcgcctttgggctgcgtgctgccttccgcgccgctggaggacttctgccgacaggtgtggctggcctgcagcccgacgcacaaatccgacatcgccgtcgccggtgcggtggcgatcgcctgggccgtggcgcgggcggtggaaggggctgactgggcctccattcgcctggcgttgccgggggtggcggagtatgcccagcgccggcaggagatgacgttcagcccttcgctggcggcgcgcatcgaactggcgtttcaggtggtggatgaagccaccggcaccgagcaggcctccgagcgggtgtatcagctgatcggggccggggtgagcaccatcgagtcggtgcccgcagcgctggcgatggtgcagctggcgcaaaccgatcctacccggtgcgccgtgctgtgcgccaacctgggcggcgataccgacaccatcggcgcgatggccaccgcgatttgcggcgcgctgcacggcgccgaggcgattgatccggggctgctggcggagttaaaacgggtgaatccgctggatatcggggcttacgttcaggcgttcgcgcgttttcgccgccgcgtgacgcaacgggtcagctttcgctggtaa

SEQ ID NO: 422891 - DNA, 765 bp, Serratia marcescens
atgagcaaggagaccaaccagcgtctgctggacaaactgcagcaggatctggccagcgcgggcgcgatgccgctgtatttgcgcttcaacgcctcggtgcgccaggccatcgagcaggggttgctgaatgcgggggattttttgcccagcgagcgcctgttcaccgaacggctcggcatctcgcgcatcacggtgcgcaaggcgctggcctgcctcgagcaggacggcatcatcggccgttcgcgcggctacggcacctttatccaaccgcagcggcccgagccgaagctgttctattcattggcggacgtgaaaggattctcacgcgaggtgatacagcaggggcgccggccggacacgcagtggatcagccgcgaacggatacccgccggcgctgaactggctgaaaagctccagctggcggccggaacgccgatctaccagctcaaacgcattcacctgatcgatcggcggccaatgtcggtggcggtgtcctacgtagtggtgacggcaattgccaacgtcgacgagatcggcatctcgctgtacgactacttccggcgcaataaggtggagatgggatcgctgcgcagccaggtcagcgcggcgatggccgacgacgatatccgtcaggcgctgcggctctcggagccgatgccgctgctgatcgtgcgccagacgctgttcgaccaccaaaaaaagccgatcgaatacagtgaaagcttctgccgcagcgacatgtacgaatttaccagcgaaagctga

SEQ ID NO: 422892 - DNA, 1515 bp, Serratia marcescens
atgagcgataccccacgacacgcggacgacgcggcgatcctggccgccttcgcgcagcagcggcggcaaggtctgacccggcgttcggcgctgcatcaggccctgatacaactaatcgccgccggagaactgccctggcggacgcagctgccgccgagccgcgcgttggcggcccggctgacggtggcgcgcgacacggtggaacagacctacgtgcggctggaagcggaggggttcatcagccgaacggtggggcgcggcagctttgtgcgttatcgctgcgacacgctgctcggccgtgaactgctggcgacggcggcagggcaagaggcgcggctggcggagcgcgagctgagcgatcgcggccgggcgctgctggcggtcagccatacgccgcacaccagccgccaggcttcgctgacgccttcgctggcggacctgcgggcgtttcccatcgagcaatggctgcagcaggaaaagcaggcgctacggcggcacggcgagcggctgttggggtatgccgatccgcaagggctgccggagctgcgtgcggagatcgcgcgctatctgcagcgggagcggggcgtgaaggcgacggcggaacaggtgatcgtggtgaccagctctcagcaggcgttggcgctgtgtacccaggtgctgttcgatcccggcgatgcggtgttcgtcgaagagccgggttaccagggggcgaaaaagctggtgcagtcggcggggctgcaggcgcggccgatcggtatcgacgagcaggggctggacgtcgggcagttgatgcaggcctcgggcggcggacggggtgtttacatcacgccgtcccatcactacccgctggggtattcgctgagcctcgagcggcggctggcgctgctgcagtgggcgcagcggcagcgggcctggatcatcgaagacgactacgacgccgagttcaactatgaccggcaaaccaaggcggcattgcaggggctggacagcggcgggcgcacgctgtacatcggcaccttcagcaagacgctgtttccggggctgcgcatcggtttcatgattgcgccgccgcagctggtgcggccattggtcgccgccaggcagtttcaggacggctacacgtcggcgctggcgcagatgacgctgttccacttcctgcacgagggcggctacgccgagcatctgcgcaatatgcgcacgctgtacaaggcgcggttggacgtgctgtacgacgcggtgcatcgtcacctggcggcctggacgcgcccggcgttgccgcagggcgggctgcagctggtgtgcccgttggcggatgcggcgacggagcggcggctggtggcggccgccgccgaacgggggattcggctgtacggcctggcggacttctacaccggcacgccgcagcgcggggcgctggtgctcggcttctcggcctatacgccggatgagatcgtgcgctttatcgcgacgctggcgcaggtgttcaacgcgctgccggtggcaagcgacggctaa

SEQ ID NO: 422893 - DNA, 453 bp, Serratia marcescens
atgaacccatacaaccctgaagtgactatccgcagaatcaatggcgacgacaaagcgcaatggctggcgctgtggcagggctatctcgatttttaccgcgccgacgtggcgccgcaggtgaccgatcgcaccttcgaacgcctggggcaggatgaacaggtgtacgggctggtggcgcaggatgccgacggccggctgctggggctgatgaacctggtgttccatccgtccacctggagcgcggtcggctattgttatatcgaggatctctatgtgtcgccgcaggcgcgcggccacaaggtgtcggaaaagctgttcgaacaggcgtatcgcttggcagagacgcgcggcagcgatcgggtctactggatgacccaggagtacaacgcgccggcgcgctcgctgtacgacaaaatcggcagaagaagctcgtttatcgtttatacccgttaa

SEQ ID NO: 422894 - DNA, 705 bp, Serratia marcescens
atggcaatgaatcgttatggtcagccggtcggagaaccgatgccggattggcagccggctcgccgccccggcggcgcgacgctcggcgggcgtttctgctcgctggcgccgctcgagccgcagcgggattacgccgcgctgttcgaggcgtttcaactggcgccggacggccgcgactggacctatctgtccatcgaacggcccgatacgccggcggcgatgttgcagcatctggagacgctgcaggccaacccggcgctggttaatctgacggtgttcgacgccgccagcgatgcgccggtgggcacggtggcgctgatgcgcatcgacgaagccaacggggtgctggagatcggccacgtcagctggtcgccgttgatgaaacagcgctccagcgccaccgaggccatcgcgctgctgctgcgctatgccttcgacacgctgggctaccgccgctgcgagtggaagtgcgacagtcataacgcgccgtcgcgccaggccgcgctgcgctttggctttcgctacgagggcaacttccgcttcgcggtgatcgtcaaggggcgcagccgggataccgactggttcgccatcaccgccgaccgctggccgacggtgcggcaggcgctggcgcgctggctgagtgcggacaacttcgatgcgcaggggcggcagatagcccggctgcaggtgctgcgcggcgaatag

SEQ ID NO: 422895 - DNA, 1371 bp, Serratia marcescens
atggaattatcctcactgaccgccgtttcccccgttgatggacgctacggtgataaagtcagcgcactgcgccccattttcagcgaatacggtctgctgaaattccgcgtacaggttgaagtacgttggctgcaaaaactggcggcctgcgcagaaatcaaggaagttcccgcttttgacgccgacgcaaacgctttcctcgacaaaatcgtcgcggaattcaatgaagaagacgctcagcgcatcaaaaccatcgagcgcaccaccaaccacgacgtgaaagcggtcgagtatttcctgaaggaaaaagtggcggcggtgcctgcgctgcacgcggtgtccgagttcatccacttcgcctgcacctccgaagacatcaacaacctgtcgcacgcgctgatgctgcaaagcgcgcgtcaggacgtggtgctgccttactggcgcaagatcatcgacgcgctgaaagggctggcgctggaataccgcgatattccgctgctgtcgcgcacccacggccagccggcgaccccgtcgaccgtcggcaaagagttcgccaacgtggcttaccgcatggagcgccagtaccgccagctggagcgcgtggagatcatgggtaaaatcaacggcgcggtcggcaactacaacgcccacatcgtcgcttacccggaagtggactggcatcagttcagcgaagcgttcgtgacctcgctcggcatcacctggaacccgtacaccacccagatcgagccgcatgactacatcgccgaactgttcgactgcgtagcgcgtttcaacaccatcctgatcgacttcgaccgcgacatctggggctacatcgccctgaaccacttcaagcagaagaccatcgccggcgaaatcggctcttccaccatgccgcacaaggtcaacccgatcgacttcgaaaactccgaaggcaacctgggcctggctaacgccgtgctgggccacctggcgggcaaactgccggtgtcccgctggcagcgcgacctgaccgactccaccgtgctgcgtaatctgggcgtaggcctgggctacgcgctgatcgcctatcaggccaccctgaaaggcatcagcaagctggaagtgaaccaggcgcacctgctggacgaactggatcacaactgggaagtgctggccgagccgatccagaccgtgatgcgccgctacggcatcgagaaaccttacgagaagctgaaagagctgacccgcggcaagcgcgtggatgccgccggcatgcaggcgttcatcgatggcctggcgctgccggaagaagagaaaacccgtctgaaggcgatgaccccggccaactacatcggccgcgccaccaccatggtcgacgagctgaaataa

SEQ ID NO: 422896 - DNA, 627 bp, Serratia marcescens
gtggcgaagaattattatgacatcacgctggccatggcgggtatcagccagtcggcgcgtttggttcagcagttggcccatgaagggcaatgcaaccgcgaagcctttcagacctcgctgaaaagcctgctgcagatggacccgccctccacgctggcggtgttcggcggtgaagaacgcaatttgatggtcggcctcgaaaccctgatgggcgtgcttaacgccaacaacaaagggccgggcgcggaactgacccgctacaccatcagcctgatggtgctggagcgcaaactcaacgccaacaaacaggcgatgaacacgctcggtgaacgcctcagccagctcgaacgccagctggcgcacttcgatcttgagtcggacaccatcatcagcgcgctggccggcatttacgtcgacgtggtcagcccgctcgggccgcgcatccaggtgaccggctcgccggctatcttgcagaacccgcaggtgcaggccaaggttcgtgccacgctgctggccggcattcgcgccgccgtgctgtggcaacaggtcggcggcagccgcctgcagttaatgttttcccgtaatcgtctgttcaagcaggcgcaaaatatcgttgctcattgttaa

SEQ ID NO: 422897 - DNA, 1869 bp, Serratia marcescens
atgcacgtaaaaaacaagcagccgctgccggcggtaacgctggcggccatcggcgtggtgtacggcgatatcggcaccagcccgctgtataccctgcgcgaatgcctgacggcggaggagggcatcaccatgacgccggcctcaatctacggctttttgtcgctgattttctggctgctgacgctggtggtgtccattaaatacatttgtttcgtgatgcgcgccgacaacgacggcgagggcgggatcctgacgctgatgtcgctggcgatccgcaggctggatgcgcgctgggtgccggcggcggtgctgatcgggctggtgggcggcagcttcttttacggcgacggggtgatcaccccggccatttcggtgctttcggccatcgaggggctgcagattatcgcccccgaactggacagctttatcgtgccgctgtcgctgctggtgctgaccgcgttgttcgcgatacaaaagcgcggcaccggcagcgtcggcaaactgttcgccccggcgatggttatctggttcctgacgctcgcgctgctgggcatcggcggcattctgcagcaccctggcgtgctgcgggcgctgaacccttactgggcggtgaatttcttcctcgaatacaagacggtgtcgttctttgcgctgggcatggtggtgctgtcggtcaccggcgccgaagcgctgtacgccgatatgggccacttcggtaaaaagccgatccgtctggcgtggtttacgctggtggcgccggcgctggtgctgaactacttcggccagggggcgctgctgctgaccaatccggcggcgatcaacaacccgttcttcctgctggcgccgacctgggcgctgatcccgctgctggtgatcgccacgctggcgacggtgatcgcctcgcaggcggtaatctccggcgtgttctcgctgacgcggcaggcggtgcggctgggctacctgccgccgatgcgcatcatctatacctccgatcaggagtccgggcagatctacattccggtggtgaactggctgctgttcgcagcggtgctgatcgtgattatcagtttcaaacactccagcaacctggcctcggcttacggcatcgtggtgaccggcaccatgctgctgtcgtcgattttactgagcatcgtggcggtgaaaaactggggctggccgcgcgcgctgggcgggctgatgctggttgtcatgctgtgcatcgacgtaccgctgttcggcgccaacctgatcaagctggcgaccggcggctggctgccggtggtgctggggctgatgattctgctgatcatgctgacctggaagaccgagcgctcgcgcctgatccgccggctgcgcgacaaccaggaggggctgagcgcgctgatcgagtcgctggaggaggcgcccccgaagcgggtgccgggcaccgcggtgtttatggagcgcacgccgcacgcggtgccgctggtgctgttgcataacctgaagcacaacaaggtgctgcatgagcgcgtggtgctgctgaccatcgtcaccaccgacatgccgtacgtgcataacgtgcagcgggtggcgatcgaacagctgtcggcgagtttctggcgggtggtggcgagctacggctggcgcgagacgcccaacgtcacggacatcctttaccgctgcgggttggaggggatgagcttcaccatgaacgagacctcgttctttatgtcgcgcgatacgctggtgctgggcaagcggccctggtatttgcgcgtgcgcggcaaggtgttccagctgttgcagcgcaatgcgctgcgcgcgccggatctgttcgaaatcccgccgaatcgggtgatcgaactgggggcgcaggtggaattttga

SEQ ID NO: 422898 - DNA, 1101 bp, Serratia marcescens
atgtcagacaacagccagaaaaaagtaatcgtcggtatgtccggcggcgtcgactcttccgttaccgcctatctgttacagcaacagggctatcaggtcgctgggctgttcatgaagaactgggaagaagacgacgacgaagagtactgctccgccgcgaccgatctggccgacgcgcaagcggtctgcgacaagctgggcatcgaactgcacacggtgaactttgcggcggaatactgggacaacgtgtttgagctgttcctggaagagtacaaggccggccgcacgccgaacccggacatcctgtgcaataaagagatcaaattcaaagccttcctggagttcgccgccgaagatctgggggccgatttcatcgccaccggccactacgtgcgccgccaggacgtagacggcaagagccgcctgctgcgcggcgtcgacggcaacaaggatcagagctacttcctctacaccctgagccacgagcaggtggcgcaaagcctgttcccggtcggcgagctggagaagccggaggtgcgccgcatcgccgagcagctggagctggtcaccgccaagaagaaagattctaccggcatctgctttatcggcgagcgcaagttccgcgacttcctcggccgttacctgccggcgcagccgggcccgatcgtcagcgttgacggccagaccgtcggcgaacaccagggcctgatgtatcacaccctgggccagcgcaaagggctgggcatcggcggcctgaaagacagcagcgaagatccgtggtacgtggtggataaagacgtggccaacaacgtgctggtggtcgcccaggggcacgatcacccgcgcctgatgtctaccggtcttatcgcgcagcagctgcactgggtggatcgcctgccgctgagcggcccgttccgctgcacggtgaagacccgctatcgccagcaggatatcccttgcaccgtgaccccgctcgacagcgaacgcatcgaagtgcgtttcgacgagccggtctccgccgtcacccccggccagtcggcggtgttctaccagggcgaaatctgcctcggcggcggcatcatcgaacagcgcctggcgtaa

SEQ ID NO: 422899 - DNA, 447 bp, Serratia marcescens
atgttcaaaccgcacgtcaccgtggcctgcgtggtgcacgccgccggcaaatttttagtggtcgaagagaccatcaacggcaaagcgctgtggaaccagccggccggccacctggaggccgacgagacgctggtgcaggccgccgagcgcgagctgtgggaagagaccggcatccgcgccgcgccgcaggcgttcctgcgcatgcaccagtggatcgcgccggatcgcacgccgttcctgcgtttttgcttcgttatcgagctggaacagccgctgccgaccgagccgcacgacagcgacatcgatcgctgcctgtggctgagcgccgacgagatcttgcaggcgcccaacctgcgttccgcgctggtggcggagagcattcgcagctaccagcagccggagcgctacccgctgtcgctggtcggcagcttcgcctggccgttttaa

SEQ ID NO: 422900 - DNA, 339 bp, Serratia marcescens
atgaggaacacactgaccgcgctgctgttcaccgcactggcggccccgctcgccgcccaggccgccagcttcgactgcgccaaggcggcaggcagcgatgaacgcgccatctgcgccgaccgcacgctgaacgatctggacgtgcaaatggccacaaaataccaattcctgcgcggcctgttcgccatgggcgcgcgcggcgcgatgcaggacagccagcaggactggctggcaaaacgccagcggtgcggcggcgataccgcctgcctgctcaaaagctatcgcacccgcatcgccgagctggacgacatctaccggcgcatcgacaaaccgctgtaa

SEQ ID NO: 422901 - DNA, 657 bp, Serratia marcescens
atgcgcttatcatccgtaatctcaaccgttatgaaaaaattctctgttagaaatcacaaagttaaacgattcagcaagccgaataccgccaaacccgccgcgccgaaagggccgcgccgaattgtgttattcaacaagcccttcgacgtgctgccgcagttcaccgacgaagccggccgcgccacgctgaaagagtacatccccttccccgacgtttacgccgccgggcgtctggatcgcgacagcgaagggctgctggtgctgaccaacgacggccagctgcaggcgcagctcacccagccgggcaagcgcaccggcaaaatctattatgtgcaggtcgagggcgcgccgcaggagagcgatctggcgccattgcgcagcggcgtcacgctgaaagacggccccacgctgcccgccggggtggagttggtggccgagccgcagtggctgtggccacgcaacccgccgatccgcgaacgtaaatccatccccacttgctggctgaaaatcaccctgtatgaagggcgaaaccgccaggtgcgtcgcatgacggcgcatatcgggttccctaccctgcgcctgattcgctacagtatgggtaatctttcgctgggttcactgcaacctggtgaatggaaaagcatcgattccctgtag

SEQ ID NO: 422902 - DNA, 1254 bp, Serratia marcescens
atggaaagcaaagtagttgttccggcagaaggtaaaaaaatcacggttgacgcccagggtaaactggttgttcctcataacccgatcatcccgttcatcgaaggcgacggcatcggcgttgacgtgactcctgccatgatccacgtggttgatgcggccgttaaaaaggcttaccacggcgaacgtaaaatctcctggatggaaatctacaccggcgaaaaatctacccacgtttacggtaaagacgtgtggctgccggacgaaactctggacctgatccgcgactaccgcgtcgccatcaaaggccccctgaccaccccggtcggcggcggcatccgttctctgaacgtggccctgcgccagcaactggacctgtacgtgtgcctgcgcccggtgcgttactaccagggcaccccaagcccggtgaaacagcctgagctgaccgacatggtgatcttccgtgaaaacgccgaagacatctacgccggcatcgagtggaaagccggctccgccgaagcggacaaagtgatcaaattcctgcgcgacgaaatgggcgtgaaaaaaatccgcttcccggagcagtgcggtatcggcgtgaagccatgctccgaagaagggaccaagcgtctggtgcgtgcggcgatcgaatacgccatcaccaacgaccgtgactctgtgaccctggttcacaaaggcaacatcatgaagttcaccgaaggtgccttcaaggattggggctatgagctggcgcgcgaagagttcggcggcgagctgatcgacggcggcccatggctaaagatcaagaacccgaacaccggcaaagagatcgtggttaaagacgtgatcgccgacgccttcctgcagcaaatcctgctgcgcccggcggaatacgacgtgatcgcctgtatgaacctgaacggcgactacatctccgacgccctggcggcccaggtcggcggcatcggcatcgcaccgggcgccaacatcggctccgactgcgcgctgttcgaagcgactcacggcaccgcgccgaagtacgccggccaggacaaagtgaacccaggctctatcatcctgtccgcagagatgatgctgcgccacatgggctggttcgaagcggctgacctgatcgttaaaggcatggaaggcgccatcgccgccaagaccgtaacctatgacttcgaacgcctgatggaaggcgctaagctgctgaaatgttcagagtttggcgatgctatcgtagagcacatgtaa

SEQ ID NO: 422903 - DNA, 450 bp, Serratia marcescens
atgtataaaactatcttggttccagtcgatattaccgagccggaattaacgcagcaggtcatcccacatgtcaacgcgctcgccaggctcgaagactcccacgtccatttcctggcggtgatcccgtcacgcgccacctacgccgctttcggctttgccgccaccgcggcgatagaaaccaaagacgaaatcattgcggtagcgaccgaagggttggcgaaagcggccaaagaattcagcgtgcctgaagatagagtgaccacgcacgtggccgtcggcgatcctaaagatcagatcctggaactcgctgatgcgcttaacgcggagattattgtgatgggttccaaccgcccttctgcgatcacttacctcctcggctccaatgccaccgccgtcgtgcgccacgccaattgcccggtgctggtggtgcgtgaatcggccaatccttga

SEQ ID NO: 422904 - DNA, 228 bp, Serratia marcescens
atgaaaaaaacgcttgttcttcccgcgatcgccctggttgccatcgccgcactgtcaggctgcacacgcaccagctacgccatccatacccacgacggtcgaacgctcatcagtgacggcaagccgaaagaaacttctgccgggttgctcggttataccgacgccaatggcgttaaacagcaaatcaacaagacggaagtcaaagaggtttcagagatccctcattaa

SEQ ID NO: 422905 - DNA, 234 bp, Serratia marcescens
atgaaaagaaaacgactctttgccgcgcttcttgctgcaactacggtgatgttcattgcgggctgcgcttccaatcaggcgatcaaaacaacggatggcaagaccattgtcaccgacggcaaacctcaggtcgatacagataccgggttagtctcctatcgaaacgctgaaacgggcaaaacggaacagatcaatcgagaccagattgcaaacatgagtgagttggataactaa

SEQ ID NO: 422906 - DNA, 444 bp, Serratia marcescens
atgaaaataacgcattcaggctataaaaccggcgccgccaccttattggcggtgatgctcgcactggcattaacggggtgtgccaagagcactgtccccagccaaaccgttccggcgaataaaggggtcgatgatcttttcgccaaccttggtgaaccaaagacgcctgtgccgggaaaagagaaagaacagtattttgcccagttgctggccgtgattcaaagccatttgaaagatgcagaagcctactcaggcagaagttgtacattgcgcatcaagctggcgccggatggtctgctgatcagcgttcgggctgaacaaggggagccgcaactttgccaggccgcgataaaggcaatcgtcaatgcgcgtttgcctaagccgccaacggccgcggtttacgaagcggtcaacaacggcacgttggagtttcggccgatatga

SEQ ID NO: 422907 - DNA, 291 bp, Serratia marcescens
atgaaaataccgcaaatctccgccgccctgctgtttaccctgctgctggcgggctgccagttccacaaaaccgtgttcccgccgccgtatatcggcactccgcaagagatcagcacctacgaagtgaaagggctgaccttcgtcaccaccgtcaccttcagcggcctgtttgccgaagagctggtgcgcgagtacgcgcagaaacaccactaccgctattacgtggtcacgatgcgcagcaacggttttaaagatcgaagcgagcgcgtgagcgcaatgatgtatcggtag

SEQ ID NO: 422908 - DNA, 420 bp, Serratia marcescens
atgcttgtgcgccttgctgcggaaaccgatgccgcagccctgatcgccctggacagcgttgctcagaatgcgccgcagcgcgcggcgcaaatccgcgcctggtgcgcgcagggcatctgttttcttgccgaggaacagggcatggtgatgggctatggggtgctgcactatcacttcttcggctgcggctttatcgagatgttgatggtcggcgagcgctatcgccgccggggcgtcgggcaggcgctgattgcggcgttgaagtcccattgccggcaaccgaagctgttcacctccaccaatcgctccaacctgccgatgcagcggctgctgctgaacgccgggtttgtcgccagcggccggattgacaatctcgatgacggcgatccggagcaggtcttttttatcccggcgcgctga

SEQ ID NO: 422909 - DNA, 1116 bp, Serratia marcescens
atgatgtctaaaggcatttccaagggattctttattctgatcctgttcatcgttaccgccgcctttctcgacgtgctggggccttactactcctcggtgttgtgggcggtcattctggcggtgattttccatccggtaaaaaagaaactgaagcagtacgtcggcgaacgcaacggcgtggtgtcgctgctgacggtggcgctgatctgcctgatcgtgttcacgccgttggcgatcatcgcctcgtcgctggcgatggaattcaacgtgatctacaccaagctgcagaccaacaacagccagttgccgaccatgctggcggactttatgcgccacctgcccggctgggcgcagcgcttcctggcggaacataacctcaacagcgccgccgagatacaaaagcagctttccgaggtggcgctcaagggcgggcaatatctggcgggcagcgtcttcctgatcggcaagggcaccttcaacttcgtcgtcggcttcggcgtgatgctctacctgctgttcttcctgctgaaagacggcccctatctggtgaacctggcgctcgaagcgctgccgctctcccagcacgtaaaacaccacctgttcgtgaagttcgccgccgtctcccgcgccaccgtcaagggcacggtggtggtcgccgtggtgcaaggcgcgctcggcgggctggcgttttactttaccggcatcgacggcagcctgctgtggggcgcgctgatggcgttcctgtcgattatcccggccgtaggctccgccatcatctgggtgccggcggtgatctacttcttcgccaccggcatgctatggaaagccattttcctggtagtgttcttcgtggtggtgatcggcctggtggacaacattctgcgcccgctgctggtgggcaaagacaccaaaatgccggactacctgatcctgatttccaccctgggcggcatggagatctacggcatcaacggcttcgtcatcggccccttgatcgccgcgctgttcatcgcctgctggaacattctgtccggccgcgacagcgaggagaacatcgaagagatcgacgaagcgtttatcgaggaaggcaaaaatcatcccgacgcggtggagtaa

SEQ ID NO: 422910 - DNA, 138 bp, Serratia marcescens
atgactgaacacaaacgactcggcgtcatcgagaagacgctactgatcgcctttgccggcctgctggtgtatttcgcggccaccggcgccttgtcattgtcgggtctcgatcatcattggccttatccttcgcgatag

SEQ ID NO: 422911 - DNA, 1212 bp, Serratia marcescens
atgaccgcgattaaaccggacgccatcgaccgcgttctccccgccgccacgccctggctagccgtcatcaacgtgctgttcgccggcatcgccgcggcgctgcacgtgggcaaggccaccatcgcgctgccggcgctggaggccgagttcggccgttcgctcgaagcgctgagctgggttatttcggcctttcccttcgtcggggtgttcggcggcatcgccgccgggctgctggtgcgccgctggggcgaccggcggctgctggcgctcgggctgctgatcatcagcgccgccagctttaccggcgccgcgctgcacgacttcagcgggttgatcgtcagccgctttgtcgaaggcctcggcttcgtgatcgtggtggtcgcctcgccggcggtgctgaaccgcatcgtcgccccggcgcagcgcagcctggtgttcggcatctggagcaccttcatgccggcgggcatcgccatttcgctgtttttcggcccccacctcgccggctggcagcagagttggcaggccggtgcggcgctgacgctgctggccgccctgctgctgccgctgaccacgtcccgccgcaccgccgaggcgcacgcgccgtccttgccgctgcggcaagcgctgggcgccctgctgcgggcgcgccgaccgctgttgctggcgctgatgttcgccgcctacaacctgcaatttttctcggtgatgaccttcctgccgatcttcctgatgcagcgcatcggcctgtcgctggcggccgccggcggtatcagcgcggcggcggtggcggcgaacatcatcggcaacctcgccgccgggctcttgctgtcgcgcggtctgcgcgccggtagcctgctcgcggccaccagcctgatcatcggcgtcttcggcatcggcattttcttgccgataacgcccaacgccctgctgatcccgctgtgtttcctgttctgcgccatcgccggcatgctgcccgccaccattctggccgccacgccggcggcgacgccggaaccgacgctgctgccgctgagcctggggctggtgatgcaggggaactatctcggccaggtgatcggcccggttgcgctgagcgccatcgtggccgcagccggttgggcggccccggcctggctggtgctggcggcggccgtgtcaggggcgctgttggcgctggcttttctcagccggcggcataaggcggggtga

SEQ ID NO: 422912 - DNA, 459 bp, Serratia marcescens
atgtcagagatgatgaacgagagtggggcgccggccattgaatggagctatggcggccggggtgatgatatcagcagcagcctgagcctcgacacggttgaggagcagccgcagggtttcttgatgacggtcgatcggccggtgcagatctttaaagatgcgctgtcgccgatgatggcctttgtcacgctgctgcgcccgctgtacgccaaaacgagcgagggtttccagtacgtgccggtttccaatccctggaccgacgtgcagcgcctgccggccagcgcgggctatctgggcgtgcaggtcaacgccgggctgttcttccacggcgccaagccgacgcactataaagatcgcgacggccagatgaaaccgatcgacggcggcacgcttttgcagcacatcaccgtgctgcatcaggtggcgcagccgctcggcccgggtgaaggcgccgtctga

SEQ ID NO: 422913 - DNA, 417 bp, Serratia marcescens
atgtacagcgacaacgagaaaaagttttatatcatcctcaaccgcaatcacgaaccggccacgctgtttaacgcctcctgccatctgacggcgggcatcaccgatctgatcgaacagcgccagtttcaccactacccgagcagcctcgacggcgtcagcgccaatatgagccactacccgatggtgatcctgcaggctaaaaacagcagccagctcagcaacctgatcctcaaatgcaaggaggagggtgtactgtccaacttcttcaccaccaccatgctgtcgcactccgccgaacagcagatcgccgacaccgccaacaccccttacgaacagctggatttcgtggcggtggcgctctacggcgacgccgaacagcttaagccgttgaccaagaagttctccgtctaccgctga

SEQ ID NO: 422914 - DNA, 351 bp, Serratia marcescens
atgccattccagggaagctgccactgcggcgccgtcaccttctccgtggacgccgaactgcccaccgaggccctcagctgcaactgttcgatctgccgccgcaaagggctgctgctgtcgttcttccccatcagcgctttcacactcaacagcggccaggaccagctcagcgcctacaccttcaatcagcacaagatccgccatcagttctgccgagtctgcggcgctcagcccttcgcctacggcaccgcgccggacggcgccgcgatgtgcgccgtcaacctgcgctgcgtgcctgacgtcgcgctggatgcgttgcagatccacagttacgacggcgccagcatctga

SEQ ID NO: 422915 - DNA, 210 bp, Serratia marcescens
atgttagaacattactatccggccaatatgggcgccaaaccggtcacggacgaacagcataaacggctggtggcggtgcaggcggcgctggaactgatcaaggccacgctgtcggataccaacgacggcaacggcgtggacttccagctgaaggcggcggagaagcacatcggcccgatggccgacgccattcaggaagccctgaagtaa

SEQ ID NO: 422916 - DNA, 1095 bp, Serratia marcescens
atgttccgcttctgcctcttttctttcttgttgccgcggcgccggcgcctcacccgcttggccggtgtcgcgctgtttctcagcggcgtcatgcaggcgcaggccgcgcagcgcatcgacttctcgccggatgccgccggcgcttatcctgagggcatcgcctggaatgcgcgcgccggtgcgttcctggtgtcgtccctgcgtggcgggcagctcggcctggtctacccggatggccgctatcggcgcttttcgaccggcagtgggcttatcaccacctccggcatgctggtggacgccgagcgcaaccgggtgctggtgtgcaacgaagacgtgggcgtatccctcaactcagcctccggcacgcgcaatcgcgtggcgcaggtgctggagttcaatctcgataccggcgcgctgcagcagacgtacgatctttcatcgttaagccgtgggccgacgctggccaacgatctggcgctcgacgtgcagggcaatatctacgtgaccgacagcttccagccgcagatttacaagattgaccgggcaacgcgccaggtgtcgattctggtgcgctcggcgcgtttgatccccgccgacgcccccgccgcagcgcagggcacgcagccttatctcaacggcatcgtgtatcacccggatggctatctgattgcggcggactacacccgcgggctgctgtggaaggtgacgctggataacgcgcctgcaataagtgaaatcaggctgccgcagcggctgaaagggccggacgggctgcggctcaaaaacgcccatgaattggtgatcgtacagtcttttccggggagaaaagggggcatgtccggcaacgtaacgctgctttcctcgaacgacggctgggccagcgcgcatatcacggcggtcgccacgccgccggaattggatgggccgaccggcgccgcgctgcgcgatggcgaagtgtgggtggtcaactcccgttacccccgtttgtttgccgacgtcgctcaggcggagagcgtcaggacattcagcatcgtcaaggtggcgttagagcggaggcccgccgatcggcgacggttgccaaccctgccggaatag

SEQ ID NO: 422917 - DNA, 645 bp, Serratia marcescens
atgagtctgatgttgaagggtgaaaagattgaccgtaaccgctttaccggcgagaagattgaaaacggcagctttatgctgtgtgatttttcgggcgccgatctgaccggcaccgagtttatcggctgccagttttacgatcgtgacagccgacagggcggcaatttcagccgtgcgatactgaaagacgccagcttcagaagctgcgatttgtcgatggccgacttccgctacgccagcgccctggggctggagatccgcgaatgccgcgcgcagggcgccgattttcgcggcgccagttttatgaacatgatcaccagccgcatcgggttttgcagcgcctatatcaccaaaagcaacctgagctacgccaacttcgccaaggtggtgctggagaaatgcgagctgtgggaaaaccgctggcacggcgcacaggtgctcggcgccagcttcagcggctccgatctgtccggcggcgagttctccggattcgactggcgcgccgccgacgtcacccagtgcgatttgagcaatgcggaactgggcgaattggatttacgcaccaccgatctgcagggcgtcaaaatggacagccaccaggccgcgcagctgctggagcggctggggatcgcgatcgtcggctga

SEQ ID NO: 422918 - DNA, 402 bp, Serratia marcescens
atgattggcaaaagaacactgacgctagctgtgctgacactcagtttggcaggctgccagccggcaccaccaagctatgtggaaaacgcgaatgccttgatcgccaaacagatcagcgcaattagcctgcaaacggcacagtgcaaatttgcccaagacgggcactattggatttcggcttgctcgttgggtactgcgcacaccgcaccggtgttcgccttgttcgaacaggaaggcgttatgcaggccaacgacaatctggccatcgccgtcgtgccgctcaacgagcaagctcgccacctctcacaggatccgcgcttcactatcccggtaatgcaacgccgcattccggtagacgcggataaagccttcaatcgcttatttgcccaatcatcgccttaa

SEQ ID NO: 422919 - DNA, 213 bp, Serratia marcescens
atgtctactaaaatgactggtttggtaaaatggtttgatgcaggtaaaggcttcggctttatcaccccggcagacggcagcaaagacgtgttcgtacatttctctgctatccagagcaacgatttcaaaacgctggacgaaggccaacaggttgagttcactatcgaaaatggcatgaagggcccttctgccggcaacgtggtcgcgttataa

SEQ ID NO: 422920 - DNA, 678 bp, Serratia marcescens
atgagcactccagccaacttcaacggccagcgtcctgttattgatgccaatgacgcggtcatgctcctgatcgaccaccagagcggcctgttccagaccgtcgccgacatgccgatgaccgaactgcgcgcccgcgccgccgccctggccagcatcgccaccctcagcaaactgccggtgatcaccaccgcttcagtgccgcagggcccgaacggcccgctgatcccggaaatccatcagaatgcgccgcacgcgcaatacgtcgcccgcaaaggggaaatcaacgcctgggacaacccggacttcgtggcggcggtcaaagccaccggccgcaagacgctgatcatcgccggcaccatcaccagcgtctgcatggccttcccgtccatcagcgcggtggccgaaggctataaagtgttcgcggtgatcgacgcctccggcacctactcgaaaatggcgcaggaaatcaccctggcgcgcgtggtgcaggccggcgtggtgccgatcgacaccgccggcgtggcctcggagctgcagggcagctggaaccgcgccgacgctcagcagtgggccgaggtttacaccaaaatcttcccggcctatcaactgctgatcgagagctacctcaaagcgcaggacgtagtgaaaaacaacgaactgctggactcccagcgttaa

SEQ ID NO: 422921 - DNA, 429 bp, Serratia marcescens
atggcttatcggcatatcgttgtcgccacggatctcagcgaagacgccgagttcctgctgggcaagggcgccaggctggccgccgcgctcaatgcccaactttccctgatctatatcgacattcatcgcgccggttattacgtcgatctgggcgtgggcgattataactacaccgatcgcaccttttcagagcgggtgaagaatatgctcaatgcgatcaaagggcagtcgtcgtatccggttgaagaggtgatcgtcagccgcggcgcgttgacggaggaactgaaccgggtggcgaaggagaaagggttcgatctggtgatcttcggccaccatcacgatgtctggagccgactggtctcttcggcgcgtcaggcgatcaacgagctgaacgtcgatctgctggtgatccccatcgagaaaaaatag

SEQ ID NO: 422922 - DNA, 756 bp, Serratia marcescens
atgcgttttgacaataaagtcgtggttatcaccggtgcgggcaatggcatgggggaagcggcggcgcggcggttctccgccgagggcgccatcgtggtgctggccgactgggctaaagaggcggtagacaaggttgccgcttcgctgccgaagggccgggcgatggcggtgcatatcgacgtgtccgatcacgtcgcggttgaaaaaatgatgaacgaggtggcggaaaaactgggccgcatcgacgttctgctgaacaacgccggcgtacacgtggcgggcagcgtgctggaaaccagcgtcgatgactggcggcgcatcgccggggtcgatatcgacggcgtggtgttctgctccaaattcgccttgccgcatctgctgaagaccaagggctgcatcgtcaataccgcgtcggtgtccggcctgggcggcgactggggcgcggcctattactgcgcggcgaaaggcgcggtggtcaacctgacgcgcgccatggcgctggatcacggcggtgacggcgtgcgtatcaactcggtctgcccgagcctggtgaaaaccaacatgaccaacggttggccgcaggaaatccgcgacaagttcaatgagcgcatcgcgctggggcgcgcggcggagccagaagaagtggcggcggtgatggcgtttctggccagcgacgacgccagctttatcaatggcgccaacattccggtcgatggcggggcgaccgcctcggacggccaaccgaagatcgtctaa

SEQ ID NO: 422923 - DNA, 1281 bp, Serratia marcescens
atgactgaacacgtaaaaagctactatgcggccacggccaacgcacatcagccctatccgcaactgaacgaatcgatcgagtgcgacgtctgcgtgatcggcggcggctataccggcctctcctccgcgctgtttctggtggaagccggctataacgtggtcgtactggaagcggcgcgcatcggtttcggcgccagcggccgcaacggcggccagttggtcaactcctacagccgggacatcgatgtgattgaagagcgctacggcgcggaaagcgcccgcctgctcggcagcatgatgtttgaaggcgcggagatcatccgcagccgcatcagccgctacgccatcgactgcgactatcgccccggcggcatcttcgccgcgctgaacaacaagcagttccatgcgctgatcgagcagaaacgcaactgggaacgttacggcaatacccagctcgagctgctcgatgcggaccgggtgcgccaggaggttgccagcgatcgctacgtcggcgcgctgctcgatcacagcggcggccacatccatccgctcaacctggcgctgggcgaggccgaggcgattcgcctgcagggcgggcgcatcttcgagcaatcggcggtgacgaacatccgccacggcgaaccggcgctgatcagcaccgccaacggccaggtgaaggcgcgtttcgtcatcgtcgccggcaacgcctatctgggcgacaagctggagccgcggctggccaagcgcagcatgccgtgcggcactcaggtggtggccaccgagccgctggcgccggagatcgcgcaggcattgatcccgcagaactactgcgtggaagactgtaactacttgctggattactaccgcatcaccgccgatcatcgcctgctgtacggcggcggcgtggtgtacggcgcgcgcgatccggacgacatcgacaacctgatccggccaaaattgctgaagaccttcccgcagctgaaaggggtgcgtatcgactatcgctggaccggcaacttcctgctgacgctgtcgcgcatgccgcagttcggccggctggagaataacgtctactacatgcagggctacagcggccacggcgtgacctgcacccatctggcgggcaagctgatcgccgagctgatgcgcggcgacgccgaacgcttcgacgccttcgccaagctgccgcacctgccgttcttcggcgggcgcaatctgcagatcccgttcaccgccatcggcgcggcctactacacgctgcgcgaccgcatcggcgtctaa

SEQ ID NO: 422924 - DNA, 1497 bp, Serratia marcescens
atgaactttcaccatttgcagtattggcaacaacgggcgcaggccctgaagattgagcaccggctgtttatcgacggccgctaccagccggccgccgcggggaaacgtttcgccgtggaagatcccgccgggcgccgtgagctggcgcaggttgcgcgcggcgaagccgctgacatcgatcgggcggtcagcgcggcgcgcgccgtctttgaacgcggcgactgggcgcaggccgccccggcgcagcgcaaagccacgctgctgcgcttcgccgatctgatggagcagcatcacgaagagctggcgctgctggaaacgctggacaccggcaaaccgattcgccacagcctgcgcgacgacgtgccgggtgccattcgctgcattcgctggtacgccgaagcgatcgataaggtctacggcgaaatcgcccccaccggccgcgatgcgctggcgctgatcgagcgcgagccgatcggcgtagtcggcgccatcgtgccctggaacttcccgctgctgctggcctgctggaagcttggcccggcgctggccgccggcaacagcgtggtactcaaaccctccgaaaaatcgccgctcagcgccatcctgctcggcaagctggcgcagcaggccgggctgccggacggcgtgctgaacgtggtgcccggctatggccacgacgccggcaaggcgctggcgctgcaccgcgacgtcgacgccctcacctttaccggctccacgccggtggcgaagcagctgatgatctacgccggcgaatcgaacatgaaacgcgtctggctggaggccggcggcaagagcgccaacatcgtcttcgccgactgcccggatctggatcaggccgcccgcagcgctgccgccggcatcttctataatcaggggcaggtgtgcatcgccggcactcgcctgctggtcgaagcaagcattgagcaagcgttcctgcaggcgctgcgcaaacacgcggcggccttcgctcccggcgatccgctcgatcccgacacggtgatgggcacgctgatcgacagcggccactgcgaaaaagtggccggctatatcgatcgggggctgagccagggcgccgcgctgttcctcgacgggcgcgaccatccgcagggcgaccacgccggttatctggggccgaccatcctcacccaggtgaacaacgccatgagcgtggcgcgcgatgaaatcttcggcccggtgctggcggtgactaccttcgacgacgagcaacaggcgctgcagctggccaacgacagcgactacggcctcggcgccgcggtctggacccgcgatctggctcgtgcgcaccgcatggcgcgccagctgaaagccggcacggtattcgtcaacaactacaacgacggcgacatgaccgtgccgttcggcggctacaagcagagcggcaacggccgcgacaaatcgctgcacgcgctggacaagttcaccgaattgaaaactacctggatctcgctggaataa

SEQ ID NO: 422925 - DNA, 558 bp, Serratia marcescens
atgagcgacgtcagcttggcaccgggaaaacgtctgtcgcagatccgtcaacaattagggttgtcgcagcgccgggtcgccgaactgtctgggttaacccacagcgccatcagcactatcgagcaggacaaggtcagcccggccatcagcacgctgcaaaagctgctgacggtgtacggtctgtcgctgtcggcgtttttcgccgagccggaaaaaccggctgaaccgcagatcgtgattggcagtgacgatctgatcgaaatcggcagccagggcgtttcgatgaagcttattcacaacggcgatccgaaccgcacgctggcgatgatgatcgagacctacgaaccgggtaccaccaccggcgagcgcatcaagcatcagggggaagagatcggcacgctgctggagggtgaagtggtgctgcaggtcaacggccagagctatcacctgctggccgggcagagctacgccatcaataccggcatcccccacagtttcagcaacacgtcggcacgcatttgccggattatcagcgcccatacgccgacgacattctga

SEQ ID NO: 422926 - DNA, 762 bp, Serratia marcescens
atggacaatatatttaacagaccagtcatcggtgtcgtcatgtgcaggtataggttaaacgggcacctcacacagaccttgcaagaaaagtacctgaatgccgttatcaccgccggcggcttgccgatcgccctgccgcacgcgctggcggagccggaaatgctggcggaactgctgccgcgcctcgacggcattatgctgccgggcagccccagtaatgtgcagccgcacctttatggtgaaaacggcgatgagcctgacgccgatcctggccgagacgcgttgagcctggcgctgatccgccaggcgttcgacaggcgcattccccttttcgccatttgccgcggcatgcaggagatggtggtcgccacccaaggcaccctgcatcgccgcctgtacgaactgcccgagctgttggagcatcgtgaagaccacgacctgccgctggaacagcaatacgcccccgcccacgaagtcatcgttcaggaaggggggctgctttcgcaactgataccggattgcaacagattctgggtgaactcgctgcacggccagggcgccaaaaccctgggcgcgagcgtgcgcatcgaggcgcacgccgccgacgggctggtggaggcgatcagcgtgcgcgatcagcccttcgcgctcggcgtgcagtggcacccggagtggaacagcgacgaatacgccctgtcgcgcctgttgtttgatggtttcatcaccgcctgtcggaactatcaaaaggaaaaacgcccatga

SEQ ID NO: 422927 - DNA, 1419 bp, Serratia marcescens
atgcagaccaacatcgtagaagtggaaaactttgttcagcacagtgaagagagacgaagtagcgcgttccagcgcgaagtgaagaagtatctggaacgttatccgttaacccaacatgtcgacgtactgttgaccgatctgaacggcagcttccgcggcaaacgcatcccggtcggcggcctgaataagctggagaaggggtgttacttcccagcgtcggtatttgcgatggatattctcggcaacgtcgtcgaagaggccgggttggggcaggagctgggtgagccggatcacgtatgcgtgccggtgccgggcacgctgacaccgtcggcggcggacccgcaatatattgcgcaggtgctgctcaccatgctggatgaagatggcactccctttgacgttgaaccgcgcaatgtgctgaaccgagtgtggcagcgtttgcgtcagcgcgggctttcccccgtggtagcggtagagttggagttctatctcatcgatcgtcaacgcgacgcggagggctatctgcagccgccgtgcgcgccgggcacgcaagagcgcaacacccaaagccaggtgtattccgtcgataacctgaaccatttcgccgacgtgctgagtgagatcgacgaactggcgcgtttgcagggcattccggcggacggcgcggtggcggaggcgtcgccggggcagttcgaggtcaacctgcaccataccgacgacgtgctgcaggcctgcgatcacgcgctggcgctgaagcggctggtgcgcatggtggccgagaaccacaacatgcaggcgacctttatggccaagccgtatgaggagcatgccggcagcggcatgcacgtgcacatcagcatgctgaacgcgcagggcgacaatgtgttcgccgacgacgacggcgaagactcggcgctgctgaaacaggcgctggcgggcatgatcgccctgatgccgtcttcgatggcgctgctggcgccgaacgtcaacgcctatcgccgcttccagcccggcatgtatgtgccgacccaggcctcctgggggcataacaatcgcaccgtggcgctgcgcattccctgcggcgatcgcgataaccaccgcgtggagtaccgcgtggcgggcgccgacgccaacccttatctggtgatggcgaccattctggccggtatcgtctacggcctggaaaccgcgctgccgctgcctgagccggtgaccggcaacgggctggagcaggacgggctgccgttcccgatccgccagagcgacgcgctgtacgaattcgaacatcagccggtgctcaatgcactgctgggcgaacgcttcagccacgtctatctggcctgcaaaaccgatgaactggtgcagttcgagcgcctgatcaccgaaaccgaaatcgagtggatgctgaaaaacgcctga

SEQ ID NO: 422928 - DNA, 189 bp, Serratia marcescens
atgactcagtcattcccatgcgcagacgtttgcctgtgccgcagtgcctacgggccggtcgccggccgcccgacagtgacctcaacccgttttccccgccgcctgagcagcagtttccccgcggcctctctgaatgacgttgcacggttgacagcagaggaccaagaggggaaatgccatgacgattaa

SEQ ID NO: 422929 - DNA, 1371 bp, Serratia marcescens
atgacgattaaagccatcgacggcggcccggcgggcaaaccgcagctgcgcaaatccctcaagctgtggcaggtggtgatgatgggcctggcctatctgacgccgatgacggtgttcgataccttcggcatcgtctccggcctcaccgacggccatgtgccgacctcctatctgttggcgctggccggcgtgctgttcaccgccatcagctacggcaaactggtacgccagtttcctaccgccggctccgcctacacctatgcgcagaaggcgatcaacccgcacgtcggttttctggtggggtggtcatcgctgctcgattatctgttcctgccgatgatcaacacgctgctggcgaagatttacttgaccgcgctgttcccggaagtgccgccctgggtgtgggtggtgggcttcgttatcctgattaccgccatcaacctgaaaagcgtcaatctggtggccaacttcaataccctgttcgtgctggcgcaggtggcgatcattctggtgttcatctacctggtggtgcgcggcctgcacaacggcgaggggatgggcacggtgtggagcttgcggccgttcctcagcgagaatgcgcacctgctgccgatcattaccggcgccactatcctgtgcttctcgttcctcggctttgacgcggtcaccacgctgtgcgaagagacgcccgacgccgccaaggtgatcccgcgcgccatcttcctgaccgcgctgtacggcggggtgatctttatcagcgtgtcgttcttcatccagctgtttttcccgaccattcagcgtttccaccagcccgatgctgcgctgccggagatcgcgctgtacgtcggcggcaagctgttccagtcgatcttcctgtgcgtgacctttatcaacacgctggcatccggcctggcgtcgcacgccagcgtgtcgcgcctgctgtacgtgatggggcgtgacaacgtgttcccggagaaattcttcggctacatccaccctaaatggcgcacgccggcgctcaacgtgctgatggtcgggctggtggcgctgtcggcgctgtcgttcgatctggtgaccgccacggcgctgatcaactttggcgcgctggtggcctttaccttcgtcaacctgtcggtgatcagccacttcttcattcgcgaagggcgcaacaaaagctggaaggatcgcttcaacttcctgttcctgccgctggtgggggcgctgacggtgggggtgctgtggctgaacctggagaagagttcgctgactatggggctgatctgggcgacgctgggcttcggctatttggcctggctgacccgacgctttcgccagccgccgccgcagctcgagcggcagccgcagcaataa

SEQ ID NO: 422930 - DNA, 894 bp, Serratia marcescens
atgcccgctttgccctcgcgtacccgcgccacgctgttcggtttgttggccattgtgctgtggagcagcgtcgtcggccttattcgcagcgtcagcgaagggctagggccgatcggcggcgcggcgatgatctacagcgtcagcgcggtgtttctgctggtggcgcttggcgtgccgaaatggcgcagctttccgcggccttatctcatcgtcggcagcctgctgttcgtcagttatgagatctgcctgtcgctgtcgctcggctacgccaatacccgcctgcaggcgatagaagtgggcatgatcaactacctgtggccctgtttcaccgtgctgatggcgttggcgctcaacggccaacaggcgaaatggtggctgctgccggggctgctgctgtcgttgttcggcatcggctggatcatgagcggcgagggcggctggtcgccggcgcagatgctggccaacgtgcgcagcaatccgctcagctacgggctggcgttcagcggcgcggtgatctgggcactgtactgcaacctgaccaagaagatcgcccagggcagcaacggcgtggtgctgttcatcgtgctgaccgcgctggcgctgtggctgaagtatgccttcagcgcggaaagcggcatgcagttcagcgccggcgtgaccgtgacgctgctgtgcgccggggtggcgatgggggcggggtatgccgcctggaacgtcggcattctgcacggcaatatgacgctgctggcgaccgtctcttattttaccccggtgctgtcggcggtgttcgccgcactggtgttgcacacctcgctgaccgtcaatttctggcagggcgtggcgatggtcactctcggctcgctgatctgttggcgggcaacccgtggaaattaa

SEQ ID NO: 422931 - DNA, 273 bp, Serratia marcescens
atgagaagcgacattcaatttattcaacaacccgaaatcgacgtgcatcactacgagcgcggcgataccgtgcgcctgaccacggcgaatctacggcatgaatatcagctcgacgtttatattttgcgccgcgacgacaagctgatttatggttcggtcgttgcggcggcgcccaagaccgatatcccggtcgccagctgggaggtcaaaaacggcgaagaggtggcgttccgccaggaaaacatcgccaaagcggtgccggcggtgaactga

SEQ ID NO: 422932 - DNA, 822 bp, Serratia marcescens
atggctgatagcaaagacagtcaatatgtctccgactggtggcaccagagtgtcaacgtggtgggcagctaccacacccgcttcgggccgcagctgaataacgacgtgtatctcgaatacgaagccttcgccaagaaagactggttcgatttctacggttacgttgacgtgccgaagttcttcggcgtgggcaataccccggatcgcggcatctgggacaaaggttccccgctgtttatggagattgaaccgcgcttctccatcgacaagctgaccggcaccgatctgagcttcggtccgttcaaagagtggtacttcgccaacaactacatctatgatctgggccacaacgccgacggccgtcagaacacctggtacatgggtctgggcaccgatatcgacaccggcctgccgatgagcctgtcgatgaacatctatgccaaataccagtgggaaaactaccaggccgccaacgagaacagctgggacggttaccgcttcaaggtgaaatacttcgtgccgctgacccaggtgtggggcggcaacctgagctacatcggcttcaccaacttcgacttcggttccgatctgggcaaggacagccattgggttgacggcaccggcaaacaggtgcgcaccagcaactcgatcgcctccagccatattttggcgctgaactacgatcactggcactattctttcgtggcgcgttacttccataacggcggccagtggcaggatggcgcggatatcggcaccccgcagggcccgatcaagtctaccggctggggttattacctcgtggtcggctataacttctga

SEQ ID NO: 422933 - DNA, 486 bp, Serratia marcescens
atgaacaaacgtcgtacgaccctcacggtgttggcgctgatcgcgtcgctggggttgtcatccgccccggccctggctgacaaaggcggcaatggtaacggcaacggtaatggccatggcaacagcggcaatcacggtaatagtggtaaccatggcaacaacggcaacaaaggcaataaagataaaggcggctatagaaacgacgataatctggtttccgtcagcctctcgcgcgaccgcgcccgttcgctggcgcgcaactacggcctgaccggctacagcgcgctgccaccgggcatcgccaagaatctggcgcgcggtaaaccgctgccgccgggcatcgccaagaaagtggtgccttactcgatgctgcgcgatctgccgcagtacccgggttatgagtggcgtatcgccggcgacgatctggtgctggtcgcgctcagcaccgcgattgtcgcctctgtgatcaacggcgtgttcgactaa

SEQ ID NO: 422934 - DNA, 531 bp, Serratia marcescens
atgttcagggcgttattgatagcctgctgtttgaccagttttcccgcgttggcagagggcgccgccgctatcggcgaactggtgaaccaacggctgtcgttgatgaaagacgttgccggttacaaggcgcagcagcatttgccgatcgaagacctggcgcaggaggcgaaggtgttggccagcgcgcaggcggaggcggggcgtttggggttggagccggcgtcggtacggccttttatcgccgcgcagatggacgccgccaaggcgattcagtaccgctatcgcgccgactggctggcgagcccggaacccggctggcagccacggccgttggcgcaggtgcgcccggagattgcgcagttgagcagccagatattgcaacggctggcggagcggctgcgcgccggcccgctcggcgaggcggatcgggcggcgtttatggcgtccgtggatcagatgaatctcagcgccgccgacaaacggcggctggcggatgcgctgctggcggtcagaaccggcagcgcaggctga

SEQ ID NO: 422935 - DNA, 1536 bp, Serratia marcescens
atgtctgtaacaccgttaaactggcgcgctgccggcgccctcgccgaacaattgctggccggctggcaacagcgtggcgaacccggcggcgccatcaccctgtttgacgccgaacaactccgcgccaccgcctgcgccggcctggccgatctggcgcagaatacccccttcaccgtcgacagcgtggtgcgctacgcctccgtgaccaaacatatcttcgccgcgctggcgctgaacgccaccggccgcgccattcggctcgatcagcgcctgggcgaactgctgcccgccctgcagcctgcgctggcagacgtcaccgtcggccaggcgctggacatgaccggcggcctgcccgacgtgcgcgaaacgctcggcttgctcggcatcccgctgcacgccgtcagcgaggcgcagccggtcatgcagtttgtcgaagggctggagaagttgaactacgaagccggcagcgaagtcgcctacagcaataccggctatcggctgctggaggccgcgctgcgcagcaaagggtatgatttcgaccagctggtacaacggcacattgcccggccgctgcaggtacagatgcaagcgccggaaagctggttcgacgtggtgccggggttggtgccgggttactggcgtgcgccgcagggctggcaacacgccagcgccggcctgcatctttccgcctccggcagcctgaccggcagcctccacgccctcacccgctggctgcaaacgctgttggccgacgagggccccggccagggcgtgctggcgcaactcggcgccccgcgccgcctcaatcagggccagctcagcgcctatggcctggggctggcgcaaaccccgctgggccgccgctgcttgctcggccacggcggttcccacgccggttacaaaacctatttcctgctggcgcccgatcgccaggtcggcgtcgcgctggtggccaaccgcgaagactgcgacagtttcggtatggctttgcaggtgatagcggcgctgctgggcgaaccactgccgcagcgcagcacggcgatcccagacggcctttacgccgcgctggccgaaccacactggttggaggtcaaagacggcaacctggcctatttgggcagcggtgaaccgctgtatcagggcgaagacggctacgcggtgtcgctgtccgcccatatgccaatcaaattgaagtggaccggcgaagcggtcgagggtgaagtcgggcatgtggcgcgccgttttctgccggtcacggccaacggcgactgcctgaagcatgtgcaggggctgtggtatcacccgcactatcgcaccgcctttgaaattcgtggcgatcgggtgcatatcggcgtcggcccggcggcgcagaccgggacgctcagcccgctcggccagggccgcatgctggtggagtgccaggacggaccgtggttgaaacgcttttgcctctatttccgcggttacaacgtggatctcatcgccaaccgcagccggatgctgaccttccgccgcagcgccgtcggccgcgactga

SEQ ID NO: 422936 - DNA, 804 bp, Serratia marcescens
atgaccattcgcgatccttttagcttccagaccggcagcctgccgctgctgatcagcatcccgcacgccggcacgcaactgacgccggcggtcgaagccgggctgaccgacgacgcccgcccgctgcccgataccgactggcacataccacagctgtacgagttcgcccgggcgatgggcgccagcgtgctggtcggcaactattcgcgcttcgtcatcgatctgaaccgcccggcggacgacaagccgctgtacaccaccgccaccaccggtctgtatcccgacgtgctgttcgacggccgcccaagcttcctgccgggcaaagcgccgacggacgcagagcgcgccggctatctgcagcaaatttggcaaccttatcatcagcaactacaagacgaactggcgcgcctcaaagcgcggcacggctatgcgctgctgttcgacgcgcactccatcgcctcggtgatcccgcggctgttcgatggccaactgccggatctcaatctcggcaccaacggcggcgaaagctgcgcccaggcgctgagcgatcggctggtcgcctgttgcgagcagcaacagcagtatacccacgtgctgaacggccgcttcaagggcggttacatcacccgcgcctacgggcaaccacagcagcaacagcatgcgatccagcttgagctggcgcaggtgaactacatgtccgaacagtatccttacgcgttcgaaccgcagcgcgccgcctcgctgcagcgcctgctcaagcagatgattgaaggcctgttggacggcgccgccagactcaactga

SEQ ID NO: 422937 - DNA, 1224 bp, Serratia marcescens
atgacgtctgagattcactgtgacagcctgtggcacggcgccgatatcgtcaccatgcgcgacggcaagtatcacaccctgaccgacggcgcgatcgccgtgcgcgacggcaagatcgtctggattggcgaacatgcggcgctgccgtccggcctgatcgcggacgaaacggtgaaattcgacggcggcatcatcacccccggttttgttgactgccacacgcacctggtgttcggcggcaatcgcagcggcgagttcgaacagcggctgaacggcgtgagctacgccgagatcgccgcgcagggcggcggcatcatttccacggtgaaagccacccgcgcggccgatgaagcgctgctgctggagcaggcgctgttccgcctgcggccgctgctggcggaaggcgtcacctgcgtggagatcaaatccggttacggcctcagcccggaaagcgaactgaagatgctgcgggtggcgcgcaagttgggcgagctgttgccggtcgaggtgaaaaccacctgtctggcggcccatgcgctgccgccggaatacgccaaccgcgccgacgactacatcaatctggtctgcgacaccatcatcccgcaggcggcggaagccggcctggcggatgcggttgacgccttctgcgaacatctggcgttctcgccggcgcaggtggagcgggtcttcgccgccgccgaagccgccggtttgccggtcaagctgcacgccgagcagctctccgccctcggcggcagcacgctggcggcacgccatcacgcgctttccgccgaccatctcgaatacgccaccgaacaagatgcccgcgccatgggcgacgccggcaccgttgcggtgctgctgcccggcgcctattacctgctgcgcgaaacccagtgcccgccggtggagctgttccgcaagcaccaggtggcgatggcgatcgccagcgacgccaaccccggcacctcgccggcgctgtcgctgcgcctgatgatcaacatggcctgcacgctgttccgcctgacgccggaagaagcgctggcgggcgtcaccacccacgccgccaaagcgctggggctgcaacacagccacggcacgctggaaaccggcaaggtggcggacttcgttcactggccgctgtcacggccggcggaactggcttattggttgggcggtcagctgccctgtacggtgattttccgaggagaagtacgtcaatga

SEQ ID NO: 422938 - DNA, 756 bp, Serratia marcescens
gtggctgaacaacagaccgtgttacaactggcggctgcaatgagcgatgcccccgccccgatctaccaacgggtcaaacaggcgatcgtgaatcaaatccgtgcggggcattggcaaccgcaccagcgcgtgccctccgaaagtgaactggtggcagaactgggcgtcagccgcatgaccatcaaccgcgcgctgcgcgagctgaccagcgaaggttttttgatccgcatgcagggcgtcggcaccttcgtcgccgaagccaaggcgcataccgcgctgctggaagtgcacaacatcgccgatgagatcgccgcgcgcggtcatcgccacagcagcaagatcctcgagcttaaggcccgtgcggccagcgaggaagaagcgacggcgctgggcattcaccccggccaacggctgttctattcgcagatcgtgcattacgaaaacgacgtgccggtgcaggtggaagaccgctgcgtcaacccgctggtggcgccggattacctgaagcaggatttcgatcgcgtcacgccttacacctacctgacgcaggccgcgccgctgaccgccggcgaacacatcgtcgaagcggtgatccccacccggcgcgagcgcgagctgctgcagttggaggaccacgaacccggcctgctgatccatcgccgcacctggtccggcaaaaccgtggtgacctcggcccggctgctgtaccccggcagccgttatcaactgttcggtcgcttcaccagcgaagtctga

SEQ ID NO: 422939 - DNA, 1371 bp, Serratia marcescens
atgcctgcttattttgccccacgcgctttgctccctgagggctgggcgcataacgtccggctggacgtcgatgcgcaaggttatctgactcaagttaccgccgacgctgagccgcaaggctgcacccggctgcacggcgatgcggtgccgggcatgccgaacctgcactcccacgctttccagcgcgcgatggccgggctggcggaagtggcgggcaacccgcaggacagcttctggacctggcgcgatctgatgtaccgcctggtgcagcgcctgacgccggagcaggtggaggtggtcgcccgtcaactgtatatcgaaatgctcaagggcggatacacccaggtggccgaattccactacctgcatcacgacgccgacggtaagccttacgccgatcgcggtgaaatgaccggccgcctcagcgaggccgcgcatcaggccggcatcggcatgacgatgctgccggtgctgtacagctacgccggtttcggcgcgcagccggcgcagccggggcagaagcgttttattcaggataccgaaagctacctgcaccagcagcaggtgattgcccgtcagctggcggatcgtccgttgcagaatcaggggctgtgcttccactcgctgcgcgcggtggcgctgggccagatgcagcagattttggccgcggcggatcgcaccttgccggtgcatattcatatcgccgagcagcaaaaagaggtgaacgactgcctggcgtggagcgggcagcgcccggtggcctggctgtatgaccatctgccggtcgatcggcgctggtgcctggtgcacgccacccatctggatcgcgacgagcttgaagcgctggcgcgcagccgcgcggtggccgggctgtgcctgaccaccgaagctaacctcggcgacggcattttccccggcgacgcttacctgcagcagcaggggcgctggggcatcggttccgacagccacgtttcgctcaacgtggtggaagagttgcgctggttcgaatacggccagcggctgcgcgatcagcgccgcaaccgtctgacgacgccggaacagtcggcggtgggcgatgtgctgtacctgcaggcgctgcagggcggtgcgcaggcgtgcggcgcgccgatcggccggttgcagagcggctatcgcgccgactggctggtgctggacggcgacgatccgtatctggcggcggcgccggacgcctcgatcctcaaccgctggctgttcgccggcggcaaagagcaaattcgcgacgtgttcgtcggcggccggcaggtgatcgagcaggggcggcacgcgctgcagcagcagagcagcgccgagttcctgcaggtgctgaaaacctttcagcaggaggcgtaa

SEQ ID NO: 422940 - DNA, 564 bp, Serratia marcescens
atgagcctgacccgttttagcttcgccgcgctgccggtcagcccgtggcgcaacggcggtggggaaacccgtgaaatcgtcagctggccgccgggtgcgcaggattttgactggcgcgccagcatcgccaccatcgcgcaggacgggccgttttccgcctttacgggcatcgaccgctcgatcactttgctggaaggcgacggcgtgaggctgttcagcgccgggcatatcgaccatcaactggcgcgtgtcggggaaccgtttgccttttccggcgatgtggcgctggaagcgacgctgctgggcggcgccagccaggatttcaacatcatgacgcgccgtggccggcaggcggccgaggtgcggcgcagcacctcgcccgtcaccctgccaccctaccaggcgggcgtgctgtatgtgctgagcggggtctggtcgctgccggggggcggcgaactgcgggcgcgcgagggcgtctggtgggcggcgcaggcggcgggcggtgaagtggcgccgctgacggccgacggcgttctcctgtgggcgaacatcacagcctgctaa

SEQ ID NO: 422941 - DNA, 1002 bp, Serratia marcescens
atggcttcgctgaaagacgtcgcaaaacttgccggagtctcgttgatgacggtgtcccgcgccatcaatgaacccggcaagctgcggccggaaacctaccgccgcgtcaaacaggttatcgaccagttggactacgtgccggatctgtcggcgcggcgtattcgcggtgacggaaatcgcgtgcagacgctcggcgtgctggcgctggacaccgccacgacgccgttctcggtggaaatgatcctgtcgattgagaaaaccgcgcgcgagcgaggctggaacagcttcgtcgtcaacctgttcgccgacgacaacgccgaacagaccgtcgatctgctgctggcgcatcgaccggatggggtgatattcaccacgatggggctgcgcgaggtgacattaccggccaaactgctggacaaaaagctggtgctggccaactgcgtcagcccggcacattcgatcgccagctacattcctgatgacgagcaagggcagtatgacgccacgcgcacgctgatcgccaaaggctatcgcgcgccactgtgcattcatttaccggcggatacgctggcggcaggcctgcgccgtcgcggtctggaacgcgcctggcgcgaagcggggcgcgatgttgaacagctgcggcagtatcatctcgatctgagcggcggcgaccaaagctatcgcgactgcgtcgcgctgttggagcggcatttctctgcaggaaggcgcgattgcgatgtcgtggtgtgcgggaacgatcggatagcctttctggtgtatcaggtattgctggcgcaaggatggcggataccgcaacaggtagcggtgctgggttacgacaatatggtcggcaccggcgagctgttcctgccggcattgacgacggtgcaactgccgcattacgagctgggccgccttgcggcgctgcatgtgattgagcagcgggagcagcgtgagacggtgaaagtgccttgcccgctgttggagcgtggttcgctgtaa

SEQ ID NO: 422942 - DNA, 1443 bp, Serratia marcescens
atgaacactgccttagctcaagccgaccatgcggtcgaggccctgcgcgcagagcgccgagacgaatactacccgcagttccatctcgcgccgcccgccggctggatcaacgatcccaacggcctgatctgtattgacggcgtctatcatgccttcttccagcatcacccctacagcgaacactgggggcccatgcactgggggcacgcgaccagccgcgatctgatccgctggcagcaccagcccatcgccctggcgcccgatgcgccctatgacaaagacggttgtttttccggctgcgccgtggatgacaacggcgtgctgacgctgatttacaccggccacgtgtggctgggcgagccaggcgacgacagccaagtgcgggaagtgcaatgtctggccaccagcgaagacggcatacacttcgttaaacatgggccggtgctgtccccgccggacggcattcagcatttccgcgatccgaaagtctggcgcgagaacggcgaatggtggctggtggtcggcgccaaagaaaacggtctcggccaagtgcgcctgtaccgttctgcagacctgcgcgcctggcgcttcgatcgggtgctggccggcgcgcaggcggcgcatcaaggatatatgtgggaatgcccggatttcttcccgctgggggaacaacacctgttgttgttctctccgcaggggctggcggcacagggctaccgctaccgcaatcgcttccagagcggctatctgctcggccactggcggccagacggcgactttagggtgacgcagcccttctgcgagctggatgccggccacgatttctatgcgccgcagaccttcaccgccgccgacggccgtcggctgctgtttgcctggatggatatgtgggaatccccgatgcccagcaaagcgcaccgttgggccggcgccctcaccctgccgcgcgagctgacgctggccgccgacggcagcgtcctcatgaacccggcgcgtgaactgacggcgctgcggcgagaatcgcacacctttttggcacaggcgctgaccaatcagcatctgccgctggcggacgacgtgcaggaactcaccctgacgttgagaccggccgacagcgacgccgagcgttacgggctggccatcgggaatgcggcgcgcctattcgtcgacaatcaggcgcaccgactggtgctggaacgttttcatgacaaccccgccctgtgcacctgccgcagcgtgccgctgccagaaggtgacaccctgtcactacagatcttcattgaccgctcatccctggagatcttcgtcaatcaggggcaggcctgcctgaccagccgcatctatccgacggcgggcgagcgccacctcagcctgtttgccgaaggcggccgggcacagttcgagcccatcacgggatggcagttggcaagcctctggggataa

SEQ ID NO: 422943 - DNA, 1260 bp, Serratia marcescens
atgaaccgcgaaactaaaaaatattacgtgctgctcagcggcctgctgttcttctttttcttcacctggtctgccagcttttcgctgatctcgctgtggctgaatcagaagatcggcctgaaaggcgccgagaccggcctgatcttctccgccatctcgttggtggcgctgtgcgcacagccgctgtacgggtttattcaggacaaacttgggctgcgcaagcacctgctgcagtttctcggcgtgatgctgctgctgaccggcccgttctttatctacgtttacgccccgctgctggcgagcagcctgccgctcggtgcgctggtcggcggggtatttatcggcgccaccttcttcgccggcatcggcgcgctggaatcttataccgagcgagtcagccgcatcagcggtttcgaattcggccgcgcccgcatgtggggatcgctcggctgggccagcgccacctttttggccggttttatcttcaatatcgatccgaacatcaatttctggctggcctctgccgccgccgtgatattcctgttgctgctcagccaggtgcgcgagctgaagccgaacgccatggccggcctggcgttcggcaaaccggaaaatctgcggctgcaggatgcgctggcgctgctgcgtatgccgggcttctgggcgctggtggtgtttgtgctcggtatcagcgtgtacaacgttttcgatcagcaattttcggtctacttcgcctcgcagttcgcttctcgcgaacagggcaacgaaatgtacggcttcctcaactcgctgcaggtcttcctcgaggccggcggcatgttcctggcgccgctgctggtgaaccgcatcggcgccaaacaggggctactgctggccggtggcgtgatggcgctgcgcatgttcggctcaggcttggtcagcggcgcattgatgatctccgccatgaaactgctgcacgccgtagagttgccgatcctgctgatcgctatcttcaaatacatcgccagccgcttcgacagtcgcctctcctcaacgctttacctggtgggctttcagttcatcacccaggtgatggccagcttcctgtcgccgctggcgggctacggttatgaccgcatcggctttgccgacacctatctgctgatggggtgcgcggtcgccgccacgacgcttgtctcctgtttcctgctgcgcggcgaacgttccgccagcgcaaccccctttcaatccgccattaaatcaagcgagtctatccaatga

SEQ ID NO: 422944 - DNA, 1305 bp, Serratia marcescens
atgaatcaacagactctcgacgcgcgccgctcgcgtcaggcgttgctggccggctcggtcggcaactttatcgaatggtatgagttcggggtgtacgggttcctggccaccgttatcgccgccaattttttcacgctgcagggtgaaaacgaaatcaccagcctgatcctcacctacgccgccttcgcgctggcgtttttctgtcggccgatcggcgcagtgatcttcggccgcatcggcgatcgcatcggccgtcgcccgacgctgattgcggttctgctgttgatgacgctggccaccgcgctgatcggcgtcatgccaacctatgcctcgatcggcgtcgccgccccgctgctgctgacgctgctgcgcatgtttcaggggctgttcgccggcggcgaattcggcggcgccgtgtcgctgatgaccgagttcgccccgaagggcaagcgtgggctgttcggcgcctggcagtcgctgaccgtcgcgctcggcctgctggccggcgctgggctggtggcgctgctggccgcgctgctcagcgtgcagcagctgcatgactggggctggcgtattcccttcctgctggcgctgccgatgggcgccgtggcgctgtggctgcggctcaagctcgaagagacgcccacgttcacccaggcgcagcaacatgcggaacacgccgccgcgccgccggaagcgaaactgggcggcgtggtgaaaaccattctgatcggcatcggccgcatgatgggctggtcggccgccggctataccttcctggtggtgatgccttcctatttgcaaacttcattgcacgccaccttccagcaggcgctggtggcgacggtgctggccaacgtcggcttcgccctgaccattctgccggcgggcatcatcagcgacaaactggggcgtaaaacggtgatgctgacggcggtggcggcggtgatcctgttcaccttcccgctgctgcacctgttgcaggatgcgcagagttcactgtgggccaaagggctggcggtcatgatcgccggtgccgtggtcggcctgctggccggccccggcccggcgatgctggcggagatgttcccgacccgggtgcgctataccggcttggggctggcttactcgctgtccaatgcggtgttttccggttcggccgggctgattatcaccggcctgatcaaacagaccggtaatatcgacattcccgcttactacgtggtcgccacctcggtggtcagcctgtttgcgctgatgacgctgcgccgcgacgaccatctgcgctcgctgaacgaacgttaa

SEQ ID NO: 422945 - DNA, 1620 bp, Serratia marcescens
atgtcttcacgcgctgttaccccacaaaccctcgctcgctacggcatccatcaggccgccgacatcgtctataaccccagctatgaattgctgttcgccgaagagacccgcgccgacctgccgccgctggaacgcggcaccctcacccaactcggcgcggtcaacgtcgcgaccggtgagttcaccggccgttcgccgaaggacaaatacatcgtgcgcgacgacaccacgcgcgataccgtctggtggtcggacaacggcaccggcaagaacgacaaccagccgctctccccggaggtctggcagcatctgaaaacgctggtgggcaaccagctctccggcaagcgtttgttcgtggtcgacgcgttctgcggcgccaacgccgacacgcgtctgaaagtgcgcttcatcaccgaggtggcctggcaggcgcacttcgtgaaaaacatgtttattcgcccgagcgacgccgagctggcggattttgagccggacttcgtggtgctgaacggcgccaaatgcaccaacccggactggcagcagcaagggctgcactcggagaacttcgtcgccttcaacctgacggaacgcatgcagctgatcggcggcacctggtacggcggcgagatgaagaaaggcctgttctcgatcatgaactacctgctgccgctgaagggcatcgcctcgatgcactgctcggccaacgtcggcgagcaaggcgacgtggcggtgttcttcggcctatccggcaccggcaaaaccaccctctccaccgatccgaagcgccagctgatcggcgatgacgagcacggctgggacgacgacggcgtgttcaacttcgaaggcggctgctacgccaagaccatcaagctgtcgccgcaggcggagccggaaatctatcaggcgatccgccgcgatgcgctgctggaaaacgtcaccgtgctggccgacggcagcatcgacttcgacgacgccagcaagaccgagaacacccgcgtttcctatccgatttatcacatcgagaacatcgtcaaaccggtgtccaaagccggccatgcgcgcaagatcatcttcctgaccgccgacgccttcggcgtactgccgccggtatcgcgcctgacgccggagcagacccagtaccatttcctgtccggcttcaccgccaagctggccggcaccgagcgcggcatcaccgcgccgacgccaaccttctccgcctgcttcggcgccgcgttcctgacgctgcacccgacgcagtatgccgaagtgctggtgaaacgcatggaggccgccggcgcccaggcttacctggtcaacaccggctggaacggcagcggcaaacgtatttcgatcaaggatacgcgcggcattatcgacgccattctgaatggcgacattgagcaggccgagaccttcacgctgccgatcttcgggctggaggtgccgaccgcgctgccgggcgtcgatccgtcgatcctcgatccgcgcaaaacctacgccgacgagtcgctttggcaggagaaagcgcaggatttggcgcagcgctttatcgataacttcgccaaatataccgtcaccccggcgggtgaaaaattggtgaacgccgggcctaaacggtaa

SEQ ID NO: 422946 - DNA, 1344 bp, Serratia marcescens
atgaaacagataaatgcagaactggcctgtgataaaaatgcggcatcgtccgaatcctcaggattaattaatcaacttcgtcaaatagatatcggtgcggtgccgatcgcgttgtttatcacgatttgcgcgatcgtggcgatttccgcctacgccaacttcctgccgaagaatatgatcggcggcctggcggtgataatgacgctgggctttgcgctggcgcagttgggaaaaagcattcccgtgctgcgcgatatcggcgggccggccattctgtgtttgatggtgccgtcggtgttggtctatttcaatgtcttccagcctaacgtcatgggcaccgttcatctactgatgaaagacgccaacctgctctatttcgtcatcgccagtctggtggtcggcagcattctcggcatgaaccgggtgatcctgattcaggggatgattcgcatgtttgtgcccttggtggtcggtacggtgacggcggtgatcaccgggctgctggtgggcaagctgttcggctttaccttttatcacacctttttcttcatcatcgtgccgatcatcggcggcggcatcggcgaggggattttaccgctgtcgctggcctattcggcgatcctgggctcgacgccggacgtctacgtcgcgcagctggcgccggcggcggtgctgggcaacatcttcgccatcgtgaccgccggggtgctggcgcgcatcggcatgcagcgcaaggcgctgagcggcgacggcatgctgatccgctcggcgcaggagaacgcgatgttcgccatcaaggagcaaagcggcaacgtcgatttccaactgatgggcggcgggttgctggtgatctgcgccttctttatcgtcggcggcctgtttgaacacatcgtgcatattcccggcccggtgctgatgatcctgttcgcggtgctgtgcaaatactgccgggtgatcccggcctcgatggagaccggcgcgcacagtttctacaagttcgtctccaccgcgctggtgtggccgctgatgatcggtctgggcatgctgtacgtgccgctggaaagcgtggtggcggtgttctcggtcggttatgtggtggtctgcggttcggtggtgctgtcgatggggctggtcagtttcctgattgcgccttacctgaagatgttcccggtggaagcggcgatcgtcacctgttgccacagcggcctgggcggcaccggtgacgtggcgatcctgtcggcatcgaaccgcatggggctgatgccgttcgcccaaatcgccacgcgcatcggcggcgcttccacggtcattggcgcgacgctgctgctcggttggttagtctga

SEQ ID NO: 422947 - DNA, 276 bp, Serratia marcescens
atggatagccggggttggattgccccggttttttatttcgaggacagccgcacccacagcgtgatgagctatttcagcgaaagcaacatcgggcaggactttaaaggcgcgtactcatccgggccattgctcaacgacatcacggcgatcccgcatttctacggcgccaacatgcacacccgcatcggcgatacgatctacggtttcaattccaataccgatcgcgacttcctcaccgccaccggcggattggatccgcgacttcgtgcgcggtga

SEQ ID NO: 422948 - DNA, 210 bp, Serratia marcescens
atgacgttctcggaacaggagattaaacccgtatgggatgaggtcgcacgcctgatcggcgacggcgtgatgcagctgcgccatcgcggcgaagcgctgtcggtggaaacgctggaaaaacatctggcgcggcagctggcggacagcaacgatatcgaacggcgcatcctgctcggcgccgccatcaacatgctgaaaggcggaaaatga

SEQ ID NO: 422949 - DNA, 153 bp, Serratia marcescens
atgaactgggtcgaaacctttacggagtactaccgcctgagccgcacgggtgaaacgcagcattggctgtgtcgccgctggttgccgcagggagaggcgcgcttggcctatttgcgggagttgctggagccgaccgcgccgcggcggcggtga

SEQ ID NO: 422950 - DNA, 393 bp, Serratia marcescens
atggcgacggcaattccacagaaatacgagcaccttgagcgctgggcgttcggcgataccgagcagcaggccgatgaagtggtgcaattgatcctcaatggcaccaaaacggccacctgttccaacctcgacggcgaggggatcccgcaggccggcgatcggttcctggtggtggacggcaagggtgagccggtctgcgcggtcgagctgaccgcggtggaaatgaaaacttacgatcaggtcgatgaagcgcacgcctttgccgaaggcgagggcgatcgctcgctggcgcactggcgcaaagagttgcagcgcttcttcgaagagtacgatctgttctcgccggacatgacgctggtgctgatgaatttcaaagtcgtcgacaaattctaa

SEQ ID NO: 422951 - DNA, 600 bp, Serratia marcescens
atgcgcgccgttccctacgagtgccagtgggccagcccggagctggccgccgatctgatcgccggccgcgcgacgctggcgcaagacgaaaattgggcgcgcagcggcgcccgcgatcgggcggagtacgtcgagtgggccaatcacgtgtgcggcatggcctgtctgaaaatggtgctgggccaccgcgacggcgaagcgccgccgctgctggagctggcgcggcgcagcctgccttacggcgcctatgtgcgcgaaggggagcggataaaggggctgatttacgcgccgttcgtcgagttcgtacgcgagcagttcgcgctgcaagcggaggtgaaggtggggctggaggccgctgacgtgccggcgctgcttcaagaatgccgttactttatcgcctcggtgcatccctccattcgccggccggagagcataccgccgcagcggggcgggcatctggtgctgatcaccgccgccgatgcgcaaagcgtgaccttccacaatccttcgggcgacagcccggcgacgcgcgagcgggtgcacctgccgctcagccgcttcacccctttctttgccggccgcggcatcgccatcgcataa

SEQ ID NO: 422952 - DNA, 240 bp, Serratia marcescens
atgagcaaaaccgtcgtaaaaattggcagcttcgaggtcgatgacgcgcatcttcacgccggcgccgaccgcgccggcaccctgagcattccctgcaagtccgatccggatctgtgcatgcagctggacggctgggatgaacacaccagcattccggcgatcctcgacggcaaacagtcactgctgtacaagcagcactacgatcggcaggcggacgcctgggtgatgcggctggcatga

SEQ ID NO: 422953 - DNA, 936 bp, Serratia marcescens
atgtttcggggattgaaagccttcttattgttaaccctctcgctgctgttctgtcagcgcgcattcgccgattgcgccaccaccaacggcaccgtcaccttaccgggaagcagctctttcgtggtctacaacgggcagatcaacgcccagggcaccgccggcctcaactgcaccggcctcgggctatcgctgctgtcgcagaacaccgtcacggtcaaggttgcgtcgaccaccaacggcatggcggtcgccaacaccgacggttccggcgataaaatcgcctacctgatctatcccgacgccaactatcaatatccctacagcatcggtcagaccattgactacagctcgctgaacctgctgtcgctgatcctgatctcttccaacgtcaactttccgctgtatatcaaaaccaccgccggcgccaacgtgcgttcgggcacctataccgacaccatcaacctgatctggaactaccatatctgcggcctcggcgtgctcggcctgtgcatctggtgggacggcgtcaacaaggccagcacggtcagcgtcagcgtcgccatcaccaaagactgcctgatcggcaccgcgcccaacgtcaacttcggcagcatggcgttggtcgggcagttcaatcctgtcaatcagagcatcaccctgacctgcaccaaaaccgagggatacaacacctatttcaccaacggcaataacccggtctccggttggcggcgtatgaaaagcggcaccagcaatttcatgcagtatcagatttacttgcccaatacgacgaccgtttgggatagcaccaacaaacagagcggcgccggcaccgggctggcgcaaagcatcccgtataaggcggcggtcaatgcggcgcagacggaagtggcggtcggcagctatcaagacaatctcagttttgtggtggaatactag

SEQ ID NO: 422954 - DNA, 2481 bp, Serratia marcescens
gtgcagccgacagggaggctatcgacgcggcgtttcagccttaagccgctggcgtttgccatgctgagcatggcggccggcggctggctgccgtttgcgctcggcgacgatctgccgccgccgcccagcgccgtcagcatgccggacaccacgctgtatctggagccggtcgtcaacgggcgccaaaccggcaacgtcgtgccggtcaactaccgcggcggccattactacatgacgccccagcaactgctcgacgccgggctgccggtagcggataagcaggcgaaagagatcgccgtcgatcggctggagaaggtggatgtcagctacagcggcgagagccagcagttgctgatcaacgtgcccaacgactggttgccgcagcaaaccatcggcgcccattcaccgttgcagcgcttgccggcgcaaagcagtctgggtttgctgttcaactacgacatctatgccagccaaagcaacggcaatggccggccgggctacctgtcggcgtggagcgaacagcgactgttcgacgggttcggcgtcatcgccaacaccggcatctaccgcagcgggtttaacggcgggccgaacgacgatggcgggcgctatattcgatacgacagctactggcgtttcaacgacgaccagcggatgctgagtgtgatcgccggtgaccttaccaccggctcgctcccctggagcagcgccgtgcgcatcggcggcttgcaattggcgcgcaatttcgcggtgcgcccggatcttatcacctacccgctgccgcaattttccggccaggcggcattgcccagcagcgtcgatttatacatcaacagctataaaaacagcaccaccaacatcaatcccgggccgttcaccctcaacagcgtgccctacattaacggcgcgggtcaggccaccgtcgtcaccaccgacgccctcggccgccaggtcagcaccacggtgccgttctacgtggccagcaacctgctgcagaccggcatgagcgatttcagcatttccaccggtttgctgcggcgcaactacgggttgagttctgccgattacgggcaatgggtcggcagcgccagcttacgttacggcgtcactgactggttaaccctggaaggacgcgccgaaggcgcagccgagttggcggttggcggcgccggcgccgaccttcgcgtcgggcaatggggggttctcaacgcgtcctacagcgtcagccaggccggtgatgaagcgtttaacggcggccgggcgatacaatcccccacctattacgatccgctgaccggcaggccgttgcaacagccggatccccagcccgtctatcgctacaccggcaaccacggcgatcagagcagctttggttacacctacagcaaccaacgtttcagcctcaacgcccaacgcatcctgcgcagcgccgattttggcgacatttccgtgtataaaagcgactaccgcctgagccgtcgcaccgatcagttgaccggcagcgtcagcctgggccggctcggcagcctcggcgccggttattttgacgtccgcgacgccatcgctcagcgaacccgcctggtgaacctgtcctacagcgtatcgctttggcgcaacagcagcctgtacgcctcgctgaaccgggaaatcggcagcagcggttacagtgcccaactgcagctctccattccgttcgacagttggggcacggccagcttcagcgccgcgcgcgacaacaacaaccgctggagcgaacgcgtcagctacagccgcgccgcgccgaccgatggcggtttcggctggaatctggcctacgctaataacccgagcggcggcgattaccgccaggccgatctgacctggcgcacccgcagactcgaagcccgagcgggcgtatacggcacccgcgatgaaaccaaccactggggagaaatcagcggttcgctggtggcgatgaacggcggcgtgtacgccaccaacaccatcaacgatgcctttgcgctggtgtccacgcaaggatacgccgacattccggtgagctatgagaaccaaccgatcggcaagaccgacgcccagggctatttactagtgccgaccgtcacctcttactaccatgcgaaattccagattgatccgctcagcctgcccgccgacgtcgcgctgccgacggtggagaaaaccgtcgccattcgcgatcacagcggttttctggttgagttccccatccaacccatctccgccgccgacgtcgaactggttgacgagcaaggcaaaccgttggccaacggcagccaggtggcggtggttggcggcaatcagcaaagctatgtcggttgggatggcatgacctatatcgacccggtgcaacaacacaatcggctgagcgtgatcccggccgacggcggcccgccgtgtcaggcggaattcagcctggcgaagcctcagggcatccagcgcgtcggcccggttgtctgccgctaa

SEQ ID NO: 422955 - DNA, 765 bp, Serratia marcescens
atgcgcatacccttccgcctgccgttaacggcagccctgctcctggcaagccagcagcacgccctggccgcggcctccattctcatttggccaatcgatccggtgattgaagatcaacaacaggccaccgcgctgtggctggaaaatcgcgacagcaaaccggtctatatgcaaattcgcgtgttgggttggcggcaaaccgccggcaaagacgattacagcaaccaaagcgacgtgatcgccagcccgccggtggcgtcgatcgcgccaggcaaacgccagctgatacgcctgatcaaacagtcggccccggcggcgggacaggagcgcgcctaccgcattttggtcgatgaagtgccggtgaaagaacagtcgtcgggcgccgctcccggcggtgcggagatggggctgaaattccagatgcgctactcggtgccgctgttcgtcagcggcaagggcatttggaccaaacaggacagcgaaaaaccgcgcgattacgcgaccgccagccaacctcagctcagctatcgtctacagcagcaaagcagcgaacgctggctggaggtgcgaaatcaaggcgcagtgcatgcccgcatgtcgaaagtgacgctgcaaggccgcagcctgaatcccggtctgatgggatacgtgctgtccggttcgcaaatgcgcttcgccttgccgcccgccggcggtttcagcagcggcaaactgatggccacggtcaatgacaacaaacagcccgtagccattccgtcttattga

SEQ ID NO: 422956 - DNA, 555 bp, Serratia marcescens
atgacgatgcgcgcttccatttgcggtttgctgttctgcctgccgctttccccggcccaaagcgataccggcgtcaacgacttgaccaaaagccagccgttcaccgtcaatgcaaccgtggtaaaaggctgcgtattgggcagcggcgtcagtgacgtgaccaccttcggcaccctgaacttcggccagctgtcctcactgagcaacgcggtcagcgtcgtctccagcagcggcgccggttcggtgctgtttcgctgcaacccggggctgagcgttacgctggccctcggcgtcggcaatcatgtgaccggatccatcgccggcggcagaaaattacaaaacgccgccacgtcggaaacgctgctgtatcaactttatcaagacagcaactacgccaccctttggggggatggcgccaacggcggcgcggcgcagaccgtcgccgccaccggcagcacgcaagaaatcaaggtttacgcccgtctgttttcgaccagtaccctgcccaccagtggcgtttacagcgatacggtcttgttgacggtcacttattaa

SEQ ID NO: 422957 - DNA, 504 bp, Serratia marcescens
gtgcggctcgcgctttgctgcggcggattatgggcgtgcagcctgttggcgcaggccgacagtaaaacggcgaccctcggcgtcagcgcgaccttgctcagcgcctgtgaagccggcagcagctcaggtggcaacgtcagcttcggcacgctgaatttcggcacgctgtattttctcagcaccgccaccagcgtcgccgggcagcaaaacgccggcgccattcgggtgaaatgcaccaacggcaccagctacagcgttctgcttggcggcgggcaaagcggcaataccgcggcccgctacctgcaaagcgcggccggccaacgggtgaattacaacctgtacaccaacgccgcccacagcaccatttgggacaatctgacgggcgtgtcacaaaccgccaacggttcggacaactggctgccggtctatggcatgattccggcgcagtccacgcccccgacaggcagctacaccgatacggtacaggtcacgatcaattggtaa

SEQ ID NO: 422958 - DNA, 540 bp, Serratia marcescens
atgaaaaaaactctgatggcattgacctcggtagcaaccctgctgtgcgccaacggcgcggctaacgcagcaggcaccattcaaggcacgctaggcgtgacgctgaccatcggcgccggttgcgtcgtggggggcggcaacagcagcggttccgtcaacgacttcggctccatcagcttcggcacttactcttcactggccaacatcatcgacgccagcgccaccggcgcagggggggccggtacgctgtcattgacctgcaccaccggcacagactacacggtggcgctggacaacgggctccacgtcacgtcaggcacccaacgccgcatggccagcaccgcaggcgcattcatcagctataacctttaccaggatgccgcgcgcaccaccgcctggggcagcggcgccaacgcgctgaccggcaccggcaccggcgccgccgttccgctgatcgtgtatggccgcgtgccggcggccggttcaaccccggcggcggacacctataacgacaccgtcacgatgacggtcacctggtaa

SEQ ID NO: 422959 - DNA, 1437 bp, Serratia marcescens
gtggccaaatccaccgccgtttttctgccccccgctttccttgatgccacccgcgccatcatgcccgccgagctggcgatggacgattttatcgccgcttgccagcgcccgctgcgccgcagcctgcgcgtcaatacgctgaaaatcagcgtcgccgacttcctggcgctggtgcaggattacgactggcgactggagcccattccctggtgcgcggaagggttctggatcgagcgcgacgatgaagagctgcgcctgggcagcgccgccgaacacctgagcggcctgttctacattcaggaagccagttcgatgctgccggtcagcgcgctgtttgagggcggcgcggcgccgactcgggtgctggacgtggcggcggcgccgggatccaaaaccacccagatcgccgcgctgatgggcaatcagggcggcatcgtcgccaacgaatactccgccagccgggtgaaagtgctgcacgccaatatcagccgctgcggcgtgaagaacaccgcgctgacccacttcgacggccgggtgttcggcgccgcgctgccggagagcttcgacgccattctgctcgacgccccctgctccggcgaaggcgtggtgcgcaaggatccggacgccatgagcaactggtcgccacagagcgtggccgagatcgccgccacccaacgcgagctgatcgacagcgcgtttcatgcgctggcgccgggcggcgtgatggtttactccacctgcacgctcaatgcgcaggaaaaccagcaggtggtgcgctggctgctggacacctacggcgacgcggtcagcgtcgaatcgctgggcgggctgttccccggcgccgacaaggcgctgaccgccgaaggtttcctgcacgtcttcccgcagatttacgacagcgaaggctttttcgtcgcccgcctgcgcaaacggcgcgccgtggcgccgttgccgaagccgacctacaaggtcggtaaattcccgttcagcccgctgtccggcaaagaagcggcgcaggtcgcccaagccgccgccgcatccggcttaacctggggcgatgacggccggctgtgggagcgcgacaaagagatctggctgttcccggccgagctggaaccgctgttcggcaaggttcgcttctcgcgcatcggcctcaaactggcggagcgtttccctaaaggtttccgctggcagcacgaggcggcgatcgcgctggccggcaccggcggcaaagcgcatttcgagctggacgccgcgctggcgcaggagtggtatcacggccgcgatctctacccggaactgccgccggcgggcgatgaatgcatcgtcacctaccaagggcagccgctgggcatcgccaagcgcatcggtagccgtatcaagaacaacctgccgcgcgagctggtgcgcgacggcgcgctggatttccacctgtaa

SEQ ID NO: 422960 - DNA, 2631 bp, Serratia marcescens
atgcaacaggaaacgccgactacaccgactgaagcgcgggtcaagaacaagcgccgcatttcaccgttctggttactgccgttcatcgccctgctgatcgccgggtggctggtctataacaatttccaggagcgcggcaccaccgtcaccatcgatttccaatcggcggcgggcatcgtcgccggccgcacgccggtacgctatcagggcgtagaggtcggcacggtgcagaaaatcagcctgagcaaagatttgcgcagcatcgtggtggaggccagcatcaaaagcgatctggaagactcgctgcgcgaaggcactcagttctggctggtgacgcccaaagcctcgctggccggggtctccgggctcgatgcgctggtcggcggcaactatatcggcatgatgcccggcagcggcaaggagcaaacccacttcaccgcgctcgatacccagccgaaataccgcctgaacaccggcgagctgatgatccacctgcacgccgacgatctcggctcgctcaacagcggctcgctggtctactaccgtaaaatcccggtcggcaaggtgtatgactacaccatcagcgaaggtaacaagggcgtgaccatcgacgtactgatcgaccgccgtttcgccaacctggtgaagagcaacagccgcttctggaatgtctccggtttcaagggcgatttcagcctgtccggcgcgacggtgcaaatggagagcctggcggcgctggtcaacggcgccatcgccttcgattcgccggccgatggccagcaggccaagggcgatcagagctataccctgtatccggatctggcccacagccagcgcggcgtcaatatcctgctggatctgccgagcggcaacagcctgagtgaaaaccgcacgccgctgatgtaccaggggctgcaggtcggcaccctgaccaagctgacgttgcaacaggacagcaaagtggtcggtgaactgaccatcgatccttcggtggtcgatctgatgcgcagcggcacccgcatcgtgatgcgcagcccgcgcatcagcctcaacgacgccaagctcagccaactgctgaccggcaccacgctggagctggtgccgggcgaaggtgagccgcagcagcgcttcaacgtgctggacagcagcgaaacgctgttgcagcagcctggcgtgctgaccgtcacgctgaacgcgccgcaaagctacggcatcgacgtcgggcaaccgctggtggtgcacggcgtgaaagtcggccagatcctgagccgcaccctgaccgccggcggcgtggtgttcaccgccgccatcgacgcgcagtatcgcggcctgctgcacaaagacagcaaattcgtggtcaacagccggctcgacgtcaagctgggcatcgacggcatggaagtgctcggcgccagcgcccaggaatgggtggacggcggcgtgcgcattattcccggcagcaagggggaaccgggcggccaatacccgctgtacgccaacagcgaaaaagccgaggaaggcatcgtcggcaacgccccttccaccaccctgaccctcagcgccaccagcctgccggacgtgcaggccggttcggtggtgctgtaccgcaaattccaggtgggcgagatcgtcaacgttcggccgaaggccaacgagtttgaggtggacgtctacatcagcccggaataccgcaagctgctgacccgcgaaagcatcttttgggccgaaggcggcgccaaggtgcagctcaacggcagcgggctgacggtgcaggcttcgccgcttaaccgcgcgctgaaaggcgccatcagcttcgacaacctgcagggcgtgacgctcaacaagggcgccaaccgcgtgctgtacgccagcgaaaccgccgcccgcgcggtgggcagccaaatcatgctgcgaacctacgacgccagcaagctgtcggcgggcatgccgctgcgctacctcggtatcgacgtcggccaggtggagtcgctgcagctggcgccggagcgcaacgaagtgttggccaaagcggtgctgtatccggaatatgtgcacactttcgcgcgtctgggcagccgcttctcaatcgtttcgccggagatctccgccgccggcgtcagcaatctcgataccctgctccagccttatatcaacgtggagccggggcgcggccgcgagctgcgcaccttcgagctgcagcaggccagcatcaccgactcgcgctatctcgacggcctgagcgtagtgctcgacgccgccgaaaccggctcgctgcagatcggcacgccggtgctgttccgcggcgtagaggtcggtaccatcaccggcttctaccttggcgccatgtccgatcgggtgcacgtcgcgctgcgcatcagcaagaaatatcagcatctggtgcgcaacaacagcgtgttctggctggcttcgggttacaacctgcagttcggcctgaccggcggcgtgatcaagagcggcaccttccagcagttcatccgcggcggtatcgccttcgccacgccgccgaccattccgctggcgccgaaagccacgccgaacaaacacttcctgctgaatccggaagagcctaaggactggaaaacctggggcaccgccattccgcgcgattaa

SEQ ID NO: 422961 - DNA, 1377 bp, Serratia marcescens
atgtttgccgctcagaatcccggtttacctcgttttaccgtccggcgcccgatcgccagtgacgcggccggtttatttttcagctacgctgacagttccggcgggctcaagggcagcgacttgtcaaagatgaaaatacacgcgatcaccgcccccctttccaaagcgcgccaccagcgctgctgcgagtgcgatctgctgttcgtgctgccgccgctcagcggcaaccaggccgcctattgcccgcgctgcaacgccaaggtagtgaacggccgcgactggtcgatgacgcgcctgaccgccatggcgatcgccatgctgctgctgatgccgttcgccttcaccgaaccgctgatcagcatccgcctgctcggcacgcgcatcgacgccagtttgctggaaggcatctggcagatgagccgtcagggcgacccgcttaccgccagcatggtggcgttctgcaccatcggcgccccgctgacgctggcgctgtcgttgctgtacctgcgcttcggccacgcgctcggcatgaacctgcggccggtgctgctgatgctggagcggctcaaagagtgggtgatgctggacatctatctgatcggcatggcggtggcggcgatcaaggtgcaggattacgccgacatccaggcgggcagcgcgctgatcgcctacctgtcgctcaccctgctcagcatcctgacgctgatccacgccaacctggagcagctgtgggagcgttactatccgcaggaacagccgaaaggcccgccggcggcgctgcacatttgcctgtcctgccactataccggctaccccgacgcgcgcggccgctgcccgcgctgccacgtgccgatgtgccatcgccagccttacagcctgcagaaaacctgggcggcgctgatcgcggcgatgatcctgttgataccggccaacctgctgccgatttccatcatttacgccaacggcgtgcgcctcgaagacaccatattctccggcgtggtctcgctggccacctccggcaacgtgccgatcgccgccattgtgttcatcgccagcgtgctggtgccctttaccaaagtgatcgtgctgatcacgctgttgttcagcattcacttcaaaacctcgcacagcctgaagacgcgcattcgtctgctgcgtctggtcgcctggatcggccgctggtcgatgctcgatctgttcgttatcgccttgatgatgtcgctggtaaaccgcgaccagctgttatcttttactatgggaccggccgcgttttactttggctcggcggtcattttgactattcttgccgttgagtggctggatagccgattgatttgggatgcacatgcaacaggaaacgccgactacaccgactga

SEQ ID NO: 422962 - DNA, 498 bp, Serratia marcescens
atgacaaaagaacaattctacgcggaattaaaacgtgacctgagcgcgttgctcggcggggaaaccaactttatcgcggcgttgtccaacgccagcgcgttgctcaacgagcgtctggatgacgtgaactgggtcggtttctatctgatggatggcggccagctggtgctggggccgttccagggcaagatcgcctgcgtgcgtattccggtgggcaagggcgtgtgcggcacggcggtggcggaaaatcgcgtgcagcgcgtcggcgacgtgcatgcgttcccgggccatatcgcctgcgatgcggccagcaacgcggaaatcgtgctgccgctggcggttggcggccgagcgatcggcgttttggatatcgacagcacggtttatcaacgcttcgacgaacaggacgaagcgggcttgaaagccgtggtggcggggctttgtgagcaactggaacagtgcgacagtgcgaaatatgtgactgtggcggcaagttga

SEQ ID NO: 422963 - DNA, 711 bp, Serratia marcescens
atggaaaatcaacctaagttgaactctagtaaagaagtcattgcttttcttgccgagcgttttccgctctgctttagcgccgaaggcgaagctcgtccgctgaaaatcggtatttttcaggatttggtagagcgcgtgcagggggaagagaatctcagcaaaacgcaattgcgttctgccctgcgcctgtacacctcaagctggcgttacctgtacggcgtcaaagtcggcgcgcagcgcgtcgatctggacggcaatccgtgcggtgaactggagcagcagcatgtcgatcatgctcgccagcagcttgaagaagccaaagcgcgcgttcaggcacagcgtgccgaacaaaacgccaaaaaacgtgaagccgccggtgaatccgccgatgccgcgccacgccgtccgcgcccagccggtaaaaagcccgctgcacgtcgcgaaggcggagccgcgccggagaaccgcaagccgcgcccacaaactcgcccacagccagctcgtcaacctcgtgcagcaaaagaggaaaaccagccgcgttatgcgccagtcacggatatctctaaactgcaaattggccaggaaatcaaagtcagagcaggcaagagcgcgatggatgctaccgtactcgaaatcgctaaagatggcgtacgtgtgcagctctcttccggtctggcgatgattgtgcgcgcagaacacttgcagttctga

SEQ ID NO: 422964 - DNA, 2049 bp, Serratia marcescens
atgaacaaattcgtcagattaacagcgattgcagggctgctgtgggcgggtgtcagttacggcgcggaaacagccaacatccgcatcggccaactgcctcaactgcaacaggaacctcagcacgctacggtgagtgagcgcgtcacctcgcgcttcactcgctctcattaccgccagtttgccctcgacgcggagttttcaggcaagatcttcgatcgctacctgaacatgctggactacagccataacgtgttgctggcctccgacgtggcgcagttcgccggcaaacgcaatcaggttggcgaagagctgaaaaccggcaagctggacaccttctacgcgctgttcaatctggcgcagaaacgccgctttgagcgttacacctatgcgttgtcgttgctggacaagccgatgaacttcaccggcaacggcactatcgatctcgaccgcagcaaagcgccgtggccgaaagacaaggccgagctggatagcctgtgggatgcgaaagtcacctatgacgagctgaacctcaagctgaccggcaagaccgacaaagaaatccgcgacacgctgaccaagcgctatcagttcgccatcaagcgcctgacgcaaagcaacagcgaagacgtcttccagctggcgatgaatgcctttgcgcatgaaatcgacccgcacaccaactacctgtctccgcgcaacaccgagcagttcaacaccgagatgagcctgtcgctggaaggcatcggcgcggtgctgcagatggatgacgactacaccctgataaactcgatggtgccgggcggcccggcggcgaagagcaaggcgatcaccgtgggcgatcgcatcgtcggcgtcggccaggccggcaaaccgatggtggacgtgatcggctggcgcctggacgacgtggtgtcattgatcaaagggccgaaaggcagcaaggtgcgcctggagatcctgccggcaggcaagggcaccaaaacccgcgtggtcaccctgacccgcgagcgcatccgcctggaagaccgcgcggtgaaaatgaccatcaagaccgtcggcaaagagaaggtggcggtgttcgacatccccggcttctacgtcggcctgaccgatgacgtgaaagtgcagctgcagaagatggccaagcagaacgtcaagagcgtgatcatcgatctgcgcaccaacggcggcggcgcgctgaccgaagcggtgtcgctgtccggcctgttcattccgagcggcccggtggtgcaggtgcgcgacaacaacggcaaagtgcgtgaagacgccgacaccgatggcgtgacctactacaaaggcccgctggtggtgctggtcgatcgcttcagcgcctccgcctccgagatcttcgcggcggcgatgcaggattacggccgtgcgctgatcgtcggcgagccgaccttcggtaaaggcaccgtgcagcagtaccgttcgctgaaccgcatctacgatcagatgctgcgccctgagtggccggcgctggggtcggtgcagtacaccattcagaagttctaccgcgtcaacggcggcagcactcagcgcaaaggggtgaccccggacattctgatgccgaccggcgtcgatccggcggaaaccggcgaagcgtttgaagacaacgccatgccgtgggacagcatcaatgcggcgacctacagcaagaccggcgatatggcgccgttcgagccggagctgctgaaagatcaccagcagcgcatcgcgcagaatccggagttccagtacatcgcgcaggatatcgcgcattacaaggcgctgaaggataaacgcaacatcgtgtccctcaatctggcggtgcgcgagaaagagaaccacgacgacgatgcgacccgtttgaaacgcatcaacgagcgcctggaacgtgcgggcaagaagccgctgaaatcgctcgacgatttgccgaaggattaccaggaaccggatccgtacctggatgaaaccgtgcatatcgcgctggagctggctcatctggaaaaagatcggcccgctcagcagccagcgcaggccaaataa

SEQ ID NO: 422965 - DNA, 879 bp, Serratia marcescens
atgatgcgtatagctctgttcctgctcaccaacctggcggtgatgttggttttcgggctggtgctcagcctgacaggaatccaatccagtagcgttcagggtctgatgatcatggccggtctgttcggcttcggcggcgctttcgtgtcgttgctgatgtccaagtggatggcgctgcgctccgtcggcggggaagtgattgaacaaccgcgtaacgaaaccgaaaactggctgctggaaacggtgcgccgtcagtcgcagcaggcgggcatcgcgatgccgcaggttgctatctaccacgcgccggacatcaacgccttcgccaccggcgcacgccgcgacgcctcgctggtcgccgtcagcaccggcctgctgcagagcatgagccgcgacgaagcggaagcggtcatcgcgcacgaaatcagccacgtcgccaacggcgatatggtgaccatgaccctgattcagggcatcgtgaacaccttcgtcatcttcatttcgcgcctgatcgcgcaggttgctgccggcttcctgggcaaccgcgacggtgaaggggaaggcaacggcaacccgatgatttacttcgcggtgtcgatggtgctggaactggtgttcggcatcctggcaagcatcatcaccatgtggttctcgcgtcaccgcgagttctacgccgacgccggctccgccaagctggtgggccgcgagaagatgatcgccgccttgcagcgcctgaaaaccagctacgagccgcaggaagcgggcagcatgatggcgttctgcatcaacggcaaatccaagtcgttcagcgagctgttcatgtcgcacccgccgctcgataagcgcatcgaagcgctgcgttccggccagtacctgaagtaa

SEQ ID NO: 422966 - DNA, 708 bp, Serratia marcescens
atgaaaatcaacgctcttcccttgctcggctgtgatgaggcgctggcgcgccttaccatattggcgggcggcatcgccgatgcgtctgcggagttgttaaaccggaatggttacgattctgaacagccagctatacgctggcattcaggcgacctgcacctcccatcgtttttcccagacgagaacgacaggcacgattacgattatctggtcgtagaaggagatctgatcgtagaggggtgcatggcggtgtcaccccagcgggaggatggcggcatcattgtgctggggcggctgcagtcggatacgctgatttgtttgggcgagctgctcgtgcgtgacgatgcccgcatacgccatgcctattgcagctctggaaacgacggcgcgtttgtggtggggggaaatctggccgtgctcaccctggtagaaacgggggaatttatccatgtacatggcgatctcgacgcgcgatgtctcgcctcattgcagaacttcgttcaggttgacggagagacgcgctgcgactgtcgaatcgacaacgcgcagtccgctgaaccgatcacgcgcatgttcgcttcagacctgctgaaggcctttgagggggaggataacgacggccaacacattgttggctggtatccggatgacgatgcctatttagcgtgtttgcaacaaggccgcagccctttgaggagcggcgactga

SEQ ID NO: 422967 - DNA, 1395 bp, Serratia marcescens
atgcgtccttgttccgacggcctccccgtcccgcaacgctatggggcgatcctcgccatcgccctcggcattaccgtatccgtgctcgacggcgcgatagccaacgtggcgctgcccaccatcgcgtgcgatctcaacgccagcccggccagctccatttgggtggttaacgcctatcagctggcgatcaccgtctctctgctgtcgctggcgtcgctcggcgatctgatcggttatcgccgcatctatcaggccgggctgctggtgttcagcatcacctcgctgttctgcgccctgtccgactcgctgctcacgctgaccatcgcccgcgtgctgcaaggctttggcgccgccgccatcatgagcgtcaacaccgcgctgatccgcatcatctatccgcagcgttttctcggccgcggcatgggcatcaattcgctgatcgtcgcctgctcctcggcggccgggccgacggtggcggcggcgatcctgtcggtcgcgtcctggcagtggctgttcgccattaacctgccgatcggcctcgtcgcgctgctgctgggcatgaagttcctgccggccaacggccaaaaaagcgataaccgccgtttcgatcccaccagcgccgtgctgaacgcgctgaccttcggcctgctgatcactgccatcagcggcttcgcccagggccagagcctgacgctgatcttcagcgagatcgccgcgctgctggcgattggcgcggtgttcgtgcgccgccagctgcgccaggaatttccgctgctgccggtcgacctgctgcgcatcccgatcttcgccctgtcgatgggcacctcaatctgctcgtttgctgcgcagatgctggcgatggtatcgctgccgttctttctgcaaagcgcattgggccgcgacgaagtggcgaccgggctgctgctgacgccgtggccgctggcgatcgtggtgatggcgccgatcgccggccggctggtagagcgcgtgcacgccggcctgctgggctgcattgggctggcggtgttcgcacttgggctgttctcgctggcgctgctgcccgcggacccgtcgaatggggacatcatctggcgcatggtgctgtgcggcgccggcttcggcctgttccagtcgcccaacaaccacaccatcatctccgccgcgccgcgcaaccgcagcggcggcgccagcggcatgctgggcaccgctcgcctgctggggcaaacctcgggggccgcgctggtggcgctgatgttcaacctgttccccacctccggcacccacgcatcgctggtcctggccggcgtgttcgccactctggcggcggcggtcagcagcctgcgcatcacccaatcgacggcgcaaacggcgcagccaagccgcgaggtgaaatag

SEQ ID NO: 422968 - DNA, 792 bp, Serratia marcescens
atggctaacgcagattcagacaagcaaccggatgccgtctcatccgtaatgaaagtgttcggtattttgcaggcgctcggcgatgagcgcgagattggcattactgaactgtcccagcgggtgatgatgtccaaaagcaccgtctaccgttttctgcagaccatgaaagcgctgggctacgtttcgcaggaaggggagacggaaaaatatgcgctgacgctcaagctgttcgagctgggcgccaaatcgttgcagaacgtcgatctgatccgcagcgccgacgtgcagatgcgcgaactgtcgaaccgcacccgcgaaaccatccaccttggcgccctggatgaggacggtatcgtctatatccacaagatcgacgcgatgtacaacctgcgcatgtattcgcgcatcggtcgccgcaacccgctgcacagcaccgccatcggtaaagtgctgctggcctggcgcgatcgggatgaggtggcgcagatcctgtcgcagattgaatttacccgcagcaccgagcataccctgaccagcgccgccgaactgctgccggtgctggagcgggtgcgtgagcagggatacggcgaagatgccgaagagcaggaagtggggatccgttgtatcgcggtgccggtattcgatcggtttggggtggcgatcgccgggttgagcctctctttcccgacgctgcgcttttccgaagcggcgcgggaggaatatgtggcgctgttgcacgtcgccgcccggcgcatcagtgaacagcagggctattacgactatccgttctga

SEQ ID NO: 422969 - DNA, 804 bp, Serratia marcescens
atgttgatttggtctcgcaccggccgcaccctgacctgcacgctggcggtcacgctgttcgcgctgttcttctgcctgccgctggcggtgatcctgatgtccagcctgagcgaacagtggaacggcgtgctgccgagcggtttcaccctcagccacttccgccaggcctttggcggcgcctcctgggacgcgctggtcgccagcctggctatcggtttcagcgccagcctgttcgcgctgctgtgcggcacctgggcggcgttggcgctgcgccaccatcaggggcgcggccagcgcctgctgagcacgctgttcttcattcccagcgcggtgccttcggtatcgatcggtctcgggatgctggtggcgttcagccaggggccgctgcagatgaacggcaccttcctgatcgtgcccgtcgcgcacttcgtgctgatttccgccttcaccttcggcaacgtgatggccgggctggcccggctgcctggcgactacgagaacgtcgccgccagcctgggcgcttcgccgctgttccgcctgcgccacgtcaccctgccgatgatcgccccctatatgatctccgccttcgccctcagcctgtcgctgtcgatgggagagctgggcgcgaccatgatgatctacccgccgagctgggcaacgctgccggtcactatcttcagcctgaccgatcgcggcagcatcgccaacggcgcgacgctgaccatgatcctggtggcggccacgctgttgctgatgttagtgctggaacggatttcgcagcggctgacgccgggcgtgaaatag

SEQ ID NO: 422970 - DNA, 864 bp, Serratia marcescens
atgaccgactctacgcttactcgcccggcccggcggccgcgttcaccgcgccgtttatggatcctgctgccgctgctggtgctggcgacgctgtttttctatccgctggcgctgatcgtcaaacaggcgtttaccgacgatcaggggctgttcagcgccgccgcgctgcagcaggtgttcgaatcccgacgctttgtcagcgccctgctcaatacgctgcagattgcgctgctggcgacgctgggctgcctggtgctcggcaccctgctgtcgctgctgctggtgttcacgccgttccccggcagccggctgatcgcctgggtgatcgatacctttatcgccatgccgaccttcctgatcaccttggccttcacctttatctacggctccgccggcctgctgaacggtacgctgatggcgaccttcggtttcaccctgccgccggtagactttctttactccatctggggcgtgatcctggcggaaatcaccgtgtttacgccgctggtgatgcgtccgctgatggcggcgctgtcgcagatcgatcgcagccagctcgaagccgccagcatcctcggcgcccggccggggcgcgtggtgcgccaggtgattttgcccgccgcgctgccggccttgctggccggcggcagcctgtgcctgctgttgaccaccaatgagttcggcatcgtgctgtttattggcgccaagggcgtcaccacgctgccgatgatggtctactccaaagcgattctggagtcggattacgccgtcgcctgcgcgatcgccgtcgtgaatatcgcgctgtcgctcgggctgttctccctttaccgctacgccgcggcgcgcgccgggctgaggaactga

SEQ ID NO: 422971 - DNA, 1137 bp, Serratia marcescens
atgacgctgacaatgccttctaccctctcttcccgcgccgaggcgcgggataacagcctcgacatcgccgggccgtcgggcatccaactcgaccgcgtcagcgtgtcgtatcgcggcaccgaagtgctgaaacccctgacgctcaccatcgccccgggcgaagtgctggcgctgatcggcccctccggctcgggcaaaaccaccgtgctgcgggcgatcgccggtttcgtgcagccttccgctgggcgtattgccatcggtgacgtcgatgtcaccgacatgccgccctatgagcgcggtctgggcatggtggtacagaactacgcgctgtttccgcatatgcgcgtcgaggacaatgtggcgttcggcctgcgcgcccagggcaagccgcgcggcctcaccgccgagcgcgtcgaggaggcgctggccatcgtcggcatgtccgcctacgccaggcgttatcccagccagctctccggcggccaacagcagcgcgtggcgatcgcccgcgccatcgcggtgcgacccaaagtcttgctgctggatgaaccgctgtcggcgctggacgcgcagattcgccacagcatggtggaagagatcgcccgcctgcaccgcgagctgccggagctgaccatcctgtacgtcacccacgatcagggcgaagcgctgacgctggcggacaagattggcatcatgcgcgacggacacctgatcgcccacggcgagacccgcgcgctgtaccgtcatcccacaaaccgcttcgccgccgagttcctcggccgcgccaacctgctgccggccaccgcgctggaaaccaccgccggccaaggcatgaccaccgtcagctgcgctggaaaagtgatcggctgtttcacctacggcgcacaacgcggcttcgacaaactgctgtgcattcggccgcagcatattgcgctcgatgccgatgcccagcgcagcaactgcatcgtcggcacgctgcgcgatattcactggcagggggagttgacgcacctgcagttcgacgcgcaaggccacccgctgcgcgtggtcaccacccatcagagccggatgccgcagatcggcgagcgcgtgccgctctatttcgcccctgacgacgcggtactgatcgaggactga

SEQ ID NO: 422972 - DNA, 1011 bp, Serratia marcescens
atgaaactttctcgtctggtcgtgatgaccgccatcgcactcggctccgcgccggcctgggccgccgacgcggtggtgaccgtctactccgccgatggtctgcacgccggcgatcacagctggtatcaaacccagttcggcgccttcactcaggcaaccggcatcaaggtgcagtacgtcgaaggcggttccggcgccatcgtagagcggctgtcgaaagagcgcagcaacccgcaggccgacgtgctggtgacgccgccgccgttcatccagcgcgccgccgcggaaaaactgctgcaggatttcaccccgcaggatgcggcgcagatcgccgatgctcagccgcagttcgtgccgctggtaaacaactacctgagcttcatctataacgccaaactgttgccgcaggcgcccgccagctatcagcagctgctggatgcgcagttccacaacaagctgcagtactccacgccgggccaggccggtgacggcaccgcagtattgctgcaggcgtttcacagcttcggtagcaaagacgccggtttcgactacctcggcaagctgcaaagcaacaacgtcggcccttccgcttccaccggcaagctgaccgcgctggtcaataaaggcgagctgttggtggccaacggcgatctgcagatgaacctggcgcagatgcgcagcaacccgaacgtgcaggtgttctggccggccggcccggacggcaagcgcagcacgctggcgctgccttactatatcggcctggtgcaaggcgcgccgcaaagcgccaacggcaaaaagctgatcgacttcctgctgagcaaagaagcgcagagcagcgttagcgccatgtcctacggcatgccggtgcgtaaggacgtcatcccgaccgacgataacttcaagcggtcgcaggcggcgctgaaaggcgtggacatctgggcgccggactggaatcaggtggtaagcagcctgtccgccgatatctcacgctggcacaaggtgaccgaatga

SEQ ID NO: 422973 - DNA, 720 bp, Serratia marcescens
atgaaagaacatcagggcgatatgccccactacctgcagatcaaggatcagcttcaggcgcgcatcacccgcggcgcgctgcaggcgggcgacaagctgccttcggagcgcgagctgtgcgccatcttctccaccacccgcgttaccattcgcgagagcctggcgcagctggaggccaccggcgccatctatcgcgccgatcgccgcggctggttcgtcacgccggaacggctgtggctggatccgacgcagaacaccaacttccaccgcctgtgccaggagcaggggcgcgcgccgcgcaccgcgctgctgtccggcgaaaaaaccacggtgccgcttgacgtgatgcagccgctggcgctcgaacccttcgaccaggtgtatctgctgcgccgcgtgcgctacgccgacggccgcgccatctgttattgcgaaaaccactgcctgccgcagcgggtgccggaactgctcagccacgatctcaacggcagcctgaccgaagtctatcaacagcattacgcattgatttacagcaacatgcacctgtcgttctacccgacggccctgccttaccgcgccgccaacgcgctcggcgccatggtcggcctgcccgccttattgctgcgccggttgaattacgaccagcacggccgcattcttgatttcgatatcgagtactggcgccacgacagcctgcgcatcgaagtcgatacgctttaa

SEQ ID NO: 422974 - DNA, 1104 bp, Serratia marcescens
atgtccgatcgtaactacctgctgttgacccccggcccgttgaccacgtcgaaaacggtaaaagaggcgatgctgttcgacagctgcacctgggatgaagattacaacctgggcgtggtgcaaagcatccgccagcagttggtggcgctggcgacgccgtccgccggttacacttcggtgttgctgcagggcagcggcagctttgcggtggagggcgtgctgggcacggccatcggcccgcaggacaagctgctgatcgtcaacaacggcgcctatggggcgcggatgatcgaaatggcgcggctgatggatatcgaccaccacgctttcgactgcggcgaggtcaatgaaccggacgtggcggcgatggaggcggtgctgaaaagcgatgcgcgcatcagccatatcgccatggtgcactgcgaaaccaccaccggcatgctcaacccgctgcagaaggtcgccggcctggcggcgcgcaacggcaagacctttatcgtcgacgccatgagcagcttcggcggcatcccgctggatgtggacgcgctgggcatcgattttctgatcagctccgccaacaaatgcattcagggcgtgccgggcttcgctttcgtcatcgcccgccgcagcgaactggagaaatgcgccggccgttcacgctcgctgtcgctggatctgtatgcccagtggcgctgtatggaagaccaggccggcaaatggcgctttacgtcgccgacccacaccgtgctggccttcgcgcaggcgctgaaagagctggagcaagagggcggcattgccgcgcgccaccaccgctatcaaaccaatcagcggcggctggtggcgggcatgcgcgagctgggctttgagactctgctggatgatgcgttgcattcgccgatcatcaccgcattctattcgccaaaggccgacacttaccgcttcgccgaattttatcagcgcctgaagcagcaagggtttgtgatctatcccggcaaagtgtcgcagagcgactgctttcgcatcggcaacatcggggaaatttacccgcaagatatcgaacgtttgctggcggccgtcgggcaggcgatgtattggaatcaataa

SEQ ID NO: 422975 - DNA, 810 bp, Serratia marcescens
atgaaacagatcaacgcagtgatcctcgactgggccggcaccacggtggacttcggctcctttgcgccaacgcagattttcgtcgaggcgtttaaacaaaccttcgatatcgacatcagcctggcggaggcgcgcattccgatggggctgggcaaatggcagcacatcgaggcgctgggcaagctgccggcggtcgacgcgcgctggcggcagaagctgggccgctcgatgagccaccaggacatcgacgcgctgtatcaggcgtttatgccgctgcaaatcgccaaagtgatcgacttcgccaatcccatcgagggtgtgccacaggtgattgccgggctgcgcgaacagggcattaaaatcggctcctgctccggttatccgcgtgcggtgatggaggtgctggtgcctgccgccgcgcagcgcggctacgcgccagattactgggtcgccactgacgatcttgcggccggcgggcggccggggccgtggatggcgttgcagaatgccatcgcgctgggcatcgatgcggtggcgcactgcgtgaaggtggacgacgcggtgccgggcattcatgaagggctgaacgccgggatgtggagcgtcgggctggcgctgtccggcaacgagtttggcgcgacctggcaggagtaccgccaaatggcggcggcagagatcgagctgcgccgtacggcggcggccgataagctgtatgcggcgggcgcacattatgtgatagacacgctggcgcaattgccgggcgttatcgccgacatcaaccggcggctggcggacggcgagcggccgtaa

SEQ ID NO: 422976 - DNA, 1392 bp, Serratia marcescens
atgaattttccgctcgtgattaacgtgctggtgtttgtcgcgctcctgttgctgctggcgcaaacccgccacaagcaatggagcctggcgaaaaaagtgctggtcggcctggtggtcggcgtggtgttcggtctgggcctgcagctggtgtacggctccgacaacccggtactgaaagaatccatcagctggttcaacatcgtcggcaacggctatgtgcagctgctgcaaatgatcgtcatgccgctggtgttcgcctcgatcctgagcgcggtggccaagctgcataacgcctcttctctgggcaaaatcagcgtcctgactatcggcacgctgctgttcaccacgctgatctcggcgctggtgggcgtactggtcaccaacctgttcggcctgaccgccgaaggcctggtgcagggcgcgcaggaaagcgcgcgcctgacggcaatccagaccaactacgtgggtaaactggccgacctgaccgtgccgcagatggtgctgtcgttcatcccgaaaaacccgttcgccgatctgaccggcgccagcccgacgtcgatcatcagcgtggtgattttcgccaccttcctcggcgtggcgtcgctgcagctgctgaaagacgacaagccgaaaggcgagcgcgtgctggtggctatcgacaccctgcaagcctgggtgatgaagctggtgcgtctggtcatgaaactgacgccgtacggcgtgctggcgctgatgaccaaagtggttgccggttccaacattcacgacatcgtcaagctcggcagcttcgtggtggcctcgtacatcggcctggccatcatgttcgtggttcacgccgccctgctggccttcaccggcgttaatccgctgaaattcttccgcaaggtgtggccggtgatcaccttcgccttcaccagccgctccagcgccgccagcattccattgaacgtggaagcgcagacccgtcgcctgggcgtgccggaatccatcgccagcttctcggcgtcgttcggcgccaccatcggccagaacggctgtgcaggcctctacccggcaatgctggcggtgatggttgcgccgaccgtcggcatcaacccgctggatccggtgtggatcgccaccctggtcggcatcgtcaccatcagctccgccggtgtggcgggcgtgggtggcggcgccaccttcgccgcgctgatcgtgctgccggcgatgggcctgccggtaacgctggtcgcgctgctgatctcggtcgaaccgctgatcgacatgggccgtaccgcgctgaacgtcaacggctccatggcggcgggcaccatcaccagccagctgatgaagcaaaccgacaaaaccgtgatggacagcgaagacgaagtcgaattggctcaccgttaa

SEQ ID NO: 422977 - DNA, 549 bp, Serratia marcescens
atgaccgcggaaggacaccttatattctctgtcgcttgcgcgatcttcgccaagaaggcggaagtgacgccagagctggctaccggcgactggtggcacatcatacccgccgcgctgctgacctcgctgctgccggatatcgatcaccccaagtcggtgctgggccagcgtctgcgctggctcgccattcccatcgcccgcgcattcggccaccgcggtttcacccacagcctgctggcgatcgccggcggcatggcgctgttccagttggacgtgccgcgcagctggccgatcccggccgacgcgctgcacgccatgatcatcggttacttcagccatctgctggccgatatgctcacccccgccggcgttccgctgctgtggccgtgccgctggcgttttcgtctgccgctgctcaactcgcaaaagggcaaccagctggagcgtgtgttgtgtctatgcctggtggcgtttgccatctgctggcaaggtgatttcaccctgccggtgcaatcctatgtcgagcaaatcagaaatattagaccctga

SEQ ID NO: 422978 - DNA, 666 bp, Serratia marcescens
atggcttattcgcaacgcattgaaaccgcaatttttgatatggacggcttgttgatcgactcggaaccgctgtggctgcaggccgagctggatatcttcggcgcgctgggtctggatctgtccgatcgccacaagctgccggacaccctggggctgcgcatcgatctggtggtgaagatgtggtaccaggcgatgccgtggcaaggcgtatcgctcgatgaggtgtcggcgcggattatcgaacgggccatcgagctggtgcacgagacgcgcccgctgctgccgggcgtccggcaggcgctggagctgtgccgcgagcaggggctgaacatcggcctcgcctccgcctcgccgctgcacatgcaacggcaggtgctgaagatgttcgatcttgagggctacttcgatcagctggtttccgccgaatacctgccgtatagcaaaccgcatccggaggtctacctgatcgccgccgagcgcctgggcagcgatccgctgcgctgcatcacgctggaagactcctttaacggcatgatcgccactaaggccgcgcgcatgcgttccatcgtcatcccggccgccgaataccgccacgatccgcgctgggcgctggcggaccaccagctggagaccctggaacagctcacccccgcccactttgcctga

SEQ ID NO: 422979 - DNA, 1281 bp, Serratia marcescens
atgattcgactgattatcttattgctgggcgcgcaggcgctgcacggccagcgccgcctgctggtgctgttcggttggctgtggatagccgcaggggcgctggtgctgttcgacatactgcaggatggccgatccgtgctggcgctggatgcgctggcggtcatcctggcgctggaggggctggtggcgatatccgccgcgctggtgatcggctcttccgccagcaggccagtgctgctgaaggggctgggcttcgtgtttatggcctttttaatgttggacgtgcccgcagacgataacatcgtcgccaccgtggtgtttggcagcgcgctgctgcttgacggcgccgtgcgcatcgcctcctccacggtgattcaacacagtcgatggaaagccgtggcgctggcgggcggcggcgagatcctgctttcgttgatgatttttgtcggctggccggcgccgcaccggatgacggtgcccttttgcctcggcgtgatgatggtgctttccggctgggctttattgcgtatcgcccggaggctggcaagcttctctctgaatcagcaccccgcgcggcagccaccgcccccggcggacgaggctacgccgctcacggtgtatgtctggacaccgattggtgctgctaaagatccacgccggcgttacattgtcgaccgatacatcgcggcggtcgacggcggcggcaatatctccaccggtcatgccgccctggcgctcgcgccggatgtgtatatcagtcactacccgctcaacgacatcagccattccgttcaggatttccgccagttgctgcatgccggcgaacagaacaacgtcgacgggcgtttcctgcccgacctgccgggcgagatcgccgcctggtgcccgccggacaagaaaattcagttctatcgctataacccggcggcgctgcgcgcattctggctgcggtatcggcaggacgcgacttacaacctgactcggcgcaactgctccaccacggtcatcggcgcgctcgacagcgcgctggagggcgtgctgggcgataaacatctgtggcgccgttttctgttattggtgctggatcccaatctgtggatgctggcggtactgcgcagccgtggcgaaagcatgacctggacgccgggactggtgctggactatgcccgcatgttgcaacaggtcaccgagcgccaacaccaacgctggtggttaaaattacgcgaggtgtggaatatccttcgctttggcaaaagccaaacgcgcaggcaaagattttag

SEQ ID NO: 422980 - DNA, 561 bp, Serratia marcescens
atgacgtatcaacaggccgggcgtatcgccattttgaaacgcattctcggatgggtggtttttatcccggcgttgctgtcgacgctgatttccgtgctgggctttgtctaccagcacagtgaaaaaaccaagggtatcaacgcggtgatgctggattttgtccacgtgatggtggacatggtgcgtttcaatacgccgttcctgaatcttttctggtacaactccccggtgcctgacgtggataaaagcctgttcagcggcgccaatctgatgttcatcatcatctacatactgatcttcgtcgggctggcgctgcaggcttccggcgcgcgcatgtcgcgccaggtcaagttcatccgcgaagggttggaagaccagatgatcctggagcaggccaagggcagcgaagggcacacgcgccagcagctggaggagcgcattacgctgccgcaccacaccatcttcctgcaatacttcccgctgtacatcctgccgatcgtgattgcggtgatcgcctggttcgtgatccgcctgttggggcagttggccggcgctgcctga

SEQ ID NO: 422981 - DNA, 870 bp, Serratia marcescens
atgtggcaagccgttagccgtctgttaagtgaacatcttggcagcgcagagatacgcgaaaggattgaactgcccgggggcgacattcacccggcgtggcgcgtgagttacggtgacaacgaggtgttcgtgaaatgcgacgcccgtgaacaactgccgatattcaccgccgaggccgatcagctggcgttgctggcgcgcagcaaaagcgtgcgggtgccggaagtgtacggcgtcggcagcgatcgcgactacagcttcctgctgctggagtatcagcagctgaaacccctcgacgcccacggcgcctactgcctgggccagcagctggcgcatctgcaccagtggagcgagcaaccgcagttcggtctcgacttcgacagcgatctgaccaccaccccgcaacccaacgcctggcagcgccgctggtcggaattcttcgccgagcagcgcatcggctggcagctgcagctggcggcggagaaaggcatgaccttcggcgatatcgacgacatcgtcgatcgggtgtatctgcgcttgcagcaccaccagccgcagccttccctgctgcacggcaacctgtggccgggcaactgcgcgatgaccaccaacgggccgattctgttcgacccggccagttactggggcgaccgagagtgcgatttggcgatgctgccgctgtatccggagctgccgccgcagatctacgacggctatcagagcgtgtggccgctgggtgccgggtttatcgagcgccagccgctgtatcagctgtactacctgctcaaccgcagcaacctgttcggcggccagcatctggtggctgcgcagcgcgcggtggaggcgctgttgcagcccgaggcgtcgtaa

SEQ ID NO: 422982 - DNA, 855 bp, Serratia marcescens
atggacaccctgtatcaactgctcagcgaacccttcgcctacccgttcatgcagcgggcgatcgtcgccgccatcgtcaccggcgtagtgtgcgcagtgctctcctgctacctggtgctcaaaggctggtcgctgatgggcgacgccatctcgcacgcggtgctgcccggcatcgtggtggcgttcgtggtcggcattccgctggcgatcggcgccttcctttccggcatcttctgtgcggtagccaccggctacctgaaagagaacagccgggtgaaagaagacacggtgatgggcatcgtcttttccggcatgttcgccttcggcctggtgctgttctcacgcatcgataccgaccaacacctgagccacattttgttcggcaacatgctgggcattaccgacggcgagctgaagcaaaccctgctgatcgccggcatcaccctggcggtggtgctgctcaagcgcaaagacttcatgctgtactgcttcgatccgcatcatgcgcgggtgattggcctgccggtcaagctgctgcactacgggctgctgtgcctgctggcgatgaccatcgtcgcctcgctgcaggccgtgggggtgatcctggtgatcgccatgctgatcgccccgggcatcatcgcctttatgctgtgccgccgcttcgaacgcatgctggtggtggcgacggtagtgtcggtgttctcctgcgtgcttggcaccctgatcagcttccacatcgacggcgccaccgggccctgcatcgtcatcgtacaggccgtgctgttcgttatcgccttgttgtacagcaagctgcgtccgttacagcgtaaccaaaacgccctcaccggcggttaa

SEQ ID NO: 422983 - DNA, 861 bp, Serratia marcescens
atgctggaccttctgctgcaacctttcagttataactacatggttaaggccatctgggtcagcgccatcgtcggcgccgcctgcgcgttcctctccgcctacctgatgttgaaagggtggtcgctgatgggcgacgcgctgtcgcactcggtggtgcccggcgtggccggcgcctacgccctcggcctgccctacgccgccggcgccttcttcaccggcatgctggcggcgctggcgatgacgctggtgcgccacatcacccggctgcgcgaagacgccatcatcggctttatcttctccaccttcttcgccgtcggcctgctgatcgtgtcgctcaaccccacctcggtcaacgtgcagtcgatcatcttcggcaacatcctcggcatcgccgatgaagacgtgctgcaggtggaaatcattatcggcgtttcgctgctgatcctgtgcctggtgtggaaagacctgctggcggtgttcttcgacgaaagccacgcggtgtcgatcggcctgtcgccgctaaagctgaagatcctgttcttcaccctgctcagcgcctgcaccgtcgccgcgctgcaaaccgtcggcgccattttggtgatcgccatggtgatcacgcctggcgctaccgcctatctgttgaccgatcgcttcagccggctggtgatcatcgccatcatcatcggcgcattgaccagcggcatcggcgcctacctgagcttcttcctcgacggcgccaccgggggggtgatcgtcaccctgcaaacgctggtgttcctcgcggcgttcttcttcgcgccgaaacacggcctgctggcgtcccgccgccgcgtggcgcattcgcaaaccggaggccgctga

SEQ ID NO: 422984 - DNA, 891 bp, Serratia marcescens
atgacccatgaaccgtttgtccgccctgagttgaacgtggacgacgtcacagtgacctacaacaacggacacaccgccattcacaacgccagctttaccctgagcggcggttcgatctgcgcgctggtcggcgtcaacggcagcggcaagtcgacgttgttcaaaagcatcatgggcctggtcaggcccaccgccggccgggtatcgctgagcgacaaaccggtggcggaggcgctgaaaaagaatctgatcgcctacgtgccgcagaccgaagacgtcgattggaacttcccggtgctggtggaagacgtggtgatgatgggccgctacggcaagatgaacttcctgcgcattccgtcgcgcgaggatcggctgcgggtcgacaaggcgctggagcgcgtcggcctgagcgagctgcgcggccggcagatcggcgagctgtcgggcggccagaagaagcgcgtgtttctggcgcgcgcgctggcgcaacagggcaccgtgctgctgctggatgaaccgttcaccggcgtggatgtgaaaaccgagaatgccattatcgatctgctgcgcgcattgcgcgacgaggggcacctgatcctggtctccacccacaacctcggcagcgtgccggagttttgcgatcgggtgatcctcatcaaccgcacggtgctggccgccggcccgaccgaaaccaccttcacccagagcaatctggagcaggcgttcggcggcgtgctgcgccatatcaacctctccggcccggatctgcacgacgacaacgatccgcgcaccgttacggtgttgaccgacgatgagcgcccggcggtgttctacggccacaccaagagcgatccgccggccaacagccaggccagggagaaacaatcctga

SEQ ID NO: 422985 - DNA, 945 bp, Serratia marcescens
atgccattgataagttgcgcttttcgtcgcagtcgccctttccgcgctgccacactgttacgccctttcacgctcgcctgcctgctgctcggcgccgccttggtcagccaaaacgcgctggcggaaaaaaagctgcgcgtggtgacgacctttaccatcattcaggacatcgcccagaacgtggcgggtgatgccgccgtggtagagtccatcaccaagccgggcgccgagatccacgactatcaaccgaccccgcgcgatatcgtcaaagcgcagcacgccgacctgatcctgtggaacggcatgaacctggaacgctggttccagcgtttcttcgaaaacatcaagcaggtgccggcggcggtagtcaccgaaggcattaccccgctgccgatccgcgaagggccgtataacggcaaccctaatccgcacgcctggatgtcgccgagcaacgcgctggtatacatcgagaacatccgcaaagcgctggtggagcacgatccggccaacgcggcaacctataaccgcaatgccaaggcctacgcagagaaaatcggcgcgctggacgccccgctgcgcgaacgcttggcgcgcattccggccgcacagcgctggctggtgaccagcgaaggcgccttcagctacctggcgcaggactatcagctgaaagaagtctatctgtggccgatcaacgccgatgagcaaggctcgccgcagcaggtgcgccgggtgatcgacgcagtgcgcgcccaccatattccggtagtgttcagcgagagcaccatttccgacaagccggccaaacaggtggcgaaagaaaccggcgccaaatacggcggcgtgctgtacgtagactcgctgtccacccgcgacggtccggtgccgacctacatcgacctgcttaacaccaccgtgcaaaccatcgccaaaggattcgatcaatga

SEQ ID NO: 422986 - DNA, 300 bp, Serratia marcescens
atgagtcaatctgcaacaaactgctttgtggtgacttttcgctatcaggaagagggattaaccgacctggcgaagctgaccgggcaattgacgcgcgaaggttttgtcacgtcggtgacagacgaaaatggcgtgcaccatgagctcggcagcaacagttttgcgttcataaccgtgctggatcaagaggatgtacagcgcctggcgcaggggttcggccagttggcattgggaaaacagccggaggtggcgatatgcgcctgtaaggactaccttcagcggttacatactgatacataa

SEQ ID NO: 422987 - DNA, 666 bp, Serratia marcescens
gtgaaaacaaaaataggttgccttacggcaattttgcttttgtcggggtgcgccaaagatccgcaaacggcaagcaatatttcaggcagtggcacaacgcgcggcggttggttaaaaccccctccgcaggcaccggtaaaccgcacaggcacgccggttgcctataacgattacattcgtcaggccgccagcaactacggcgttgacgaaacgctgattaaagcgattattcaggtggagtccgggtttaacccgaacgtggtcagcacctcgaacgcagtgggattgatgcagcttaaggcttctaccgccggccgcgacgcctatcgcatgaaaggacgaagcgggcaacccagctcgcgtgagctgaaggatccggcggtcaatattgatctgggaacggcctatatcaatattcttcaaagccagcagctagccgggatcaacaacccacagactttgcgttatgccaccatcgtttcgtacgtgaacggggcgggcgccatgttgcgcaccttctcctcggacaagcgcgtggcggtgaatcgcatcaatcagatgagcccggacgagttttatcagcacatccagaaaaagcacccggcgccgcaggcgccgcgctatttgtggaaggtgaccaccgcctaccaggcgatgtcgcagtaa

SEQ ID NO: 422988 - DNA, 726 bp, Serratia marcescens
atgtcgaatcataaaaccaacaattcgcggcgcgatttcttgttgaaatcgatgaccttaattcctgcggcggtaattggtggcagcggcgttggcgcgctgacggcaccgacaccggcggtcgcggcctcgaacacctcaacgcagaacgattaccaaccgacctttttcaccccggaagagtgggccttcatcaaggccgccgtggcgcgcctgatcccggccgacgagcgcggccccggcgcactggaagccggcgtgccggagtttatcgatcgccagatgaataccccgtacgccaccggcgccatctggtacatgcaggggccgttcaaccccgatgtgccgaaggagatgggctatcagctgccgctggtgcccaagcaaatctacaacctcggcatcagtgacgccgacgcctacagcaagaaaaccgccggcaaggccttcgccgaactggatggcgcgcagcaagacgccatgctgcaaaagttcgagtccggcgaggcggagttcccgcagctgccgtcgaaactgttcttctcctatctgctgcaaaacacccgcgaaggtttcttcagcgatcccatccatggcggcaacaaagacatggtgggctggaagctgattaattttccgggcgcgcgcgccgattttatggactgggttgagcgaggggagcgttatcccttcccgccggtctcgattcgtggggagaggggctaa

SEQ ID NO: 422989 - DNA, 1782 bp, Serratia marcescens
atggcaacggtaatgaaaaaagtagacgcggtgatcgtcggcttcggctgggtgggcgcgatcatggccaaagagctgaccgaggccggcctcaacgtggtggcgctggagcgcggcccgatgcgcgatacctatccggacgggtcttatccgcaggtgatcgacgagctgacctataacatccgccgcaaactgttccaggatctgtcgaaaagcaccgtcaccattcgccataacagcagccagaccgcggtgccttaccgccagctggcggcgttcctgccgggcaccggcgtcggcggcgccggtttgcactggtcgggcgtgcatttccgcgtcgatccgatcgaactgcgcatgcgcagccactatgaagagcgctacggcaaaaacttcattccgaaggacatgaccatccaggacttcggcgtgacctacgacgagctggaaccgttcttcgacaaggcggagaaagtgttcggcacctccggcaccgcctggaccatcaaagggcagaaagtggcgcagaagggcggcaaccgctttgcgccggatcgctccgacgatttcccgctgccggcgcagaaaaatacctactccgcccaactgttcgagaaggcggcgctggaggtgggttaccacccttacaacctgccgtccgccaacacctcggattcttacaccaacccgtacggcgcgcagatgggcccgtgcaacttctgcggtttctgcagcggctacgcctgctacatgtattccaaggcctcgccgaacgtcaacatcttgccggcgctgcgcatggagaaacgcttcgagctgcgcaccaacgccaacgtgctgaaggtcaacctgaccgacgacaagtcccgcgccaccggcgtgaactacgtcgatgcgcaggggcgcgagattgaacagccggccgatctggtgatcctgggcgcgttccagttccacaacgtgcacctgatgctgctgtccggcatcggcaagccttacgatccggtgaccggcgagggtgtggtcgggcgtaacttcgcctaccagaacatgaccaccatcaaggcgttcttcgataaagacgtgttcaccaacccgtttatcggcgccggcggcaacggtgtgggcgtggacgacttcaacgccgacaacttcgaccatgccaaagaaggcttcgtcggcggttcgccgttctgggtcaaccaggcgggcaccaagccgatctccggtctgccgacacctccgggcactccggcctggggcagcaaatggaaagcggcggtggcggatgcttacactcaccacgtttcgatggacgcccacggcgcgcaccagtcgtaccgcaacaactatctggatctcgatcccaactacaagaacgtctttggccagccgctgctgcgcatgacgttcgactggcaggagaacgacatcaagatggcgcagttcatgtatgacaaaatggcgccgatcgccaaggcgatgaacccgaaactgatcgccggcagcccgaaaaacgccaacagccacttcgacaccaccagctaccagaccacccacatgaacggcggcgcggtgatgggggaagatccgaagaccagcgcggtcaaccgctatctgcagagctgggacgtgcacaacgtgttctcgatcggcgcatcggccttcccgcaggggctgggctacaacccgaccggcaccgtggcggcgctggcttactggtctgcccgcgccattcgcgagcagtatctgaaaaacccaggcccattggtgcaggcataa

SEQ ID NO: 422990 - DNA, 1338 bp, Serratia marcescens
atgaaagcatttgtaccggcactggttctcagtgcagtgagtttttccgtttgggcgcaggacgccaccgtcagcagcgagctgatcaagcgcggtgaatacctggcgcgcgccggcgactgcgtggcctgccacaccgacggcaagagcggcaaaaccttcgccggcggcctggcgatggagacgccgatcggcaccatctactccaccaacatcacgccggacaagaaaaccggcatcggcgattacagcttcgaggatttcgacaacgcggtgcgtaagggcgtagccaaaaacggcagcaccctgtatccggcgatgccgtacccgtcgttcgcgctggtgaaagaagacgacatgcgcgccatgtatgcctatttcatgcacggcgtgcagccggtggagcaggccaacaaggattccgacatcccgtggccgctgtcgatgcgctggccgctgagcatctggcgcggcatgttcgcgccgtcgccggcggacttcgtcgccgacgccaaggccgatccggtgatcgagcgcggccgctacctggtggaaggcctgggccactgcggcgcctgccataccccgcgcagcatcaccatgcaggaaaaagcgctgagcaacagcgaaagcgacgattacctgtccggcagcaacgcgccgatcgacggctgggtggcttccagcctgcgcggtgataacaaggacggcctgggcagctggagcgaagccgagctgaccgagttcctgaaaaccggccgtaacgacaaggcgatcgtattcggcggcatgagcgacgtggtggagcacagcctgcaatacctgagcgacgacgatctgaccgctatcgcacgctacctgaaatcgctgccgccgaaagacggcaagcagcaggcggcgccggtcgaagacagcgtggccaaggatctgtggcgcggcgacgacagcaagcccggcgcggcgctgtatgtcgataactgcgcggcctgccaccgcaccgacggggtgggttacaagcgcgccttcccatcgctgaagggcaatccggtggtgcagaccgaggacgcgacctcgctgatccacatcgtgctgaccggcaacaccacgccggcggtgcagggggcggtgtccaacatcaccatgccgccgttcggctggcgtctgaacgatcagcaggtggcggacgtggtgaacttcatccgcaccagctggggcaacagcgccaaaccggtgagcgcctccgacgtggccgacgtgcgtaaagaccgctcgatgatccgcgacgagaaggagatgggcagcgccgaggttccggaccacccggacgcgaagaagtaa

SEQ ID NO: 422991 - DNA, 1314 bp, Serratia marcescens
ttggcgccgcagattaaggtagactgtctcatgagtacgatttctcccgattcaggcacgctgacggccgctcagcccgccaaatggaacaaaaccgacaccgtctggatgttcggtctctatgccaccgcggtgggcgccggcacgctgtttttgccgatcaacgccggcctgaacggcccgctggtgctgctgttgatggcgctgttcgctttcccgctgacctatctgccgcaccgcgcgctcagccgcttcgtgctttccggctccagccgcgacggcaatattcacgatgtggtggtcgaacacttcggcgtactggccggcaaaatcatcatgatgctgtatctgatggcgttcttcccgatcgtgctggtgtacagcatttcgatcaccaatgcgctggacagcttcctgatccaccagttccacgtggcgccgctgccgcgcatctggctgagcctggcggtggtggtggtgctcaatctggtgctgctgcgcggcaaagacagcatcgtggcggcgatgggcatgctggtgttcccgctgttggtgttcctgatgggcatttcgctgtacctgatgccgagctggaataccgccaatttcgtgcacggcctggccgccacccgcttcgacacgccggggctgtggcattcgctgtggctggcggtgccggtgatggtgttttccttcagccatgcgccgatcatctcttccttcgcctcgacccagaagagcctgtatggcgataaggcggaacgccgctgcgcgcgcatcatgcgctacagctatgtgctgatctgcgtcaccgtgctgttcttcgtgttcagctgcgtgctgagtttgtcccatgaagacatgcagcaggcgaaagatcagaacatcacggtgctgaccaccctggccaacaagttttccaacccgctgatcgcctatctcggcccggtgatggcgatgctggcaatggcgaaatcctatctcggcacctcgctgggggtcacggagggggcgaccagcctgatcgacggcgtcacgcgcgcggtcggcaaaccgctcagctcgcgcatgacgcaccgcatctcggcggtttcgctgttcctgctcacctgggcggcgacggtgtggaaccccagcgcgctgcacatcatcgaaaccatcagcggcccgctgattgcggctatcctgtttatcctgccgatgtacgcggtgcgcgcggtgccggcgatgcgcaaataccgcgcggcgagcaacgtcttcgtgctggtgatgggcctgatcgcgctgtcggcgctgatttacggcctggtgtga

SEQ ID NO: 422992 - DNA, 1134 bp, Serratia marcescens
gtgcaccgtcgaatcacgttgccggcgctgatttgcgccgccttactcgcctctccggcgatggccaccacctatccgctgaccctgaccgacacctcaggccagacgcttaccctccagcaagaaccgaaacgtatcgtggtgcaagacgggcgcgacattctcacgctggcgctgctcgatcgcgccaacccgttcggccggctggtggcctggaataacctgctgaagaaaagcgacgcggcgacttgggatatcttgcagagcaaatggccggcggcgaaaaacatcatcgatatgggattcagcgacaaaggtgaagtgaatctggagagcgtgatcgccaagcggcccgatctgatgatcgcccagctgcgttccaaaccttcgctgagccaaaccggcgtgctggataagctcaaggcgctgaacgtgccggtgctgtttatcgacaccatgctcaagccggtggaaaacacgccgaaaagcgtgacgctgctgggggaaaccctcaaccgggaaagtgaagccaagcaatataccgattattatcagcagcattatcaggccattctggccaagacgcaggcggtggaacccaagccgctggtgttctttgaagccaaggccggcctgaacgggctggagtcctgctgcttcacccatgcgcacgtcggctggggcgcgttggtggaagcggtcggcgcgcgcaacatcggctctgcgctgttgccgggcgcgaccggcgacgtggcgctggaaaaggtgatcgccatgaaaccggatgcctacatcgtttccggctcgcagtgggccagcaagaccaacgccgcggtgccgttcggctatggcgtcacgcaacagcaggtggatgaggctttcaatcgcatgaaacagcgcccgggcttcgcgcaggtgtcggcggtgaaagaagggcggttctacggcatctaccataacttctacaaccatccgtacaacattgtcgggttggagtatctggcgaagtttatctatccggcgcagttcccggatctggatccggccaagacctacagcgagatcctcagccgctttaccgaagtgccggaaggcaaaggcattttgggcgcgcaggcgccgacggggaaataa

SEQ ID NO: 422993 - DNA, 690 bp, Serratia marcescens
atgacgggtattttgcagttattccaggccattggactgggtttggtgctgctgttgccgctggccaacccgctgaccacggtggcgttgctgctcgggttgtccggcaatatgacgcgcgaagagcgtaatcagcagtcgctgatggcctcggtttatgtgttctgcatcatgacagtggcgttttacgccggccaggtggtgatgaacaccttcggcatttcgatccccggcctgcgcatcgccggcggcctgatcgtcgccttcatcggtttccgcatgttgttcccgcaacaaagcgccgatgaggcgccggaggtggagagcaagtcgcacgagctgcgccataagacctcggccaacatcgccttcgtgccgctcgccatgccgagcaccgccgggccgggcaccatcgcgatgatcatcagctcagcgtcgagcgtcaaagataacacgctgggttttgaaccctgggtgctggcggtggcgccggtcgctatcttcctgacggtcgcggtgatcctgtggggctgcctgctcagttccggcgccatcatgcgcttggtggggaaaagcggcatcgaggcgatctcgcgcctgatgggcttcctgctggtgtgcatgggcgtgcagttcatcatcaacggcgtgctggagatcatctccacctatacgccggccgccgcttaa

SEQ ID NO: 422994 - DNA, 1050 bp, Serratia marcescens
atggaagtggcaaaagaatgggtagcggcgaaaaaaatctcctggggcagcgtcatcggtggtgtgatcaccgtattggctgtttcactgttgctgtcgacgttgggcaccagtttgggattttccatcgtggatccgacatcagacgatccgatcaacggagccggtaccaccgtagtgatttggtccgctgtttcaatcatcattagcttggctgccggcgcttttattgccggacgtttggctgctaatgacggccttattcatggcttcctggtatgggctacgtcactgattgtggcggcggtgttgggtggaatgctggtcgggtctgcagtgaaggccaccggtaatgcgctgggtgctatcgcttcgacctctggcagtttgctttccggcgccggttccgcgattggcaaaggggcaaccgggttggcagacgtgggcggtaaggtgtttgacaagttgggtatcgacaccacgttggaacctgaacagctgcatggtgatgtggttacggcgctcaaaaaaagtggtattccgtcattgcagcctgaattcatgcagcaacagttgaatgcggccaagactgatttggcagacgcagtaaaagccctggcacttcagcctgacaatagcgatgcgattattaagcaactggtcgacaagcttaaaaaacatggtgaggccatctcgcaagatgtggatcaagacacactgaaaaaagctctggttgaaaataccaatatgacgccgcaggaagtggaccagacggtgaagaatttggtcgacgccaaaaataaaactgcgcagctggttaatcagcgcttggatgaagccgaagcaaaaatcaatcaggcaaaacaggagtatgctgagctgaaacagaaggcgcgcgaacaggctgccgcggctgcggacgaattgtctcgggctgccctgtggtcattctttgcgttgttgattggcgcagtggtcagtgcattggcaggcttgtggggcgttaacaccaatgcccgacgtgtaaccgtatcatctccgcaggcgtaa

SEQ ID NO: 422995 - DNA, 624 bp, Serratia marcescens
atgaaacaagaactgcatattttgctggggaaagccgttgcctttctgctctactgcgcttttttggcggccttggtcggcctggtatttatcgacgtacactggctgcataatttcgtgcatgaaacctcgctgaccgaagcggcgcaggagctgttgctgctcgccatctccggcggtttcttcgccgcggctcggcggcagtctgaacgccgctccgcctggatgctggtcggcggtttctttctctgcatgctgatccgcgagatggatttcgccttcgatgcgctgtggcacggcgcctgggtgtggttcgcgctggcggtagccttggcctgcctggtgcatgcagcgcggcacatcgcggcggcggtgcgcggcctggcctatttcgtgacgcatcccgcctacggcatgatgtgcgccggcctgctgtgcattctggtgttttcacgcctgttcggcatgagcgcgctgtggcaaacgctgatgctggacggctacaaccgggtggtgaaaaacatggtggaagagggctgcgaactgctgggctacggcctgtgcctgctggccaccctcagctacatgaaaaccgtttttgcgccggctgacgcgaaagcgtga

SEQ ID NO: 422996 - DNA, 1929 bp, Serratia marcescens
atgcctgttattacccttcctgacggtagtcagcgtcatttcgatcaccccgtttccccgatggatgtcgcgcgcgatatcggccctggcctggcgaaagcctgtatcgccggccgcgtcaacggcgagctggtcgacgccggcgatctgatcgaatcggatgcgcagctggccatcatcaccatcaaagatgaggacggcctggaaatcatgcgccactcctgtgctcacctgctgggtcatgcgatcaagcagctgtggccggataccaaaatggcgatcggtccggtgatcgacaacggtttctattatgacgtggatatcgaccgcaccctgacgcaggaagacctggatctgctggaaaagcggatgcacgagttggccgataaggattacgacgtcatcaagaagaaggtcagctggcaagaagcccgcgacaccttcgctgagcgcggcgaaatctacaaagtggcgatcctggatgagaacatcagccatgacgatcgtcctggcctgtaccaccacgaagaatacgtcgacatgtgccgtggcccgcacgtgccgaacatgcgtttctgccaccatttcaagctgcagaaaacctccggcgcttactggcgcggcgacagcaaaaacaaaatgctgcagcgtatctacggcaccgcctgggcagacaagaagcaattgaacgcctacctgcaacgcctggaagaagcggccaagcgcgatcaccgcaagatcggcaaacagctcgacctgtatcacatgcaggaagaagcgccgggcatggtgttctggcacaacgacggttggaccatcttccgcgagctggaagccttcgtgcgcatgaagctcaaagagtaccagtaccaggaagtgaaaggtccgttcatgatggaccgcgtgctgtgggaaaaaaccggccactgggaaaactacaaagacgccatgttcaccaccgcgtcggaaaaccgcgaatattgcatcaagccgatgaactgcccgggccacgtacagatcttcaaccagggcctgaagtcgtaccgcgatttgccgctgcgcatgggcgagttcggtagctgccaccgcaatgagccatcgggttccctgcacggcctgatgcgcgtgcgcggcttcacgcaggatgacgcccacatcttctgtaccgaagagcaggtgcgcgccgaagtgaacgaatgcattcgtatggtctatgacgtgtacggcactttcggcttcgacaagatcgccgtcaagctgtctacgcgtccggaaaagcgcatcggcaccgacgacatgtggacccgtgcggaagaagacctggccgccgcgctgaccgagaacggcattccgtttgaatatcagccgggtgagggggccttctacggaccgaaaattgaatttaccctgcatgattgtttggatcgcgcatggcaatgtggtaccgtgcagctcgatttcttcttgccgggccgtttgggcgcctcgtacgttggcgaaaacaacgatcgcgtcgtgccggtaatgattcaccgcgccattttgggctccatggaacgcttcatcggtatcctgaccgaagaatacgccgggttctacccgacctggatcgccccggtgcaggtggtggtgatgaatatcaccgacagccagtctgattacgtccagcaattgaccaaaaaactgcaggatgcaggtattcgcgtgaaagcggacttgagaaatgagaagattggctttaaaattcgcgaacatactttacgtcgagtcccttacatgttggtgtgcggcgacaaagaggtcgaagcaggcaaagttgccgttcgtacccgccgtggcaaagacctgggaagcctggacgtaaacgaagtcgtagacaagctgctgaaagagattcgcagccgtagtcttcatcaactggaggaataa

SEQ ID NO: 422997 - DNA, 351 bp, Serratia marcescens
atggattacggcaaattcctctacgagaagagcaagtcgacgaaagaacagaagaagaagcaaaaagttatccaggttaaggaaatcaaattccgtcctggcaccgatgatggcgactatcaggtcaaactacgcaacctgattcgctttctggaagatggcgataaagccaaaatcaccctgcgtttccgtgggcgtgagatggcgcaccagcagatcggtatggaagtgcttaaccgcgtccgtaaagacctgtgtgaagatatggatctggcagtggtcgaatccttccctacgaagatcgaaggccgccagatgattatggtgctcgctcctaagaagaaacagtaa

SEQ ID NO: 422998 - DNA, 198 bp, Serratia marcescens
atgccaaagattaaaactgtacgtggtgcagccaagcgcttcaaaaaaaccggcagcggtggttttaagcgtaaacatgccaacctgcgtcatattctgaccaaaaaagcaaccaagcgtaaacgtcacctgcgtccgaaaggcatggtgtctaaaaacgatctggtcctggttaccgcgtgcctgccgtacgcataa

SEQ ID NO: 422999 - DNA, 357 bp, Serratia marcescens
atggctcgcgtaaaacgtggtgtaattgcacgcgcacgtcacaagaaaattatgaagcaggcgaaaggttactacggtgcccgttcgcgcgtatatcgtgttgccttccaggcagtaatcaaagcaggccagtatgcttaccgtgaccgtcgtcaacgtaagcgtcagttccgtcagctgtggattgcacgtatcaacgcagctgctcgtcagaacggtctgtcttacagcaagttcatcaacggcttgaaaaaagcgtcgatcgaaattgaccgtaagatcctggctgacatcgcagtcttcgacaaagtggccttcggcgcactggttgagaaagcgaaagcagctctggcgtaa

SEQ ID NO: 423000 - DNA, 984 bp, Serratia marcescens
atgccacatctcgcagagctggttgccaatgccaaggcagccgtagaagatgcccaggatgttgccgcgttagatttggtacgcgtcgaatattttggcaagaaaggtcatttcaccttgcagatgcagtctctgcgcgacgtcccggcggaagatcgtccggcggccggcgcggtgatcaaccaggccaagcaagaggtgcaagacgccctgaacacgcgtaagaacgcgctggaaagcgctgcgctgaacgcgcgcctggcggctgaaaccatcgacgtctccctgccgggccgtcgcatggaaaacggcggtctgcatccggtgacccgcaccatcgaccgtatcgaaaccttcttcggcgagctgggcttctccgttgccaccggcccggagattgaagacgattaccacaacttcgacgcgctgaacattccagggcatcacccggcgcgcgccgaccacgatactttctggttcgacgccacgcgcctgctgcgcacccagacttccggcgtgcagatccgcaccatgaagaaccagcagccgccgatccgcatcattgcgccgggccgcgtttatcgtaacgactacgatcagacgcacaccccgatgttccatcagatggaagggctgatcgtcgataaagacatcagtttcaccaatctgaagggcacgctgcacgatttcctgaacaacttctttgaagaagacctgcaggttcgtttccgtccgtcctacttcccgttcaccgagccgtccgctgaagtggacgtgatgggcaagaacggcaaatggctggaagtgctgggctgcggcatggtgcatccgaacgtgctgcgcaacgtgggcatcgatccggaagtttactccggcttcgccttcggtatgggcatggagcgcctgacaatgctgcgttacggcgtcaccgatctgcgcgcattcttcgaaaacgatctgcgtttcctcaaacagtttaagtaa

SEQ ID NO: 423001 - DNA, 2388 bp, Serratia marcescens
atgaaattcagtgaactctggttgcgcgagtgggtaaacccggccatcagcagcgaagcattatccgatcaaatcaccatggccggcctggaagtggacggcgtggatccggttgccggcgcgtttaacggcgtcgtcgtgggcgaggtggtcgagtgcggccagcacccgaacgccgacaaactgcgcgtcaccaaggttaacgtaggcggcgaacgcctgctcgacatcgtctgcggtgcgccaaactgccgtaccggcctgaaagtggcggtcgccaccgtgggcgcggtgctgccgggcgacttcaaaatcaaggccgccaagctgcgcggtgaaccttcggaaggtatgctgtgctcgttctccgagctgggcatttccgacgatcatgacggcatcatcgagctgccgctggatgcgccgatcggcaccgacatccgtgactacctgaaactgaacgacaacaccatcgagatcagcgtcacgccgaaccgcgccgactgcctgggcatcatcggcgtcgcgcgcgacgtgggcgtactgaaccaggttgcgctgaccgagccggacatgagcccggtggccgcctccatcgacgccacgctgccgatccgcgttgacgcgccgcaggcgtgcccacgctatctggggcgcgtggtgaaaggtatcgatgtcaaggcgccaagcccgctctggatgcgtgaaaaactgcgtcgttgcggcatccgttctatcgatgccgtggtagacgtcaccaactatgtgctgctggagcttggccagccgatgcacgctttcgatctgggccgcatcgacggcggcatcgtggtgcgcatggcggaagaaggggaaaccctgacgctgctggacggcaacgaagccaaactgagcgccgacaccttagtgatcgccgatcatcaaaaagcgttggcgatgggcggcatcttcggcggcgagcattccggcgtcaacggggaaactcaggacgtgctgctggagtgcgccttcttcagcccgctgtcgatcaccggccgcgcacgccgtcacggcctgcacaccgatgcgtctcaccgctatgaacgcggcgtcgatccggcgctgcagtacaaatcgatggagcgcgccacgcgcctgctgctcgacatctgcggcggccaggccggcccggttatcgacgtaacccacgaaaacgaactgccgaagtgcgccaccatcacgctgcgccgcgagaagctggatcgtctgatcggccacgtggtgccgagcgagcaggtcagcgacattctgcgccgcctgggctgccaggtgaccgagcagggcgacagctggcaagcggtcgcgccgagctggcgtttcgatatggaaatcgaagaggatctggtggaagaagtggcgcgcgtttacggctacgacaacatcccggatgtgccggtgcgcgccgatctggtgatgacccagcatcgcgaagccgatctgacgctcaagcgcgtgaagaccatgctggtcgatcacggctaccaggaagcgatcacctacagcttcgtcgatccgaaagtgcaggcgctgctgcacccgaatgaagaagcgctgatcctgccgagcccgatttcggtcgaaatgtcggcgatgcgcctgtcgctgtggaccggtttgctgtccgcggtggtgtataaccagaaccgtcagcagacgcgtctgcgcctgttcgaaagcggcctgcgctttgtgcctgatagtgcggcagatctgggtattcgtcaggacgtcatgctggcaggcgtgatcgccggccatacgcacgatgagcattgggatctggcgcgcaagcccgtcgacttctatgatttaaaaggggatctggagtctgtcctcgaactgaccggtaaattatccgaaattcagttccgggcggaagccaatccggccctgcatccagggcagagtgcggcgatttatttgcacggcgaacgcgtaggtttcatcggtgtgattcacccggaacttgaacgtaaactggatcttaacggccgcaccgtggtgtttgaactggagtggaacaagcttgcgagccgcgccgtgcctcaggcgcgggagatttcgcgcttcccggcaaaccgccgtgatatcgccgttgtggtggctgaaaacgtccccgcagaagatattttggccgagtgtaagaaagttggcgcaaatcaggtagttggcgtaaacttgtttgacgtgtaccgtggcaagggcgtggcagaaggtgacaagagcctggctatcagtctggtattgcaggataccgctcgtacactggaagaagaggagatagccgctaccgttgcaaaatgcgtagaggctctaaaacagcgattccaagcatccttgagggattga

SEQ ID NO: 423002 - DNA, 297 bp, Serratia marcescens
atggcgcttactaaagctgaaatgtcagaacacctgtttgagaagcttgggcttagcaaacgggacgccaaagacctggtggaactgttctttgaagaggtccgtcgggcccttgagaatggcgaacaggtaaaactgtcgggttttggcaactttgatctgcgtgacaagaaccaacgtccggggcgtaacccgaagaccggcgaagacattccgattacggcgcgccgcgtggtgaccttccgtccggggcagaagctgaaaagccgggtagaaaacgccagcccgaaagggtga

SEQ ID NO: 423003 - DNA, 132 bp, Serratia marcescens
atgattaaacgtataggcagcctgctggccgttgtggccctgacagcaagcctcagcgcctgctgctggggcccgcactggggcggcggccaccgtggcgatggccctggccattatcacggccgttattga

SEQ ID NO: 423004 - DNA, 417 bp, Serratia marcescens
atgaaaaagatcctgttgctggtgtgtttcccgctgttgctgccgctggcggcgcaggccgatgtctctgtcgatatcaatgtgccgggcgtttctctgcatctgggggatcaggaccgtcgcggctactactgggatggttacgactggcgtccaccgcagtggtggcatgcgcatcagggccgcggtctgggtgagcgcaatgcgcgcggcatgtactgggacggcggccgctggcagccatcgccgccgcgtggctacgatcaccgtgagccggcacgcagcggcaatccgttccgcggcgatcgcgataatcgcgaccacgagcgcaatcatgacgatcgcggtgcctccgaccgccgcgatgacggccgcggccagccttatccaccgggcaacgccggcccgcatcgttaa

SEQ ID NO: 423005 - DNA, 1008 bp, Serratia marcescens
atgccaaccagccgtaccttcaccttattgttgcaacatcaacgctaccgcgataaacgccagatcggtctgctggcgctgggcgtggcggtggcgttgctgttcagcctttgcgccggcgaccaatggatatggccgtcagagtggttcagcgatcgggcgcaactgttcgtctggcaactgcgtttgccgcgcgcgctggcggtgatgctggtcggcgccgccctggcggtggcgggcgcggtaatgcaggcgctgtttgaaaacccgctggcggagcccggtctgctgggcgtcgctaacggcgccggcgttgcgctggtgctgacggtgttgttggggcaggggttgttgccggtggcgctgatgagcgccgccgcgatagccggtgcgctggcgatgaccttcttgttgctgggcttcgctcgccgccgacgtctgaccaatgcgcggctgttgctggtcggcgtggcgctgggcatcgtgtgcagcgcgctgatgacctgggcggtctatttcagcaccagcctcgatctgcggcagctgatgtactggatgatgggcggtttcggcggggtcgactggcgccaaaagtggctggtgctggcgctgctgccggtgctgctgtggctgtgtggccagggcaaagcgctcaacctgatggcgctgggcgaggtacaggcgcggcaacttgggctgtcgctgcatctgtggcgtaacctgctggtgctggcgatcggctggctggtcggcgtcagcgtggcgctcgccggggtgattggcttcgttgggttggtgatcccgcatattttgcggcttatcggcctgaccgaccaacgctatctgttgccggcctgcgcgctggccggggccggggtgttgctggtggccgatgtggttgcccgcattgcgctgctggcggccgagctgccgatcggcgtggtgaccgccacgctgggggcgccgctatttatctggttactgacccgggcaaaaggcgtaaggtag

SEQ ID NO: 423006 - DNA, 552 bp, Serratia marcescens
atgagcaagccaatcgacaacctgccgttacaaaccattgaaaatcagccgaccacgctgggcgcctaccagggtaaggtgctgctggtggtcaacgtagcctcggaatgcgggctgaccaaacagtacgaagggctggaagcgctgtacgaagcctaccgcgatcaagggctggaagtcctcgggttcccgtccaatgaattcctgggccaggagccgggcagcaacgaagagatcctggcgttttgccgtggcaccttcggcgtgcaattcccgatgttcgccaagattgaggtgaacggcgaacgccgtcatccgctgtaccaggcgctgattgcctcacagccggaggctgtcgcaccgcagggcagcgagtttctgacgcggatgaccagcaaagggcgtgcgccgaagcacaccggcgatattctgtggaacttcgagaaattcctgatcgcgcgcgacggcacggtgatccagcgcttctcgcctgacactacgccggaagatccggcgctggtggcggcggtgaaacaagcgctggcaggataa

SEQ ID NO: 423007 - DNA, 756 bp, Serratia marcescens
atgctgcaactcgttgaggttggggtggcggggcgcctggcgcctttttcggcacagattgacggcgggttgcaggttcacctgatcggccccaatggcgcagggaagagcaccctgttggcgcgggtggcgggcatgctgccggggctgggcgaagtctgcctggacggacgcgcgttggccgattatccggggagcgagctggcgcgccgacgcggttatctcagccagcaacagccgccggtgtcgttgatgccggtgtttcagtatttggcgttgcaccggcctgccggcgcggcgcaaaccgaggtggagcacgccattctctatctatgccagcggttgaagctggtggataagctgtcacgcacgttgacgcagctttccggtggcgaatggcagcgggtgcggctggcggcggtgttgctgcaggtgtggcccagcgtcaatccgcacagccggttgttgttgctggatgaaccgaccaatagcctggatgtggcgcaaaaggtcgcgctggatcgcctgctgcgcgaattctgccaaagtgggcgcagcgcgctggtgtgcgcgcacgatctgaatcataccctgcagcaggccgatcgggtttggttgctgcacgctgggcagctggtcgcgcagggcatcacccgtgaggtgatggcgcccgacctgttgtcgcagatctatgaagtggattttcacctgcaatgggtggggaaccagcgttggatcatgacgcgcacggcttaa

SEQ ID NO: 423008 - DNA, 1155 bp, Serratia marcescens
atggatcaatttttgcctttctctcgtccggccatcggcgatgaagaaatcgccgcggtagagaaagtattgcgttccggttggatcaccaccgggccgcaaaaccagcaactggaaagcgacttctgctccactttcggctgtaagcacgccatcgccgtcagttccgccacggcgggcatgcacatcacgctgatggcgctgggcatcggcgctggcgacgaagtcatcaccccttcgcaaacctgggtctccaccctcaacatgatcgagctgctgggcgccacgccggtgatgatcgacgttgaccgtgatacgttgatggtcagcgccgccgatgtcgaggctgccatcaccccgaataccaaagcgattgttccggtgcattatgccggtgctcccctgcaaatggatgcgctgcgcgccgtagccgcacgccatcgcttgccgctgatcgaagacgccgcccacgcggtcggcacgcgctacaacggcgaatgggtcggcgcacgcggcacggcgattttctctttccacgcgattaaaaacgtgacctgcgccgaaggcggcctgatcgccaccgacgacgatgcgctggcggatcgcctgcgttgcctgaagttccacggtctggccgtcgatgccttcgatcgccagcagcttggccgcaaaccgcaggccgaagtggtggagcctggttacaaatacaacctgtccgacattcatgcggcgatcgccgtggtgcaactgtcgcgctttgctgagctgaacgcgcgccgtaaggcgctggcacagcgctacctgagcgcgctggaaggctcgccgttccaaccgttgggcgtgccggattatccgcatgaccacgcctggcacctgtttatggtccgcgtcgatcccgcgcgttgcggcatcgatcgcgaccaactgatggagcgcctgaaagaggttggcgtcggcaccgggctgcatttccgcgccgcgcatactcagaaattctaccgtgagcgttatccgcagctttctttgccgaataccgaatggaactcggcgcggctgtgcaccttaccgctattccctgatatgaccgacgccgacgtggatcgcgtggtcaatgccttgtcttctgttgtggagtctttacgtgcctcgcgttga

SEQ ID NO: 423009 - DNA, 981 bp, Serratia marcescens
gtgcctcgcgttgaaccgattaaaaaagtatcggtagtcatcccggtatacaacgagcaggaaagcctgccggcgttgctggagcggactactgccgcctgtaagcagttatctcaaccttatgaaatcatcctcgtcgacgatggcagcagcgacaactccgctgacatgctgactgcggcggcggaaaagccggatagccacgtgatcgccgtcttgctgaaccgcaactatggccagcactcggccattatggccggtttcaatcaggtgaccggcgatctggtgattacgctggacgccgatctgcagaacccgccggaggagatcccacggctggtcagcgtggcggaagagggctatgacgtggtgggcaccgtgcgcgccaaccgtcaggactcctggttccgcaaaagcgcctcgcgcgtgatcaacatgatgattcaacgcgccaccggcaagtcgatgggggactacggctgcatgctgcgcgcctaccgtcgtcatatcgttgaggcgatgctgcactgccatgagcgcagcacctttatcccgatcctggcgaataccttcgcccgccgcacgaccgagatcgacgtgcgtcacgccgaacgcgagtttggtgactccaagtacagcctgatgaagctgatcaacctgatgtatgacttgatcacctgcctgaccaccacgccgctgcgtttgctcagtgtggtcggcagcatcgtggcgctgtccgggtttgtgctggcgctggtgctgatagcgctgcgtctgctgctcggccctgaatgggccgccggcggcgtgttcacccttttcgccgtcctgttcacctttatcggcgcccagtttgtcggcatggggctactgggtgaatacatcggccgcatctataccgacgtgcgcgcgcgtcctcgctattttgttcagaaagtggtcggtgcacagcagggccacaatactcaggaagaagaatga

SEQ ID NO: 423010 - DNA, 1986 bp, Serratia marcescens
atgatgaaagctattgtatttgcttaccatgatattggctgcgccggtctgaaagcgctgactgaggcgggttatgacgtgcaggccgtgttcacgcacaccgacgaccctggcgagaacaacttcttctcctccgtggcccgtttgggcgccgaattggatctgccggtctatgcgccagaggacgtaaaccacccgctgtgggttgaccgcattcgcgcactgcagccggacgtgatcttctcgttctattaccgccacatgctgagcgacgagatcctgtcgctggcaccgcagggcggtttcaatctgcacggttcgctgctgccacgttaccgtggccgtgcgccggtgaactgggcgctggtgaacggcgaaaccgaaaccggcgccacgctgcacaagatggtgaaacgcccggacgccggggacatcgtcgggcagcaaaaagtggccatcgccgacggcgataccgcgctgacgctgcacaaaaaagtgctggaagccgcgcagatcgtgttgaaagagcaactgccgaagctgaagaacggcaccgccaccttcaccaggcaggatgagtcccaggccagctacttcggccgccgcagcgcggcggacggcgagatcctgtggcacaaatccgccaaagagatcaacaacctggtgcgcgccgtcaccgagccgtacccgggggcgttcagctacctcggccagcgccagctgatcgtctggcgctctcgcgtgctggatacccaacacgataagcagccgggcaccgtgctgagcacctcgccgctggtcatcgcctgtggcgaaggcgcgctggagatcgtcgccggtcaaaacgacagcggtctgtacgtgcagggcagccgcctggcgcaggaaatgggcatcgtcaccgacgtgcgtctggccgccaagccgaacgccgcgatgaaacgccgcacccgcgtactgatcctcggggtcaacggcttcatcggcaaccacctgaccgagcgcctgctgcgcgacgatcgctacgacatctacggtctggatatcggctctgacgccatcagccgcttcctcgacaacccgcgcttccacttcgtggaaggcgacatcagcatccactccgagtggatcgagtatcacatcaagaaatgcgacgtggtgctgccgctggtggcgatcgcgacgccgatcgaatacacccgtaacccgctgcgcgtgttcgagctggacttcgaagagaacctgaagatcgttcgcgactgcgtgaaatacaacaagcgcatcatcttcccgtccacctctgaagtgtacggcatgtgcgacgacaaagagttcgacgaagaccattcgcgcctgatcgtcgggccaatcaacaaacagcgctggatctactcggtctccaaacagctgctggatcgggtgatctgggcttacggcgccaaagaaggcctgaagttcacgctgttccgtccgttcaactggatggggccgcgcctggataacctggacgcggcgcgcatcggttcttcccgcgccatcacccagctgatcctcaacctggtggaaggttcgccgatcaaactgatggacggcggcgcgcagaaacgttgcttcaccgacatcaacgacggcatcgaagcgctgttccgcattatcgagaaccgcgacggcctgtgcgacggccagatcgtcaacatcggcaacccgaccaacgaagcgagcatccgcgaactggcggaaatgctgctggaaagcttcaacaaccatccgctgcgcgaccgcttcccgccgtttgccggcttcaaggacgtggagagcagcagctactacggtaaagggtatcaggacgtcgagcaccgcacgccgagcatcaaaaatgctcaccgcctgctgggctggcagccgaccatcgagatgaagcaaaccatcgccgatacgctggactacttcctgcgcactaccgttcaggaagggaacggtgcatga

SEQ ID NO: 423011 - DNA, 906 bp, Serratia marcescens
atgaagaaagtcggtctgcgggttgatgtagataccttcagcggcacccgtgaaggggtgccgcagttgctggatctgttcgaaaagtacgacattcaggccagcttcttcttcagcgtgggaccggacaacatggggcgccatctttggcgccttttgcgtccgaaatttttgtggaaaatgctgcgttcgaacgccgcctcgctgtacggtctggacattctgctggccggcaccgcctggccggggcgcaacatttcacgcgcgctggggccgctgatgaagcgcaccgccgaagccggccatgaggtcgggctgcacgcctgggatcaccaggggtggcaggccagggtcggcaagtggagcgaagcgcagctgaccgaacaggtgcagctgggcgtcgacgccctgagcgccagcaccggccagccggtgaaatgctccgccgtggcgggctggcgcgccgatacgcgcgtgctggaggtcaaacaacgcttcggcttccattacaacagcgattgccgcggcacccatccgttccgtccggtgctgagcgacgggcgccacggtacggtgcagatcccggtgacgctgccgaccttcgatgaagtgattggcagcgaagtcagcatggccgacttcaacgactatattctgcgcgctatcgagaacgatcgcggcgtgccggtgtacaccattcacaccgaagtggaaggcatgtcgcaggcggcgatgttcgaacagttattgcaacgcgcacagcggcagggcatcgaattctgtccgctgagcgcgctgttaccgcaagatttggcgtcactgccgttgggccgcatcaagcgcgctcctttccccggccgcgaaggttggctgggctgtcaaaccgatgtgaaggacgttacatga

SEQ ID NO: 423012 - DNA, 1665 bp, Serratia marcescens
atgaaggcgctaaaaggatcctgggccattgtgctggccgttttttttgctctggtttacctgatcccgcttaacggccgcctgctgtggcagccggatgagacgcgttatgccgagatcagccgtgaaatgctgcagcgcggcgattgggtcgtgccgcacctgctggggctgcgctatttcgaaaagccggtggcgggttactggttcaataacatcagccagtggctgtttggcgaaaacaactttgcggtgcgtttcggctcggtgttcagcaccggcatgaccgcgctgctggtgttcgcgctggcgatgctgatgtggcgcaatgcgcgccgcgccagcctggcggcgctgatgttcctgtcgatggtactggtgttcagcatcggcacctacagcgtgctggatccgatgatctcgctgtggctggcggcggcgatggtcagttattacctgacgctgaaagccacctcggtcaaaggcaagctgggcgcttacgcgttgctgggcctggcctgcggcatgggctttatgaccaagggcttcctggcgctggcggtgccggtgatcgcggtgatcccgatcgtcattcagcaacgccgcatcaaggatctgctgtgctatggcccggtggcgatcgtgaccgctacgctgctcagcctgccgtgggcgctggcgatcgcgcaacgtgaacccgatttctggaattacttcttctgggtcgagcatattcagcgtttcgccgaagataacgcccagcacaaggcgccgttctggtattacctgccggtcctgctggcggcggtgctgccgtggctggcgctgctgcccggtgcgctgctcaagggttggcgcgagcgcgtacagcgtccggagctgttctttctgctgagctgggcgctgatgccgctgatcttcttcagcatcgccaaaggcaagctgccgacctacattctgccgtgcatggccccgctggcgctgctgatgaccgcctatgcggaagactacgccgccacgctgcgcgccaggctgttcaaggctaacgcctggctgaacggcctgttcggcctgatcggcatcgtggcgctggtggtgttgagctccggtctgctgccgaaggcacatctgtttactccgcaggagtggccgaaactggtgctcggcctgatcgccttcggcggctggctgctgttcgcgctggtttccgtacgcgacaacggccgccaatggcgctgggcggcggcttgcccggtgctgctgtgcctggtgatcggttacgccatcccgcaacaggtgaccgattccaaactgccgcaaaactttgcccgcgccacgatggccgaactgagcgacagccgctatgtgttgagcgacagcgtcgggctggcggccggcctggcctgggagctgaagcgcagcgacgtgctgatgtacagccagaaaggcgaggtgggctatggtctggagtacccggacgccaaggggcacttgatcagcgatgccgacttcccgcagtggctggcgcaggcgcgcaagcaggggaacgtgtcgctggtgctgcagctgtcccgtggcgaagcgctgccgcaggaactgcccgccgcagacaaggtggatcgcatgaaccgcctggtgctgatgtggtataaacagcaaccatga

SEQ ID NO: 423013 - DNA, 345 bp, Serratia marcescens
atgatgggttttctgttggtgattgtggtcagcctgctcacctgtggtgggcagctgtgccagaaacaggcggcgcactgttgggaacggggggacgaggcgcggctgaagctgacgctgcgctggttggcgctggcggtgctgctgctggggctgggcatggcggtgtggctcaatgtgctgcaacgcctgccgctcagcctggcttacccgatgctcagcctgaacttcgtgatggtgacgctggcggcgcgctggctgtttcatgagccgacgaccgcccgccactggtgcggcgtagcgtcgattatgttggggatcctgctgatgagcgtgcattcatga

SEQ ID NO: 423014 - DNA, 393 bp, Serratia marcescens
atgaggggctatgcctggggcgccgccagcgtgttgctggtgacgttggcgcagttgctgatgaagtggggcatggtgcaaatcccgctgatgtcgttcgccgacgtctcgctggcgctgatcggcggctactggctgccgctgttggcggtgggcggcggcatctgcggttatgcgctgtcgatgctgtgttggttctttgcgctgcgccacctgccgttaaaccgcgcttatcctctgttgagcgtcagttatgcgctggtctatctggcggcggtgatcctgccgtggttcaacgagtccgctacgctgctgaaaacgctgggcacgctgtttattctgttcggcgtctggctgattaacagcaagtccgagactaaatcgccggaatag

SEQ ID NO: 423015 - DNA, 459 bp, Serratia marcescens
atgcgtgtgtggtttttattagccagtttgatcctcgccgggtgcagcagccatgcgccgccgcccagcggccgcctggcggactctatcgtggtggtggcccagctcaatgagcagttgcgccagtggtacggcacgccataccgttacggcggcctggatcggggcggcgtagattgttccggctttgtttaccgcacgttccgcgatcgttttgacatgcaactgccgcgttcgaccgaagaacagacctcgctgggcaccaaggtctcacgcgatgagctgatgccgggcgatctggtgtttttcaaaaccggcggcggtgagaacggcctgcacgtcggcatttacgataccaacgaccaatttatccacgcgtcgaccagccgcggggtgatccgctcctcgctcgataacgtctactggaagcgggtgtactggcaggcgcgacgcatttag

SEQ ID NO: 423016 - DNA, 1014 bp, Serratia marcescens
atgaacagcctgcgtttactgatctccgactcctacgatccctggttcaacctggcggtggaagagtgcatcttccgcgaaatgaccacgcaaaaaattctcttcctgtggcgcaatgccgaaacggtggtgattggccagtcgcagaacccctggaaagagtgcaacacccggcgcatggagcaggacggcattcggctggcgcggcgcagcagcggcggcggggcggtatttcacgacctgggcaacacctgtttcacctttatggccggcaagccgggctacgacaagagcgtctcgaccgacatcattctgcaagcgctgcggcagctgggcgtcgcggctggcgcgtcggggcgcaacgatctggtgatggaaaccgccgatgggccgcgtaaaatatccggctcagcctatcgagaaacccaggatcgcggtttccatcacggcacgctgctgctgaacgccgacctggaacggctggcgaactacctcaatccggatcccaaaaagctgcaggccaagggcatcacctcggtgcgttcacgcgtcgccaatttggcggagtttttgccgggtatcagccatgagcaggtatgcgacgccatcgtgcaggctttcttcgcccactatggcgaaacggccgagccggagatcatttcgccggacgtgttccccgatctgcccgattttgccgcgcagttcgccaaacaaagcagctgggaatggaatttcggcaaggcgccggcgttcagccacttgcttaacgagcgctttgtctggggcggcgtagacctgttcttcgatgtggagaagggggctatcgttcgcgcgcaggcgttcaccgacagccttaatcccgccccgctgcagcggctggcggatatgctggtgggctgcccgtatcgaagcgagcccgttgccgcctgctgtgatcgactgatggcggactatcctcagcaggcggccgaattagccgaactgcgacaatggctgagtgaaacgatccgttag

SEQ ID NO: 423017 - DNA, 657 bp, Serratia marcescens
ttggcggtggaaatgttgagccgattcaacagtctcgacggtgatttagccatgccggccgaaattgggattaatttattggcgcctgaacaaaggattgagttatttaatgagcaactgaaacttgcggagcagcatgcggcttggtttaccggtaacaacgtgcagttgaccatcaatatcgaagaaaccatcgttgagcttattctttccgattcggcgttatgccaacggatcgggcaatatccttttattgcatttgaagtgagtgagagttttccgaatctttcggccgggaagaacaacccgagcgtgcggcgattaagcgaaatgtttacgctgtggctcgatgatttcggttccggtaaagccacgctgaccgcgttgtacgatggtttgtttgactacgtaaagatagacaagcgtttttactggcagctgtttacccatcagggatatgacgtggtcatcgactcgttgttaaagaatatcaacctgttatgtaaaggcgtgatcgtcggaggaatagagaaaaaagagtattttaataaactcaggtacgccggtgttttaggtctgcaaggttttttatggcccagcgttggtgtggataatctgcaagctttgctggcgacgcccagcgagttcaataattaa

SEQ ID NO: 423018 - DNA, 1443 bp, Serratia marcescens
atgccgcagttcgataacgcttactaccaacagttacccggcttctacaccgctctgaacccgacgccgctcaaggatgcgcgcctgctgtaccacagcgagccgctggcgcgcgagctggggctggatgaaagctggtttactcaggataaaaccccgatttgggcgggagaaacgctgctgccgggcatgcagccgctggcgcaggtgtacagtggccaccagttcggcgtgtgggcagggcagttgggcgatggccgcggcattttgcttggcgaacaggttctggcggacggcagccaccgcgactggcacctgaagggcgccgggctgacgccgtattcgcgcatgggggacggccgcgcggtgctgcgttcggttatccgcgagtttctggcctctgaggcgctgcaccatttggggatccccaccacccgagcgttgaccatcgtcaccagcaggcagccggtgttccgcgagcagccggaacgcggtgccatgctgatgcgggtggcggaaagccacgtgcgcttcggccacttcgaacacttttactaccgtaaccagccggagcaggtgcggcagctggcggatttcgtcatcgcccgtcactggccgcagctgcaggatcaggccgagcgctacctgttgtggtttaccgacgtggtcgaacgcacggcgcgcctgatcgcccattggcaaaccgtcggtttcgcgcacggcgtgatgaacaccgacaacatgtcgattctcggtatcaccatcgattacggcccttacggtttccttgacgactaccagcccggctatatctgcaaccattccgatcaccaggggcgttacgccttcgacaatcagccggcggtggcgttgtggaacctgcatcgtctggcgcagaccctatcggggctgatgaccaccgaacagctgcagcaggcgctggcggcgtatgagccggcgctgatgcgcgcctacggcgaacagatgcgcgccaaactcggcttcttcacgccgacggcgcaggacaacgacgtgctcaccggtctgctgggcctgatggcgcaggaagggcgggactatacccgcacgttccgcctgttgagcgagaccgaacagcagcaggcgcagtcgccgctgcgcgacgagtttatcgatcgcgcggcgttcgacgcctggtatcagcagtatcgtcagcgtttgcaacaggagcaggtgagcgatgcggagcggcaacgggcgatgaaggcggtgaatccgcggctgatcctgcgcaactatctggcgcagcaggcgattgaggacgcggagaacgacgatgtgggccgtttgcagcgattgcatcaggccctgctgcggccgttcgacgatgtgccggagtatgacgatctcgccgcgctgccgccggactggggcaagcacctggagatttcctgctccagctga

SEQ ID NO: 423019 - DNA, 786 bp, Serratia marcescens
gtggataacgccgcctgcctgacagcccgggagctgcgttacagcctcggtacgcgccggttgatcaacgacgtttcgctcagccttgccggcggtgaaatggtggcgattatcggccctaacggcgccggcaaatcgacgctgctgcgcttgctgaccggctatttgacgccggactgcggcgaatgtcggctgcttgaccgcccgctggaacactgggcgccgcaacagttggccaaagtccgggccgtgatgcgccagtacagcgatttggcgtttccattcagcgtggaagaagtggtcagcatggggcgttcgccgcacggcaaacgcgacgagcatcaggcgatccaacaggtgatggcgcaaaccgactgcctggcgctggcgcagcgcgactaccgccagctgtccggcggcgaacaacagcgggtgcagctggcgcgggtgttggcgcagctgtggcaaccacagccgtcccccgcctggctgttcctcgacgaaccgacctcggcgctggatctgtatcaccagcagcacaccctgcgcctgctgcgctcgctgacgcgccaacagccgctgggcgtctgctgcgtgctgcacgatctcaatctggccgcgctgtacgccgatcggatcctgctgttgcatcaggggcggttggtggcgagcggcacgccgcaggaagtgttgcaaacggagatcctcacccgctggtatcaggccgatctcggcgtggtgcatcatcccgaagtgtcgctgccgcaggtctacctgcgccaataa

SEQ ID NO: 423020 - DNA, 1005 bp, Serratia marcescens
atgcgctgtcgcacctcgcctcagctggccatcatcggtctgctggtgctgctgacgctgctggcgctggtcgccgccaacctgggcgcgctgacgctgtcgtttcgcaccctatggcgtgaacctttcagcgacgccgcctggcacatctggttgaacattcgcctgccacgcgtgctgctggcggtggtgatcggctgcgcgctggcggtgtccggcgccgtgatgcaagggctgttccgcaacccgctggcggatccgagcctgctgggcatcagcagcggcggcgcgctgtttgtcgcgctgttcatcgtgataccgctggcgttgccggtgacgatcgcgctgtacggtcatatgctggcggcgttcctcggcagcctgctggtgtcattgttgatctacggcatcagccgcagcgggcacggcaatctgtcgcggctgctgctggcgggcatcgccatcaacgccctgtgcatggcggccatcggcgtgctctcttacgtcagcagcgatcaacagctgcgccagttctcgctgtggatgatgggcagcctcagccagtcgcagtggccgaccctggcggtttccgcctcgctgatcctgcctgcggcgctgctgacgctgctgcaggcgcgccggctgaacctgttgcagctgggggacgaagaggcccactacctcggggtaaacgtccagcgtgccaagctgcagctgctgttgctgagcgccctgctgatcggcgcggcggtagcgatgagcggtgtgatcggcttcgtcggcctggtggtgccgcatctggtgcgcatgcgcctcggcggcgatcaccgctggctgctgccctgctccgcgctgggcggcgcctgcctgttgctggtcagcgatacgctggcgcgcacgctggtggcgccggccgaaatgccggtggggctgatgaccagcctgatcggcggtccctatttcttgtggctggtgatgcgccagcgggagcgagccggtggataa

SEQ ID NO: 423021 - DNA, 831 bp, Serratia marcescens
atgaaatcttccttgatccgccgcctggcgttgatgatatcgctggcgctgccgctcaccgccgcggcggcgcagcgcatcgtctcgatcggcggcgacgtgacggaaatcgccttcgcgctcggcgccggcgacgaggtgatcgcccgcgacagcaccagtctgcatccggaagcggtgaaaaagctgccggacgtcggctacatgcgccagctgaacgccgaaggcattttggcgctgaagccgacgctggtgctgacgaccgagctggcacagccggcgctggtgctcaaacagctggcggacagcggcgtcaacgtggtcagcgtgccgggtgacaccaccctgcaggcggtgccgcagaaaatcgctacgatcgccgcagcgctgcagcgcgttgagcaaggcaaacagctgagcgagcgctatcaacaacagctggcggcggtggatacctccccgctgccggtcaaggtgctgttcgtaatgagccacggcggcattacgccgatggccgccgggcaacacaccgctgccgacgcggtgatcgccgccgccgggctgaaaaacgccatgcagggctttgaccgctaccggccgctgtcgcaggaaggcgtcatcgccagcgcgccggatctgttgctggtcactaccgacggcgtgcgcaccctcggcggcgaacagcagctgtggacgctgccgggcctggcgttgacgccggcaggcaagcagcgccgcgtgctgatcgtcgatgacatggcgctgctgggtttcggtctggaaacgccggcggcgctggccaagctgcgccacgcggcggagcaaaagtaa

SEQ ID NO: 423022 - DNA, 1038 bp, Serratia marcescens
atgagcaacaccctatacgaacgctaccaacaggctaaaatcgatcaccccggcaaatacgcccgcgatctggcggcgatcctcggcgtcagcgaagcggagctgacgcacgcccgcgtcggccacgacacccgccgcctgcaggccgacgcgcgcaccctgctgaccgagcttgagcaggtcggcgtcaccaagtccatcacccgcaacagctatgcggtgcatgagcagatgggccgctaccgcaaccagcacctcaacggccacgccgggctgatcctcaacccacgcgagctggatctgcgcctgttcctcaaccactggaccagcgtcttcgccatgagcgaaaccaacaagcgcggcgtgcgccacagcattcagttcttcgaccaacagggcgatgcgctgcacaaggtctacaccaccgaggaaaccgatctgccggcctggatggcgctggtggagcgccacctgagcgaagaaaacccggcgctggcgctgcagcccgccgaggcggcaaccaccgatgaaacgacgcaggatcatgccaaaatcgacggtgagtggcgcgcgatgaccgacgttcaccagttcttccagctgctgagccgcaacaagctgacgcgccaacaggccttccgcgccgtcggcgacgatctggcctaccaggtggacaacagcgcgctgtcgcagctgctcgaagcggcgcagcagcagcaaaacgagatcatgatcttcgtcggcaaccgcggctgcgtgcagatcttcaccggccagatcgaacgtttgatgccgcaggaaggctggatcaacgtgttcaaccgccgcttcacgctgcacctgattgaagacgccatcgccgaaagctggatcacccgcaaaccaaccaaggacggcatcgtcaccagcctggagctgttcgccgccgacggcacgcagattgcgcagctgtatggccagcgcaccgaaggccagccggaacaaacccagtggcgcgagcaggttgccgcgctcgccgccaaggacatcgccgcatga

SEQ ID NO: 423023 - DNA, 2082 bp, Serratia marcescens
atgcctctgacattttccacccggctgcgtttttccgctttgagtctggcgattgcctgcgctctgcctacggtggccttggcacaaaacaccagcacaacatcctcttccaacgcggcgccggccaaaaaagccaaagccgccgacgagaccatgaccgtggtcgccaccggcaaccagcgcagcagctttgaagcgccgatgatggtcacggtcatcgaaggcaactcgccggaaagccaaactgcaggcaccgccgccgatatgctgcgccgcgtgccgggcattaccgtcacgggctccgggcgcagcaatgggcaggatctcatgatgcgcggctacgaccgacgcggcgtgctgacgctggtcgacggcatccgccaggggaccgataccggccatattaacggcacatttttggatcctgcgttagtgaaacgcattgaagtcgtgcgcggcccctccgcgttgctgtacggtagcggcgcgttgggtggtgtagtgtcttatgagaccgtcgatgccgccgatctgctgctgccgggccacgatagcgggttccgcgtctacggcaccgccggcaccggcgatcacagcctgggcatgggcgccagcgcctatggcaagaccgataacctcgacggcctgctgtctttcggcactcgcgacgtcggcgatctgcgtcagggcaacggcttcgatgcgcctaacgacgaaaccatcagcaacgtgctggccaaaggcacctggaagctcgacgacaatcagtcgctgagcggcaatcttcgttactacaataacagcgcgcaggagccgaaaaacccgcaaacgccagccagctccagtggaaacttaatgaccgatcgttcgacgattcaacgcgacgcggcactgagttacaaactgaaacccgccggccaggattggctggatgcggaagcgaaagtgtattattcagacgtaaaaattaacgctcacgccaatggcagcgaagatgaagcacgcaaacaaaccacgaaaggcgccaaactcgaaaaccgaacgcgcctgtttgcggatactttcgcctcgcacctgctgacctacggcaccgaggcctacaaacaggaacaaacaccgggcggcgctaccgaaagtttcccacacgcaaaaatcaatttcgcttcaggctggctacaggatgaaatcacgctgcgcgatctgcctgtcactctgctcgccggcacccgctatgacaattacaagggctcaagcgacggctatgccgatgtggatgcggacaaatggtcctctcgcggtgctgtcagtattacgcctaccgactggctgatgctgttcggctcctattctcaggcgttccgcgcgccgacgatgggtgagatgtacaacgactccaagcacttctcaattccaatgggaccaaccaccatcaccaactattgggtgcctaacccgaatttgaaaccggaaaccaacgaaacccaagagtacgggtttggtctacgtttcgatgatttgatgctggccgatgacagtctgcagttcaaagccagctatttcgataccaaagccaaggactacatcaccaccgatgtcacgatggaactgggacgcggtccgcgaggtccttattgcatcagttgcaccacattctcgaccaatatcgatcgcgccaaaatctggggttgggacgctacgctcagctataaaacaccatggttcggctgggatttggcttataaccgcacccgtggcaaaaatgaagcaaccggtgactggttaagcagcatcaatccagacaccgtcaccagttcgctggacgtgccgctgggcgaaaccggcctgtccgccggctgggtcgccaccttcgccgaacgcgcgacgcgcgtggagaccggcacggccgaacaagccggctacggcgtcaacgacttctatctgagctataagggccgcgatcgtctgcagggcatgaccaccaccgtggtgctgggcaacgccttcgacaaggaatattactcgccgcagggcgtcccgcaggatggccgcaacgccaaactgctggtcagctaccagtggtaa

SEQ ID NO: 423024 - DNA, 189 bp, Serratia marcescens
atgataatggatactgccaacacgcctacccccgccgccgcggccccgaccgagcacagcgcaaacgcgccgcccagctacgacagcgcacagctgctcggcgccgacggcatcgcgttcattacccatcagggccagcgctatcaactgcggcagaccaaagccgggaaattgatcctgaccaaataa

SEQ ID NO: 423025 - DNA, 486 bp, Serratia marcescens
atgattcactctctgttatccatcccctgcgtcacgctgcagggcgagcaaaaaacgctgggcgattacccggcgcgcgcttatctggtggtcaacaccgccagcaagtgcggcttcaccccgcaataccgcgggctggaaaatttgtggcaatactatcgcgaacgcggcctggtggtgctcggcttcccctgcaaccagtttggttctcaggagccgggcagcccgctggagatcgccaacttttgcagcctcaactacggcgtcagtttccctctgttcagcaagatagacgttaacggccccggcgcgcacccgctgttcaatgagttgaaacgcctggcgcccggcattctgggcagccgccgcatcaaatggaatttcaccaagttcctgctcaccgccgacggccagcgcgtcacgcgctttgcgccgatcaccaagcccgagcgtctgtttgaccgcatcgaaaccctgctgaaataa

SEQ ID NO: 423026 - DNA, 1047 bp, Serratia marcescens
atgcacaaaacagatgaactgcggaccgcgcgcatcgacagcctcgtcacgccgcaagcgttggcggacaagctgccgatctcggcggccgtcgccgacaacgtgaccgcgtcacgaaaacgcattgaaaaaatcctcaccggtgaagaccgccgcctgctggtggtgatcggcccctgctccatccacgatctcgacgccgccgtcgattacgccggccggttgaacgccctgcgcgaacgctaccaggatcgcctggagatcgtgatgcgcacctatttcgaaaaaccgcgcaccgtcgtcggctggaaaggcctgatatccgatccggcgctggacggcaccttccaggtcaaccgcggcatcgaaatggcgcgccgcctgctgctggaagtgaaccagctcggcctgccgaccgccaccgaattcctggacatggtgatcggccaatacatcgccgatctgatcagctggggcgccatcggcgcgcgcaccaccgaaagccagatccaccgtgaaatggcctcggcgctctcctgcccggtcggcttcaaaaacggcaccgacggcaacacccgcatcgccatcgacgccattcgcgcggcgcgcgccgggcacatgttcctgtcgccggacaaacatggccaaatgaccatctaccagaccagcggcaacccgtacggccacatcatcatgcgcggcggcaaaacgccgaactatcacgccagcgacatcgccgccgcctgcgacagcctgcgcgagttcgatctgccggaacacctggtgatcgacttcagccacggcaactgccagaaaatgcaccgccgccagctggaagtggccgacaacgtctgccaacagatccgcgccggctccgccgccatcaccggcgtgatggcggaaagcttcctggtggaaggcacgcagaagatcgtcgccggccagccgctgacctatggccagtcgatcaccgatccttgcctgagctggtccgacagcgaacagttgctggcgatgctggcggatgcggtcgatagccgtttctga

SEQ ID NO: 423027 - DNA, 822 bp, Serratia marcescens
gtggaaagaagcgttttttatatttcggatggtacggcgatcaccgccgaagtgctgggacacgcggtgctgtcgcagttcccggtcacggcgaccacctataccctgccgtttgtcgaaaccgaggcgcgcgctcgcgcagttcgccaacaaatcgatgatatctataatgaaaccggcgtgcggccgctggtgttttactccatcatctcgccggaagtgcgcgatgtgatcgtgcagagccagggcttctgccaggatatcgtgcaggcgctggtcggcccgctgcagggcgagctggaagtggagccgacgccggtgccgaaccgcacccacggtctgaccgccagcaacctcggcaagtacgacgcgcgcattgccgccatcgactatacgctggcgcacgacgacggcatttcgctgcgcaacctcgatcaggcgcaggtgatcctgctcggcgtgtcgcgctgcggcaaaacccccaccagcctttatctggcgatgcagttcggcatccgcgccgccaactacccgtttatcgccgacgatatggacaatttgcacctgccggcctcgctgaaaccgtttcagcataaattattcggcctgaccatcgatccggaacgcctggcggcgatccgcgaggaacggcgtgaaaacagccgttacgcttcattgcgccagtgccgtatggagatcgccgaagtcgaggcgctgttccgcaaaaatcagatccgctacctcaataccaccaactattcggtcgaagagatctccaccaaaatcctcgacatcctcggcatgagccgccgcatgttctga

SEQ ID NO: 423028 - DNA, 2379 bp, Serratia marcescens
atgtccaacaatggcccagacttgcgtaatgtgctttggtacaaccagcttggcatgcacgacgttgaccgtgtcggcggcaaaaacgcctccctcggtgaaatgatcaccaatctttccgatttgggcgtggccgtgccgaacggttttgccaccaccgcacaggcgtttaacgatttcctcgaacaaagcggtgttaaccagcgcatctatcagctactggatcagaccgacgttgatgacgttgcacaactggccaaggccggcgcccagatccgccaatgggtgatcgacacgccgttccacgccgagttcgaacgcgaaattcatcaggcttaccaacagctcgccgacggcgaaccggaagcttccttcgcggtgcgctcctccgccacggcggaagacatgccggacgcgtccttcgccggccagcaggaaaccttcctcaacgtgcagggcatcgacgccgtaatggtggcgatcaagcacgtgttcgcatcgctgttcaacgaccgcgccatctcttatcgcgtgcatcagggctatgaccaccgcggcgtggcgctgtcggcgggcgtacagcgcatggtgcgctcggatttggcctcttcgggcgtgatgttcaccatcgataccgagtccggctttgatcaggtggtgttcatcacctccgccttcggcctgggtgaaatggtggtgcagggcgcagtgaacccggatgagttctacgtgcacaaaccgactctgcaaaacggcaagccggcgatcgtccgccgcaacctgggttcgaaaaagatccgcatggtgtacgcgccgtcgcaggatcacggcaagcaggtgcgcatcgaagacgtaccggaagcgcagcgcagccgtttctcgttgacggatgacgaagtgcaggcgctggcgcagcaggcgatcctgatcgaaaaacattacggccgcccgatggatatcgagtgggcgaaagacggccataccggcaagctgctgatcgtgcaggcgcgcccggaaaccgtgcgctccaacgaacagaccatggagcgctaccagctgaacggctccagcccggtgctggtggaaggccgcgccatcggccaccgcatcggcgccggtccggtgaaagtgatccacgacatcagcgaaatggatcgtatccagccgggcgacgtgctggtcaccgacatgaccgacccggactgggaaccgatcatgaagaaggccgccgcgatcgtcaccaaccgcggcgggcgtacctgtcacgcggcgatcatcgcccgtgaactggggatcccggcggtggtgggctgcggccacgccaccgacgtgctgaaagacggccagaaagtcaccgtgtcctgcgcggaaggcgacaccggcttcgtttacagcgatatgctggacttcagcgtgcagagctccgaagtgaccgagctgccggatctgccgctgaagatcatgatgaacgtcggcaaccctgatcgcgccttcgactttgcgcgtttgccgaacgaaggcgtgggcctggcgcggctggaatttatcatcaaccgcatgatcggcgtgcacccgcgtgcgctgctggagttcgatcagcagacgccggcgctgcaaaacgagattcgcgcgctgatgcagggttacgatcatccggtcgagttctacgtcggccgcctgaccgagggcatcgcgacgctgggcgccgccttctggccgaagcgcgtgatcgtgcgcctgtccgacttcaaatccaacgagtacgccaacctggtgggtggcgacaagtatgaaccgcacgaagagaacccgatgctgggcttccgcggcgccggccgctacgtggccgacagcttccgcgattgcttcgcgctggagtgcgaggcggtgaaacgcgtgcgtaacgaaatggggctgaccaacgtcgaaatcatggtgccgttcgtgcgcaccgtggcgcaggcggaagcggtggtggccgagctggcgcgtcaggggctgaagcgcggcgaaaacgggctgaaagtgatcatgatgtgcgagatcccgtccaatgcgctgttggcggatcagttcctcgaacacttcgacggcttctccatcggctccaacgatatgacccagttggcgctggggctggatcgcgactccggcgtggtgtcggagctgttcgatgaacgcaacgacgcggtgaaagcgctgctgtcgatggcgattcaggcggccaagcgccacggcaaatacgtcggcatctgcggccagggcccgtccgaccacgaagacttcgccgagtggctgatggagcagggcatcgacagcctgtcgcttaatccggacaccgtggtgcagacctggatcaatttgtcgaaaaagaaataa

SEQ ID NO: 423029 - DNA, 1101 bp, Serratia marcescens
atgccactcccgcaatcgcgttacgacttaccgcgaattattttcggcgtgctgtttatcgccatcatgatcgtcgcctgtttttgggtgatccaaccgttcattctcggcttcgcctgggcgggaatggtggtgatcgccacctggccgctgctgctcaaactgcaaaagctgctgtggggccgccgctcgctggcggtgctggtgatgaccctgctgctgatcctgctgttcattttgcctatctctctgctgatcagcagcgtggtggataacagtgcgccgctgatcgcctgggccagctcgccgggcaagctgcatattcccgatctcgcctggctgcagtccgtgccgatgatcggcgacaggctctataccagctaccatacgctggttaacgccggcggcgccgcgctgctggcgaaggtgcagccgtacttcggccaaaccgccacctggttcgtggcgcaggccgcgcatatcggccgtctgctgctgcactgcgcgctgatgctgctgttcagcgccctgttgtatgcgcgcggcgagcaggtggcgctgggtatccgccactttgcggtgcgcctcggctctgcgcgcggcgatgcggcggtgctgctgggcggccaggcgatccgcgccgtcgcgctgggtgtggtggtgacggcgctggtgcagtcggtgctgggcggcatcggtctggcggtgagcggcattccggccgccactctgctgacgatgctgatcttcatctgctgcgtggcgcaattggggccgctgctggtgctggtgccggccatcatctggctgtactggcacggcgataccacctggggcaccgtgctgctggtctggagctgcgtggtggctacgctggataacgtgctgcgcccggtgctgatccgcatgggcgccgatctgccgctgctgctgatcctgtccggcgttatcggcggcttgctggccttcggcatgattggcctgttcatcggcccggtggtgttggcggtatcttatcgcctgctgaccgcctggatggatgaagcgccggagccgaccaccgcgccggagcaagtcatcgaagatttggaaaaacgctaa

SEQ ID NO: 423030 - DNA, 3057 bp, Serratia marcescens
atgatcccacagatttctcaggcgcccggcctcgttcaacgggtgctcgactttttggaagcactgaagcaaaacggattcaacggcgataccgccaccagctatgccgaccggctgacgatggccaccgacaacagcatctatcagctgttgcccgatgcggtggtgttcccccgttccaccgccgacgtggcgctgatcgcccgcctggccggggaagagcgattcaatgcgctgaccttcagcccgcgcggcggcggcaccggcaccaacggccagtcgctcaataccggcatcgtggtcgatatgtcgcgccatatgaaccgtattctggagatcaacgtcgaacaaggctgggtaaaagtcgaagccggggtgatcaaggatcagctgaatcaatatctgcggccgttcggctacttcttctcgccggaactgtccaccagcaaccgcgccaccctgggcggcatgatcaataccgacgcctccggccagggttcgctggtgtacggcaaaacctccgatcacgtgttgggcctgcgggcggtgctgctgggcggcgagatgatcgatacccgcgccatgccgacggcgctggcggaaacgattgctctggacgagaccgccgaagggcgtatctaccgcacggtgctgaaccgctgccgcgagcagcgcgcgctgatcctggagaaattccccaagctcaaccgcttcctcaccggttacgatctgcgccacgtgctgagcgacgatctgcaaaccttcgatctgacgcgcatcctgaccggcgccgaaggcacgctggcgtttatcaccgaggcgcggctggacatcacgccgttgccgaaagtgcgtcgcctggtcaacgtgaagtacgactccttcgactcggcgctgcgcaatgcgccctttatggtcgaagccaaggcgttgtcggtggaaaccattgattccaaggtgctgaacttggcgcgtgaagacatcgtttggcactcggtgaacgaactgatcgccgacgtgccggataaagagatgctcgggctgaacatcgtcgagttcgccggtgacgatcgcgcgctgatcgacggccagatggaaaccctgtgtcaacggctggacgaattgatcgcgcagcggcagggcggcgtgatcggttaccagatctgtggcgatctggcgggcatcgagcgcatttataacatgcgcaagaaggcggtcgggctgctgggcaacgccaaagggcgcgccaagccgattccattcgccgaggacacctgcgtgccgccgcaacacctggcggattatatcgtcgaatttcgccaactgctcgacgaccataacctgagctacggcatgttcggccacgtcgacgctggggtgctgcacgtgcgcccggcgcttgatatgtgcgacccgcagcaggaagtgctgatgaagcagatctccgatcgggtggtggcgctgaccgccaaatacggcggcctgctgtggggggagcacggcaaggggttccgcgcggaatacagccctgagttcttcggcgaaacgctgtatgaagagctgcgccgcatcaaggcggcattcgatccggataaccgcctgaacccgggcaagatctgttcgccgctggcggtggatgcgccgatgatgcaggtggacgcggtcaagcgtggcaccttcgatcgccagatcccggttgaagtgcgcacctcattccgcggcgcgctggagtgtaacggcaacggcctgtgcttcaacttcgacgtgcgcagcccgatgtgcccgtcgatgaagatcagcggcaaccgcattcattcaccgaaagggcgggcgacgctggtgcgcgagtggctgcgtctgttggccgagcagggcgtcgatccgctggcgctggagaaagagctgccgcagcagcgagtcagcctgcgcggtttgatcgaaaagacccgcaacagctggcatgccagcaagggcgagtatgatttctcgcacgaagtgaaagaggcgatgtccggctgcctggcttgcaaggcctgctccacccagtgcccgatcaagattgacgtgccgggattccgttcgcgcttcctgcagctctaccacacccgctatctgcgcccggtaagcgactacatggtcgccggcgtggagagctataccccgttgatggcccgcgcgccgaaggtgttcaacttcttcttccgccagccgtggctgcgggagatgagccgcaacgccatcggcatggtcgatctgccgctgctgtccagcccgacgctgcgtcagcagctgtccggccaccgcgcgaccacgctgacgctggagcagctggaagggctgagcgccgatcagcgcgccgatcacgtgctgatcgtccaggatccgttcaccagctattacgacgccaaagtggtggcggactttgtccggctggtggagaagctcggctataaaccggtgctgctgccgttctcgccgaacggcaaggcgcagcatgtgaaggggttcctgacgcgctttgcccgcaccgcgcgcaaaaccgccgatctcctcaaccgtatggcgcagctcggcatgccgctggtgggcgtcgatccggcgctggtgctgtgctaccgcgacgaataccgcgagatcctcggcgccgaacgcggcgatttccaggtgcagctggtgcacgaatggctgcagcagcggatcgcggatcgcgccgaacagccggcgaccggcgaaccctggtatctgttcggccactgtaccgaaaccaccgcgctgccggccagcggccaacagtgggcggcgatcttcgcgcgcttcggcgccaaactggagaacgtcagcgtcggctgctgcggcatggcgggcacttacggccatgaagccaagaacctgcaaaactcgctcggcatttatgagctatcatggcacccgacgctgcagcgtttgccgcggcagcgctgcctggcgaccggctattcctgccgcagccaggtgaaacgcatcgagggcaatggcgtgcgccaccccttacaggcacttctggagatgattgagtga

SEQ ID NO: 423031 - DNA, 417 bp, Serratia marcescens
gtgaaattgtggaaacgtgaaacatcgctggagcagctgaaccgcgccggcgacggctgcatggtcagccatgtgggcatcgagtttacccagctgggcgaggatttcctcgaggccaccatgccggtcgatggccgcacccggcagccgttcgggctgttgcacggcggggcgtcggtggtgctggcggaatcgatgggatcgatggccggttacctgtgcagcgagggcgagcagaaagtggtggggctggagatcaacgccaaccacctgcgcgcggtgttcgatggccaggtgcgcggggtgtgccgcgcactgcacgttggccgccgtcatcaggtgtggcaaatcgagatcttcgacgcgcgcgatcggctgtgctgcacctcgcgtctgaccacggcggtcatcgactga

SEQ ID NO: 423032 - DNA, 405 bp, Serratia marcescens
atgactctttcgatcaacgcatggttgctgggcaagattgatgactacaaattcagcgtgcgcgacgccacggtggacttttacatggccgaggcggcgctgcggcgcccggaatgcaatatcgaccacctgaagcggtacaacagcgtcagcctcaccatggccaatctgtgtctggagaacggcgacgacgacagctacctgcatgcgctcagcaagctgcacaaccggctgatcgtcgagatcaacaacccacagcgctgccagctttttcgggtgcaaagctaccacttcgctcgccacacgctgacgctgatctgccaaaaatatgcaatggaaggcacctgggagaaggcaaacgcgtttcagaaggacttcgtcaaacgcgtgccgtttcagctgtaa

SEQ ID NO: 423033 - DNA, 372 bp, Serratia marcescens
atgcaaacggaaaatgtcggcactttttctctggatgaaaatgtctggcaaggcatttcgctcagcgacagcgccgtacgacaaataaccaaactgatgcagcaggatccgcaggtgaaagggctgcagctaggggtgaaacaatccggctgcgccggctttgcctatgtgctggatctgacccgcgaacccgccgatgacgatctgctgtttgagcgcgacggcgccaaactctatgtgccgctgaaggccatgccgttcatcgatggcaccacggtagattacgtccgcgaagggctgaatcagatattcaaatttaacaaccctaaagctcagcatgcctgcgggtgcggcgagagctttggcgtttga

SEQ ID NO: 423034 - DNA, 1476 bp, Serratia marcescens
atgcctaatgaagtgcaggcttgggtcagcgaaggtcgctacaaagaaggtttcttcacccagctggcaaccgatgagttggccaaaggcatcaacgaagaggtggtgcgcgccatatcggccaagcgtaacgaacccgagtggatgctggaattccgcctcgaggcctaccgcgcctggctgcagatggaagagccgcactggttgaaggccaattacgatcgcctgaactaccaggactacagttactattcggcgccgtcctgcggcagctgcgacgacgcctgcggttcgcaacccggcgccgagcagcaaccgggcgcggcgacggaaaaagattacctgaccagtgaagtggagctggcgttcaaccagctcggcgtgccggtgcgcgagggcagcgaggtggcggtggacgccatcttcgactcggtctctgtcgctaccacttaccgtgaaaaactggcggagagcggggtgattttctgctcgttcggcgaagcgatccaggaatacccggatctggtgcgtcagtacctggggcgcgtggtgccgtccaacgataacttcttcgccgcgctgaacgccgcggtggcttccgacggcaccttcgtttatgtgccgaagggcgtacgctgcccgatggaactgtcgacctacttccgcatcaacgccgccaaaaccggccagttcgagcgcaccatcctgatcgccgacgaaggtagctacgtcagctatatcgagggctgttccgccccggtgcgcgacagctatcagctgcacgcggcggtggtggaagtgatcctgcataaagacgccgaagtgaaatactcgacggtgcagaactggttctccggcggcgagagcaagggcggtatcctcaacttcgtcaccaagcgcgcgctgtgtgaaggcgccggctcgaaaatgtcctggacccagtcggaaaccggctcggccatcacctggaaatacccgagcgtgattttgcagggcgacaattcgatcggcgaattcttctcggtggcgctgaccagcggccatcagcaggccgataccggcaccaagatgatccacatcggcaaaaacaccaagtcgaccatcatcgccaaaggcatctccgccggccacagcgagaacacctatcgcggcctggtgaaaatcctgccgggggcggaaaacgcccgtaactttacccagtgcgactcgatgctgatcgggccggacagcggtgcccacacgttcccttacgttgaagcgcgcaacaacagcgctcagctggagcacgaagccaccacctcgaagatcggcgacgaccagctgttctactgcctgcagcgcggcatcagcgaggatgacgccatttcgatgatcgtcaacggtttctgcaaggacgttttctccgagctgccgctggagttcgccgtcgaggcgcagaaacttctggccatcagcctggaacacagcgtgggttaa

SEQ ID NO: 423035 - DNA, 747 bp, Serratia marcescens
atgttaagcatcaagaatttgaaagtcagcgtggaaggcaacgagatcctcaagggattggatctggagatcaaaccgggcgaagtgcacgccatcatggggccgaacggctcgggcaagagcacgctgtccgccacgctggccgggcgtgaagagtacgaagtgaccgaaggggaagtcactttcaaaggcaaggatctgctggagctggatccggaagatcgcgccggcgaaggcgtgttcctggccttccagtacccggtggagatccccggtgtcagcaaccacttcttcctgcagacgtcggtcaacgcggtgcgcaaataccgcgagcaggagccgctggatcgctttgacttcgccgatttcatcgaagagaaaatcgcgctgctggatatgccggccgatctgctgacccgttcggtcaacgtcggcttctccggcggcgagaaaaagcgcaacgacattctgcagatggcggcgctggagccggatctgtgcattctcgatgaaaccgactcgggcctggacatcgacgcgctgaagatcgtcgccaacggcgtcaactcgctgcgggacggcaagcgcgcgtttatcatcgtcacccactatcagcgcattctggactacatccagccggattacgtacacgtgctgtcccaggggcgcatcgtcaaatccggcgatttctcgctggtgaaacagttggaggagcagggctatggctggcttaccgaccaacagtaa

SEQ ID NO: 423036 - DNA, 1287 bp, Serratia marcescens
atggctggcttaccgaccaacagtaattcaaacgcgctgcagcagctgtatcgcctgttcgaaggccgcggcggcgagcgttcgccgcatgcgctggcgcactggcagcaggcgctgcgcctcggctggccaacgcgcaagcatgaaaactggaaatacacgccgctggagagcctgctggagcagcagttcctcgaaccgcagcccgcgccggtgagcgctgagcagctggaggcgctggcgctcggcatcgatgcctgtcggctggtgtttatcgacggccgctacagcgccgcgctgagcgatggcgatttgggcgaataccagttcgaattgactgcctacggcacgccgcaggcgctgccggagccgatccagccggaaattttcctgcacctgaccgaaagcctggcgcaggaaaccagcctgattcgcttgccggccggcaaggtcccagcccgcccgctgtacctgctgcacatcagcagcggacgcggcgccaccggggaagtgaacaccgtgcatcatcgtcaccatctggagatcgggcgcggggccgaggcggaagtgattgaacactacgtcagcctaggcgaggccgcgcacttcaccggcgcgcgcctgaccgccaacgtggcggacaacgccgggctgttgcactgcaagctggcgtttgagagccagccgagctaccactttgcccacaacgatctggttatcggccgcgacgcgcgggtgaaaagcgacagtttcctgctgggcgccggcctgacgcgccacaacaccagcgcgcagctgaacggcgaaggtgcaaacctggtgatcaacagcctggtgctgccggtgggcaaagagatctgcgatacccgcacctatctggagcacaacaagggctattgcgaaagccgccagctgcataaaaccgtggtcagcgatcgcggcaaagcggtgttcaacggcatgatcaaagtggccaagcacgcgattaaaaccgacggccagatgactaaccataacctgctgttgggcaaggtggcggaagtggataccaagccgcagctggagatctacgccgacgacgtcaaatgcagccacggcgccaccgtggggcgcatcgatgaagagcagctgttctatctgcagtcgcgcggcatcgacaaacacgcggcgcagcagatgatcattttcgccttcgccgctgagctcaccgaaggcatcgccaatgacaccatccgggaacgggtgctggcgcgcatcgcccagcgcctgccgggggaggctgaatga

SEQ ID NO: 423037 - DNA, 1227 bp, Serratia marcescens
atgagttatccgattgaacgcgtgcgcggcgatttcccgctgctggcgcgtgaggtgaacggccaaccgctggcctatctcgacagcgccgccagcgcgcagaaaccgcaggcggtgatcgaccgcgagctggagttctaccgccacggttatgcggcggtgcatcgcggcattcataccctgagcgccgaggcgacccagcagatggaagcggtgcgggaacaggcggcgcgctttatcaacgccgcctcggcggaagaaatggtgttcgtcaagggtaccaccgaaggcatcaatttggtggccaacagctttggccgccacctgctgcagccgggcgatgcgattctcatcaccgagatggagcaccacgccaatatcgtgccgtggcagatgctggcgcaggagcgcgggctgcagctgcgggtgtggccgctgcagccggacggtacgctggatctggcgctgctgccggagctggtcgactcgtcctgcaaactgctggcgctgaccgaggtctccaacgtgctgggcaccgtcaacccggtgcgcgacatcatcgcccgcgccagagccctggcgccggagctgacggtgctggtggacggcgcgcaggcggtaatgcaccagcgcgtcgatgttcaggcgctggactgcgatttttacgtattttccggccataagctgtacggcccttccggcatcggcatgctgtacggccgccaggcgttgttacagcagatgccgccgtgggaagggggcggctcgatgatccgccaggtcagcctgacggcgggcaccaccttcgccgatccgccgtggcgcttcgaggccggttcgccgaacaccgccggcatcatggggctgggggcggcgttcgattacgtcgaagccctgggcctgaatgcgatccacgattatgaacagtcgctgatgcactatgcgctggaggcgctcaggcaggtgccgacgctgaaagtttatggtccggcccatcgcgccggggtgatcgccttcaacctgggggagcaccatgcctatgatgtcggcagcttcctcgaccagtacggcatcgccattcgcaccggccatcactgcgcgatgccgctgatggcgttttatcaggtgccgagcatgtgccgcgcttcgctggcgttatataatacccgcgaagaggtggaccggctggtggccgggctgcaacgcattcatcagctattaggctag

SEQ ID NO: 423038 - DNA, 417 bp, Serratia marcescens
atggcgaatttgccggacaaagataaattggtgcgtaatttctcccgctgtttgaactgggaggagaaatacctgtacgtgattgaactcggcgccaaattgccgccgctggacgaggccgagcggcaggccggcaacctgatttccggctgtcagagccaggtatggatcgtgatgcgccgtgatgagcaggggcaggtcgagtttcacggcgacagcgacgcggcgatcgtcaaagggctgctggcggtggtgtttattctttatcgtcaattgacgccacagcagatcgtcgatctcgatgtgcggccgtttttcagcgagttggcgctcagccaacatctgacgccttcgcgttcacaggggttggaggcgatgatccgcgccattcgcagcaaagcggcgcagctggcctga

SEQ ID NO: 423039 - DNA, 1014 bp, Serratia marcescens
atgaaacgtgcgttgagtttaatgggcatggtcttcgccaccgtattggccggcacgcaggccgccagtgcgaccgagtacccgctgccgccgccggacagccgtctgatcggtgaaaacaccacttataccgtgccaaacgacggccgtccgctggaggcgatcgccgccgactacaagatcggcctgctgggcatgctggaagccaaccctggcactgacccgttcctgcctaagccgggttcggtgctgaccattccgacccaaatgctgctgcctgacaccaagcgtgaagggatcatcgtcaacctggccgagctgcgcctttactactacccgaaaggcgagaacaaagtgatcgtctatccgatcggtatcggccagaccgggatgcacacgccgctggaggtgacctccgtcagccagaagatccctaacccgacctggacgccaaccgccaatatccgtaaacgctatcagtcccagggcgtgacgctgccagcggtggtgccggccggccctgagaacccgatggggttgttcgccctgcgtctggcgatggggcgcggtgaatacctgatccacggcaccaacgccaacttcggtatcggcatgcgcgtcagctccggctgcattcgtctgcgtccgacggatatcgaagcgctgttcaatcaggtgccgcgcggtacgcgggtgcaggtgatcaacgatccggtgaagatttcggttgagccggacggcaaacgctatgtggaagtgcatcagccgctgtcgcgggtagaaagcgacgatccgcagaccatgccgattgcgttgtctaaagcggagaaagccttcgctgcggatgctcagaccgatcgcgccgtgttcgatagcgcggttgtacgccgttctggcatgccggtgctggtcaacgtaggggagagcccgtcggcggtgagtttgacgcctgcagcgacgcctgaggcgaataagagcccattcaaggcagcgccaatcagttccgtgaactaa

SEQ ID NO: 423040 - DNA, 237 bp, Serratia marcescens
atgaatcgtactaaactggtactgggcgcggtaatcctgggttccactctgctggctggctgctctagcaacgctaaaatcgatcaactgtcttctgacgttcagactctgaacgctaaagttgatcagctgagcaacgacgtgaacgcaatgcgttctgacgttcaagctgctaaagacgacgcagcacgcgctaaccagcgtctggacaaccaagctcacgcttacaaaaagtaa

SEQ ID NO: 423041 - DNA, 1413 bp, Serratia marcescens
atgaaaaagaccaaaattgtttgtaccatcggtccaaaaaccgaatcggaagaaatgctgaccaacctgctcaatgcgggcatgaacgtgatgcgtctcaacttctctcacggcgactatgaagagcacggcaaccgcatcaagaacatgcgcgccgtgatggcgaaaaccggcatcaacgccggcatcctgctggataccaaaggcccggaaattcgcaccatgaaactggaaggcggcaaagacgcctcgctggtcgccggccaaaccttcactttcaccaccgaccagagcgtgatcggcaacagcgaacgcgtggcggtcacctacgccggcttcgccgccgacctgaagatcggcaataccgtgctggttgacgacggcctgatcggcatggaagtcaccaacgtgaccgagaacgaagtcgtttgtaaagtgctgaacaacggcgacctgggcgagaacaagggcgtcaacctgccgggcgtatccatccagctgcctgcgctggccgaaaaagacaaacgcgacctgatcttcggctgcgagcaaggcgtcgacttcgtggcggcgtccttcatccgcaaacgctcagacgtgctggagatccgcgaacacctgaaagcccacggcggcgagcaaatccagatcatctccaagatcgaaaaccaggaaggcctgaacaacttcgacgaaatcctcgaagcgtccgacggcatcatggttgcccgtggcgacttgggcgtggagatcccggtcgaagaagtgatcttcgcccagaagatgatgatcgagaaatgcaaccgcgcgcgtaaagtggtgatcaccgccacccagatgctcgattccatgatcaagaacccgcgccctacccgcgcggaagccggcgacgttgccaacgccatcctggacggcaccgatgccgtcatgctgtccggcgagagcgccaagggcaaatacccgctggaagcggtcaacatcatggcgaccatctgcgagcgtaccgatcgcgtgatgccaagccgcatcgacgccctgaacgatcgccgcaagctgcgcatcaccgaagcggtgtgccggggtgcggttgaaaccgccgagaaactggacgcgccgctgatcgtggtcgccaccagcggcggcaagtcggcgaaatccgtgcgtaaatacttcccgaacgcggtgatcctggcgctgaccaccaatgaaaccaccgcgcaccagctggtgctgagcaagggcgtcatcccgcagatggtcaaggaaatcgcctctaccgacgacttctaccgcatcggtaaagaagccgccctggccagcggcctggcacagaaaggcgacgtcgtggtgatggtttccggcgcgctggtgccgagcggcaccaccaacactgcctcggtacacgtgctgtaa

SEQ ID NO: 423042 - DNA, 306 bp, Serratia marcescens
atgaccacttttaccgccaaaaccgcctttttaccgctcgacaatggccttgcccgccgtgaaggcgtgatgagcgacggttcgccggcggcggaagtgcgtttcgaagccggcgccttcggccagttgcaaaagcccccgcacgcgctgcaaacccgagtgatatccggtgaattcgagttcactctcggcggcgatacgcgagtggtgcgggccggtgagagcctgatattgccggccaacgtcgccagcggctgcttctgcctgagcgccggcgtgctgctggaaatccccctaccgcggtaa

SEQ ID NO: 423043 - DNA, 1377 bp, Serratia marcescens
gtgcagaagtacttaattgaagcgcgtagtttattggctctcgctatcccggtcatcatcgcgcaaatatcgcaaaccgccatgggcgtggtggataccatcatggccggcgcttacagcgccaccgacatggcggcggttgcggtcggcacttcaatctggctgccggccatcctgttcggccacggcctgctgctggcgctgaccccggttatcgcccagctcaacggcgccgggcgtcgcgatcgcatcgctcaccaggtgcgccagggtttttggctggcttccggcgtgtccgtgctgctgatcgtcgtgctgtataactgcaagttcgtcatcgacatgatgcacaacatcgatccgcagctggcggataaagccgtcggttatctgcacgccatcatgtggggggcgccgggttacctgttcttccaggtgatgcgcaaccagtgcgaggggctgtccaaaaccaagcccggcatggtgatcggcttcctcggcctgctggtgaatatcccgatcaactacatcttcatctacggcaaattcggcatgccggagctgggcggcgtcggctgcggcgtcgccaccggcagcgtctactggatcatgttcctgatgatgcgcggctacgtgaagcgcgcgccgtcgcagcgcgacatcaaacgccaaaccggcgatctcggcggcccggactgggcggcgctgaaacgcctgatcggcatcggcatgccggtggcgctggcgctgttcttcgaagtcactctgttcgccgtggtggcgctgctggtgtcgccactggggatcgtcgcggtcgccggccaccagatcgcgcttaacttcagcgcgctgatgttcgtactgccgctgtcgctgggcgtcggcgccaccatccgcgtcggttatcgtctgggggaaggctcggtcgaaggcgcgcgcgtcgccgcctactccgccatcggcgtcggcatcaccatggccgtctgcaccgcgctgtttaccgccgccttccgcgaaccgatcgccctactgtacaacgacagcccggcggtggtggcgatggcctcgcagctgatgctgctggcggcgctgtaccagatctcggattctgtccaggtgatcggcagcggcgtgctgcgtggttataaagatacccgcgcgatcttcttcatcaccttcattgcttattgggtgttgggcctgccgagcggctatctgctggcgttaaccgacgcggtggtgccggcgatggggccgagcggtttctggatcggctttatcatcggcctgaccttcgccgccatcatgatggcgctgcgcatgcgctggctgcagaaacagccgaccaccgtcatcctgcagcgatccacgcgctga

SEQ ID NO: 423044 - DNA, 651 bp, Serratia marcescens
atgttcaccggtatcgtacaaggcaccgcgccgctggtcgccattgatgagaaacccaatttccgcacccacgtgatcgaaatgcctgccgagctgctgccggggctggagctgggcgcgtcggtggcccataacggctgctgcctgaccgtcaccgcggtggaaggcaaccgcgtcagcttcgatttgattaaggaaacgctgcgcctgaccaacctcggcgatctggcgctgggcgacatcgtcaatatcgagcgcgcggcgaagttcaatgacgaaattggcggccatttgatgtccggccatattatctgcacggcggaagtggccaagatttatacctcggaaaataaccggcaggtatggctgcgcatgccgaatgccgaattgatgaaatatgtgctgcacaaaggcttcatcggcatcgacggcattagcctgaccatcggcgaagtggtgaataaccgtttctgcgtgcacctgatcccggaaacgctggatcgcaccacgctgggtaagaaacgcctgggtgacaaggtgaacatcgagatcgatccgcaaacgcaggcggtggtggacaccgtcgagcgcgtgctggccaatcgggaagcggcgctggcggcggcgatggcgccggcgcacaaagactga

SEQ ID NO: 423045 - DNA, 294 bp, Serratia marcescens
gtgaagttttatgggaaaacgttgttgttaaccgcgttgctggcgctgagcgcctgcagcagttcgcctgagcagggcgcgagcgcgcaaatggccgatgcggatgatacctgcggcgcttcgcagtatcaaaacttcgtcggcaaaccgatgacctcgctggaaggcgtgcggatcgacgccaaggtgcgcgccattccgtacaactctgccgtcaccatggatttcaacctgcgccgcctgaacttccttggcgacagcgacgataaaatcatccgcgtctactgcggctaa

SEQ ID NO: 423046 - DNA, 1152 bp, Serratia marcescens
atgagttcatcgtgtatagaagatctgagcatccaggacaatcagtggtaccgtatcgcgcacgaaatgctcggcctggccggcattgaaatcaacggttcgcgccccttcgatattcaggttaaaaaccccgatttctttaaacgcgtcttgcagcaaggttcgctgggcctgggcgaaagctatatggacggctggtgggaatgcgagcggctggatatgttcttccagcgcgtggtcagcgccgggctggagaagaaactcccccaccacctgaaagataccctgcgtatcgccgccgcgcgcctgaccaatctgcaatcgaaaaagcgcgcctggatcgtcggcaaagaacattacgatctcggcaacgatctgtttaccctgatgctcgatccttacatgcaatattcctgcggctactggaaagacgccaccacgctggaggaggcacaggaagccaagctgcggatgatctgcgagaaactgcagctgcaaccgggcatgcgcttgctggacatcggctgcggctggggcggcctctccgcctatgcggcgaaaaattacggcgtatcggtggtcggcgtgaccatctccgcagaacagcagaagctggctcaggcgcgctgcgccgggctggatgtgcagatcctgctgcaggattaccgcgatctgcatcagcagttcgatcgcatcgtctcggtcggcatgttcgagcacgtcgggccgaaaaactaccgcacctatttcaatgtggtagaacgcaatctggcgccgcacggtctcttcctgctgcacactatcggctccaacaaaaccgacatgaacgtcgatccgtggatcaacaagtacattttcccgaacggctgcctgccttcagtgagccatatcgccgaagccagcgaaggccatttcgtgatggaagactggcacaacatcggcgccgactacgatcgcacgctgatggcctggttcgagcgcttcaaacaggcgtggccgcagcttgcaccgcgctattccgaacgcttcgagcggatgttcagctattacctgaacgcctgcgccggcgcgttccgggcgcgcgatctgcagctgtggcaggtggtgttcagcccgaaaggcgttgaaggcggcatccgcgtcgcccgctaa

SEQ ID NO: 423047 - DNA, 1212 bp, Serratia marcescens
atgcgaaattcctttggctttatgttctacctcgccggcctgagcatgctgggttatctggcgaccgatatgtatctgcccgccttcggcgccatgcgggaggaactgcaaatttccgccggcgcggtgagcgccagcctgagcatcttcctggccggcttcgcctttgcgcagctgctgtgggggccgctctccgaccgtctgggccgcaaaccggtattattgatcgggctgacgctgttcgccctcggctgcctgggcatgctgtgggtggaaaacgccgtgcagctctggatcctgcgctttattcaggccgtcggcgtctgcgccgccgccgccatctggcaagcgctggtggttgaccgttaccgcgaaggccaggccaaccgcgtgttcgccaccattatgccgctggtagcgctgtcgccggcgctggcgccgctgctcggcgcctggttgctgaaccacgccagctggcgcgcgatcttcgccgcgctgttggccatcaccgcgctgctgctgctgccgacgctgctgctcaaagagcgcgccaaaacgcagcccagcgccgatgcgccaaaaaacggcgtcagcttctggcaactgttgagatccccggtgttcagcggcaacgtcgccatgtacgccgcctgctcggccggcttcttcgcctggctgaccggctcgccgttcatcctcggtgacatgggctacagcccgagcgatatcggcctgagctatgtgccgcaaacgctggccttcctgctgggtggctacggctgccgcgccgcgctcaagcgcatcaatggcaaaaccctgctgccgtggctgctggtagcttatggtgtcagcatggtggcactgtatctggtggccaccctgaccgatccgacgctcaccacgctgctgatcccattctgcgtgatggcgctggtcaacggcgccggctacccgatcatggtggcgaatgcgctgatgccgttcccggaaagcagcggcaaggccgccgcgctgcaaaatacgctgcagctggggctgtgctttgtggcgagcatgctggtgtcagcgtttattgcccagccgctgttggcgacggtgacggtgatggtgtctacggtaatcctggccgcgctggggtatttcctgcagcgtggaaaagcggccgatgcgcagcaaaagccgcagcgggaacatgctaactcagcgtcataa

SEQ ID NO: 423048 - DNA, 945 bp, Serratia marcescens
atgtggtctgaatattctcttgaagtggtcgatgcggtggcgcgcaccggcagtttcagcgcggcggcgcaggagctgcaccgggtaccgtcggcggtcagctataccgtacggcagctggagcaatggctggcggtgcccttgttcgagcggcgtcaccgcgatgtggagttgacgcccgccggtgcgctgtttatcaaagatgcgcgagttgttatcaaaaaaatgctcgacacccgccgccactgtcagcaggtggccaacgggtggcgcggccagctgaatatcgcggtcgacatcatcgtcaaaccgcagcgcagccgccaactggtgctggatttctaccgtcatttccccgacgtcgaattgatgctgcaacccgaagtgttcaacggcgtgtgggatgccttggtggatggcagggcggacatggcgatcggcgccacgcgcgcggtgccggtcggcggcggcttcgccttccgcgacatgggttatatgaactggctgtgtgtggccagcccgcaacatcctctcgcgcagttgacggggccgctgaatgacgatcagctgcggccgtacccttcgctttgcctggaggacacctctcgcaatctgcccaagcgcgtcacctggacgctggataaccagcggcggctggtggtgccggactggacttcggcgctcgactgtctgtgcgccgggctgtgcgtcggcatgatgccggcgcatcgggcgctgccgcgggtgcagcgcggtgagctgacggcgttgcagctgcagcagccgtttcccgccagcccttgctgcctgacctggcagcaggataaaccgtcaccggcgatgagctggctgctggcgtatctgggcgatggggagacgctgaatcaggagtggctgagcgaggtggaaccggaagccgcgcaggcttccggcgcgggggattag

SEQ ID NO: 423049 - DNA, 1026 bp, Serratia marcescens
atggcaacgattaaagatgtggccaaacgcgcgggcgtttccaccaccaccgtttcgcacgtcatcaataagactcgtttcgtcgccgaagagaccaaagcggccgtgtgggccgccatcaaagagctgcactactcgccgagcgccgtggcgcgcagcctgaaagtcaatcacaccaagtcgatcggcctgctggccacctcgagcgaagcgccctactttgccgaagtgatcgaggcggtggaaaacagctgctacagcaaaggctacaccctgatcctgtgcaactcgcacaataatctggacaagcagcgcgcctacctggcgatgctggcgcaaaagcgcgtcgacggcctgctggtcatgtgctccgagtacccagatcagctgctgggcatgctggaagattaccgcaacatcccgatggtggtaatggactggggcgccgcgcgcggcgacttcaccgacaccatcatcgataacgcgttcgaaggcggctatctggccggccgttacctgatcgagcgcggccaccgcgatatcggcgccattccgggccagctgtcgcgcaacaccggcggcggccgtcaccagggctttatgaaggcgctgcaggaagcgcatatcgacattcgcgaagagtggatcgtccagggtgacttcgaaccggagtccggctacaaggcgatgcaccaaatcctgtcgcaaaaacagcggccgaccgcggtattctgcggcggcgatatcatggcgatgggcgccatctgcgcggccgacgagctggggctgcgggtgccgcaggatatttccgtgatcggctatgacaacgtgcgcaacgcccgctacttcaccccggcgctgaccaccattcaccagccgaaagagcgtctgggcgaaatggccttcaccatgctgctggatcgcatcatcagcaaacgcgaagagtcgcaggtgatcgaagtgcatccgaagctgatcgaacgccgctcggtcgccgacggcccgttcatcgactaccgccgctaa

SEQ ID NO: 423050 - DNA, 579 bp, Serratia marcescens
atgtcgtttgaattacctgcattaccgtatgagaaaaacgcgctcgagccgcacatctccgccgagaccctggaataccactacggcaaacaccacaacacctacgtggttaacctgaacaacctggtgaaaggcagcgagttcgagggcaaatcgctcgaagagatcatcaagacctcaaacggcggcgtcttcaacaacgccgcgcaggtgtggaaccacaccttctactggcactgcctgtcgccacagggcggcggtgaaccgcagggcgaactggcggcggcgatcgtcaaatccttcggctctttcgctgcgttcaaagagcagtttaccgatgccgcagtgaaaaacttcggtgccggttggacctggctggtgaaaaaaccggacggcgcgctggcgatcgtcaacacctccaacgcggccaccccgctgaccggtgaagacaaaccgctgctgaccgttgacgtgtgggaacacgcgtattacatcgattaccgcaatgcgcgtccaaaatacctggaaaacttctgggcgttggtcaactggaccttcgcagcggaaaacctggcgtaa

SEQ ID NO: 423051 - DNA, 819 bp, Serratia marcescens
atgcgtttaattcttacgctctttgcgctgctgtttacgcagctcttcttcaatttggcgcacgctgcgccacaggcgcgtgttgccgccgagcagcgtaaaagccatgctaatgaagcgcggcccgatgaccgcagaaaaaagaaagcggacaaaaccgctaaaaaagccaaagtgacggcccccgcgaaaaaaaccaagaccgccaaggcgaaaagcgagaaaagcgcgaaaaagatcgccagcgccaaacccaaggccaaagcgcagaaaaccgccaagattaaagtcaccccgccgaaaaagggctacaaaaaaggctacggccgccaccgcgaagccggtatggccaccgccaagctggcgcgtgatgaaaaaccgttgaaactcagcccggcgcacaaaaaacgctatcagcatgccaagcagaccgcgatggccaagctgatgggccagatgggcaaaccttaccgctggggcggcagctcgccgcgcaccggtttcgactgcagcggccttatctattacgcctataaagacgtggtaaaaatcaagatgccgcgcaccgccaacgagatgtaccacctgcgcgacgcggcgccgatcaagaaaagcgaactggaaagtggcgatctggtgttcttccgcatcaacaaccgcggcgtggcggatcatgtcggcgtttatctcggcaacggcaaattcatccagtcgccgcgcaccggcgaagagatccgcatcagccagctcgacaacgactattggcaaaaccactacatcggcgcgcgccgcgtagtaacgccgaaaaccattcgttaa

SEQ ID NO: 423052 - DNA, 348 bp, Serratia marcescens
atgacgacgacacttgaaaaaattcagcaccagatcgctgaaaacccgattctgctgtacatgaaaggttcgccaaagctgccgagctgcggcttctccgcacaggctgtgcaagcgctgtccgcctgcggcgagcgtttcgcttacgtggacattctgcagaacccggacatccgcgccgagctgccaaaatacgccaactggccgacgttcccgcagctgtgggtagacggtgagctggtcggcggttgcgatatcattatcgaaatgtatcagcgcggcgaactgcagcagctgatcaaagaaacggcagaaaagtataaagcgcaggaagaccagcagtcttaa

SEQ ID NO: 423053 - DNA, 651 bp, Serratia marcescens
atggccgagaaaagtgatcttaacgccctgagtggtcgttttcgtgggttttatcccgtagtaatagatgttgaaaccgccggctttaacgccaataccgatgcgttgctggagatcgccgccgtcacgctgaaaatggatgaagatggctggctgcagcgggacgagaccctgcacttccacgtggagcctttcgagggcgccaacctgcagccggaagcgctggcgtttaacggcatcgatccgcacaacccgctgcgcggcgcggtcagcgaatatgacgcgctgcacgccattttcaaagcggtgcgcaaagggctcaaggatcgcggttgcaaccgggccattatcgtggcgcacaacgccaacttcgatcacagcttcctgatggccgcggccgaacgcgcaggcctgaagcgcaacccgttccatccgttcgctaccttcgacaccgccgcgctgagcggcctggtgctgggccaaacggtgttggcgaaggcctgtatcgcggccggaatgccgttcgacagcagccaggcgcactctgcgctgtacgacaccgagcaaaccgccctgctgttttgcgagctggttaaccgctggaaacgtctcggcggttggccgctgcccgccggcgatctcgccgaataa

SEQ ID NO: 423054 - DNA, 408 bp, Serratia marcescens
atgcgcttactccataccatgatccgcgtcggtgatctgcaacgcgccatcgacttctacaccaaggtattaggcatgcgcctgctgcgcaccagcgaaaacccggagtacaaatactccctggctttcgtcggctatacggaagagagcgaaggcgcagttatcgaactgacctataactggggcaccgacagctacgacatgggcaccgccttcggccacctggcgctgggcgtggacgacgttgccgccacctgcgacagcatccgccgcgcaggcggcaaggtcacccgcgaagccggcccggtgaaaggcggcactacggtcatcgccttcgtcgaggatccggacggctacaaaatcgagctgatcgaaaacaaacacgccggtcagggcctcggccactaa

SEQ ID NO: 423055 - DNA, 1104 bp, Serratia marcescens
atgaagactgaaaaattgctctctccgctgaaggttggcgccatcaccctgcccaaccgcgtgtttatggctccgctgacgcgtttgcgcagcatcgagccaggcgacattcctacgccgctgatggcggaatattatgcacagcgcgccagcgccggcctgatcgtgaccgaagcgacccaggtttccttccaggcgaaaggctacgccggcgcgccggggttgcatacgccggagcagatcgccgcatggaaaaacatcacgcaggcagtgcatgacaacaacggccatattgccgtgcagctgtggcacgtaggccgcatctcccacgccagcctgcagccgggcgggcaagcaccggtcgccccttcggcaatcaacgccgaaacccgcaccaccgtgcgtgatgaaaccggcgcctgggtgcgcgtgccgacctccacgccgcgtgcgctcgaaaccagcgagatcccgggcatcgtcaacgatttccgccaggcgaccgccaacgcgcgggaagccggcttcgacttcatcgaactgcatgctgcgcacggctatttgctgcatcaattcatgtcaccggcctccaaccaacgtaccgatcaatacggcggcagcatcgagaatcgcactcgcctgacgctggaagtggtcgacgccaccatcgccgaatggggttccgagcacatcggcatccgcatctcgccgctggggccgttcaacgggctggacaacggtgaagatcaggaagaagcggcgctgtatctggtggaagagctgaataagcgcaacatcgcttacctgcacatctccgaaccggactgggccggcggcaaaccgtattccgacgccttccgcgactcggtacgcgcccactttaacggggtgatcgtcggcgccggcgcctacaccgccgagaaagccgaagcgttgatcgaaaaaggcttcatcgacgcggtggccttcggccgcagctacatcgccaacccggatctggtagagcgtttccgtcagcatgctccgctgaacgaacctaagccggaaaccttctacggcggcggcgccgaaggctataccgactatccgtttctggcgaagtaa

SEQ ID NO: 423056 - DNA, 621 bp, Serratia marcescens
atgctcggcaccatgatgaccaaatcaacgcattgcaacgtggacacacgtgaacatctgctcgccaccggcgaaaccctcagcctgcgcctgggctttaccggcatggggctgagcgaactgctggccactgcgggcgtgccgaaaggctcgttctaccactattttcgctcgaaggaagccttcggcgaagcgatgctgcaacgctatttcgcccattatgatgcacaaatgcaggcgctgtttgctgacaggcgcggcgatgcccgccaccagctgctcggctattacgctcaggccatcagctaccactgccgcagcgaatgccacaacgcctgcctggcggtgaagctttccgccgaggtgagcgatctgtcggaaccgatgcgtcatgcgctggaaacgggcaccgctcgcgtgatcggccacctgcaggaggccatcgagcgcggtatcgccgagggctcgctgtcggtggccatgagccccgcggcgaccgcagaaacgctgtattcactgtggctcggtgcctcgctgcgcgccaagatccgccactcgctggcgccgttaacgagcgcgctggaaagcatcgagttgctgctgcgcccgccgcaagcgtaa

SEQ ID NO: 423057 - DNA, 1638 bp, Serratia marcescens
atgtggttacgtcaacgcttacggtgcaacagcctcggttttaccctcgccaccgccctgttcttcactctgtttcaaaacgcgttattcctgcatcgcgcctggtcgtatatcaccttcgatagcgtccacagcgtgattttcgctgccagcatgccggtggtgatcttctgtgcgctgaatatcatcttcagcgtgttgaccgtgccctacctgcgcaagccgctgatcatctttttcttgctcggcagcgccgcagccaactatttcatgttcagctatggtgtggtgatcgacggcaacatgatgcaaaacgccttcgaaaccaaccctcaggaggcgacggcgctgctgacgccgcgcatgggattgtggctggcgctgctcggcattctgccggcggtagcggtctgcttcacccagattcgccagactcgcccctggtggtacatggttggactgcgcgccgccaacgtcatgctgtcgctggcggtgatcctgatcgtcgccgcgctgttctacaaagactatgcttcgctgatccgcaacaataaaagcgtggtgaagatgttgaccccttccaacttcgtcgccggcaccatcaagtttaccgaacagcgttacttcacccgcaatctgccgctggtcaagatcggcgaggacgcgcgcaaagggccgctgatcgccgggcaggccaagaaaacgctggtgatcctggtggtgggcgaaaccgcccgcgccgaaaacttctccctcggcggctacgggcgcgaaaccaacccgcgcctgaagcaggacaacgtggtctacttcaagaacgccagttcctgcggcaccgaaacggcgatctccgtgccctgcatgttctccaacatgccgcgcaaggagtacgacgcgactcaggcggcgcaccaggaggggatgctcgacgtgctggcgcatgccggcgtcagcgtgctgtggcgcgataacgacggcggctgcaaaggcgcctgcgaccgggtgccgcacatcgacatgaccaagctgaaactgccgcaggactgcgacggcgaggtttgcatggacaacgcgctgctgtacaagctgaacgactatatcaatggcctgaaagacgacggcgtgatcgtgctgcaccagatgggcagccacggcccggcttactaccgccgcagcacgccagaattccagacattttcgccgacctgcaacagcaatcagatccaggactgcagccatgaacagctggtgaacacctacgacaactccatcctgtataccgacgcgatgctcgatgccaccatcaagctgctgcggcagtatgacgggcggttcaataccgcgctggtctatttgtccgatcacggcgaatcgctgggggaaaacggcatgtatctgcacggcacgccctatgtcttcgcgccgagccagcagacgcacgtgcctttcctgatgtggatgtcggccgactatcagcgcaatttcggcatcgatcgccagtgcctgaacgcgctggcggaaaagggcgacgtttcgcaggacaacctgttccacaccctattgggcatgctgaacgtacagacccgcgaatatcaatcccggctggatatcctgcagcgttgccgcaacgcggcgtaa

SEQ ID NO: 423058 - DNA, 642 bp, Serratia marcescens
atgaaagtagccattattggagcaaccggttttgttggccgccgcgtggtggatgaagcgctggctcgcggtattcaggtgacggcaatcgcccgccagaaaaaagatttgccggagcacgccaacctgaccgtcgcgctgggcgacgttgccgataccgcctggctggcggggcaattgcgcggtcaggatgcggcgatcagcgcctacaaccccggctggggcgaagacaacctgtatgagaaaaccctccgcggcgcccaacagatcctcaccgcggtcgaacaggccggcgtcaagcgcctgctggtggtcggcggcgccggcagcctggaagtggcgcccggcgttgaactggtggatacgccgcagttcccggaaaatatccgccccggcgcgcaggcggtgcgcgatctgcgcaacaaactgcgcaatgaatcggcgctcgactggacctatctctcgccggccgccctgctggagccgggcaaacgcaccggccagttccgcctcggcaccacgcaactgttgatgaacggcgaagcgccggccagcatttcggtagaagacctggcggtcgctatcgttgatgaaattgaaaagcctcagtttattcgcgcgcaattcaccgccgcctactaa

SEQ ID NO: 423059 - DNA, 912 bp, Serratia marcescens
atggcggtattcgccaccgtggtggcggagggatcgctggccggcgcggcgcggcggctgggcatgacgccgtcggcggtcagccagcacatgcgctcgctggagaaggcgcttggggtgccgttgctgcatcgctccacccgccgtctggcgctgaccgaggccggggcggcgttttaccccggctgcgaggcgatgctgcaacaggcgcagcaggcggagcagcggctggcggaattgcgggatacgctggtgggcgagctgcgcatcgccactccggtcggcatcggcggccgatcgcttgcggaggcgctggcgccgctgttgcaggcgcaccccaagctgacgctgcgggtgctggcggacgatcgcatcgtcgatatgatagagcagcgggtcgacatcgcgctgcgggccaaccgtcaactggcggatgccaatatgatcgcgcatccgctgacggcgtggccgatggtgctgtgcgccgcgccgcgttatctcagccagcatggggtgccggaaaagccgcaggatttggtgcagcaccgctggatctccagcggctacagcggggcccatctggacttgctgcaccagtccggccagcaggttaagctgcggctggcggaagggcagatcgtcagcgagagcatgaacgtgatgcgcgcctttacccgcgccgggctgggcatttccgttcagccgctgtatgaaattggcgacgagcttcagcgcggcgagctgttgctgctgttgcctgagtggcggccggcgccgctgcggctgcacgcgttgacgctcgagcgcaacgtgccggagaaaagccgccaggcgctgcgctatttgcgcgactattttcgccgcaatggcgaaaagggacttgccagcggcggcgatggcgtcttcaattag

SEQ ID NO: 423060 - DNA, 240 bp, Serratia marcescens
gtggcgcagcagcttgagtttttcgacattcccagcccgtgtcgcggcatttgccaggccgacgatcgcggattctgccgtggctgcctgcgcagccgcgaggagcgttttggctggatgaacatgagcgacgcgcaaaagcgcgaggtgctgcgcctgtgccgtcaacgcttcctgcgcctgcagcgcgccaataaagcgcccgacgagccgctgccggagcagccgtcgctgttttaa

SEQ ID NO: 423061 - DNA, 897 bp, Serratia marcescens
atggtagaacgtattcgtctcgcgccgcaggggcctgaattttcccgcatgatttgcggttactggcggttgatggagtggggcatgtcgccgcaacagctgctgacgttcatcgaacagcatgtcgaactgggcgtcaccaccgccgatcacgccgatatctatggcggctatgcctgcgaacaggcgttcggcgacgcgctgcgcctgaagccggcgctgcgccagtcgctggagctggtgagcaaatgcggcatcgccaccaccgccaagcccggcaacccgatcggccactacatcaccgaccgcgaccatatcgtacagagcgcggaacaatcgctgcgccatctgcataccgactacctcgatctgctgctgatccaccggccggatccgttgatggatgccgacgacgtggccgaagcctttgtcgcgctgcacaaaagcggcaaggtgcgccatttcggcgtctccaactttacgcccgcgcagttccagctgctgcagtcgcgcctgccgttctcgctggcgaccaatcaggtggagatctcgccgattcaccaaccggctattctcgacggcacgctcgaccagtgccagcaactgcgcatcaagccgatggcctggtcctgcctggggggcggacgcctgttcaacgacgccgagttccagccgctgcgcgacgagctgcagcgggtggcgcaagaaatcggcgccgagaccatcgagcaggtggtgtacgcctgggtgatgcgcctgccgtcgtcgccgctgccgattatcggttccggcaagattgagcgggtgcgttcggcgctgaaggcgcagaagctggtgctgaaccgccagcagtggttccgcattcgcaaggcggcgctggggtatgacgtgccttaa

SEQ ID NO: 423062 - DNA, 1845 bp, Serratia marcescens
atgggcatctttagctataaggatctggacgaaaaggcgtcgaaagcgctattttccgacgccttggccatctctacctacgcttaccacaatatcgataacggcttcgatgaaggctatcaccagaccggtttcgggctgggcctgccgctgacgctggtcactgcgctcatcggcagcacccaatcgcagggcggcctgcccggcattccctggaatcccgattccgaacaggccgcgcagcaggcggtgaataacgccggctggtcggtgatcagcgccgcgcagctgggttacgccggcaaaaccgatgcgcgcggcacctactacggcgagaccgccggttacaccaccgctcaggccgaggtgctgggcaaatatgacagcgaaggcaatctcaccgccattggcatctcatttcgcggcaccagcggcccgcgcgagtcgttgatcggcgataccatcggcgatgtgattaacgatctgctggccggcttcgggccgaaaggctacgccgacggctacacgctgaaggccttcggccagttgctgggcgacgtggcgaagttcgcgcaggcgcacgggctgagcggagaagacgtggtggtcagcggccacagcctcggcgggctggcggtcaacagcatggcggcgcagagcgacgccaactggggcggcttctacgcgcagtccaactatgtcgccttcgcctcgccgacccagtacgaagccggcggcaaggtgatcaacatcggctacgagaacgatccggtgttccgcgcgctcgacggcaccacgctgaccggggcgtcgttaggcgtacacgatgcgccccatgcctccgccaccaacaatatcgtcaacttcaacgaccactacgcgtcggacgcctggaacctgctgccattttccattctcaacattccgacctggctgtcgcacctgccgttcttctatcaggacggcctgatgcgggtgctgaactccgagttttattcgctgaccgacaaagactcaaccatcatcgtctccaacctgtcgaacgtgacgcgcggcaatacctgggtggaagacctgaaccgcaacgcggaaacgcacagcgggccgacgtttatcatcggcagcgacggcaatgatctgatcaagggcggcaaaggcaacgactatctcgaggggcgcgacggcgacgatatcttccgcgatgcaggcggctataacctgatcgccggcggcaaaggccacaatatcttcgatacccaacaggcgttgaaaaacaccgaggtcgcctacgacggcaacacgctttacctgcgcgacgccaaaggcggcattacgctggcggacgacatcagcaccctgcgcagcaaagaaacctcgtggcttatcttcaacaaacaggtggaccatcaggtgaccgccgccggattgaaatcggactctggcctcaaagcctatgccgccgccaccgccggcggcgacggcgatgacgtcctgcaggctcgcagccacgatgcatggctgttcggcaacgccggcaacgacacccttaacggccacgccggcggcagcctgaccttcgtcggcggcagcggcgatgacatcctgaagggcgtcggcaacggcaataccttcctgttcagcggtgactttggccgcgatcagctgtatggcttcaacgccaccgataagctggtgtttgtcggcaccgaaggcgccagcgggaatatccgcgactacgccacgcagcaaaacgacgatctggtgctggccttcggccacagccaggtcacgctgatcggcgtctcgctcgatcacttcaacaccgatcaggtggtgttggcctaa

SEQ ID NO: 423063 - DNA, 522 bp, Serratia marcescens
atgaaacgttattggtatgcagcgctcggcatgatggcgtgtggtgcggctcaggcggcgacaaccgacgtcgagatgcacctggtgaccgggcaggggatcggtcaggacatcggcaaggtggccatcagcgaaacgccgtatggcctgctgttcacgccgagcctgaaagcattgccggccggggtacacggcttccacgtgcatgagaaaggcagctgcgagccgggcatgaaggacggcaaagcggtggcggcgctggcggccggcggacatttcgacccgcaaaagaccggaaaacacctcgggccgtatgccgacgggcacctgggtgaccttccggccatctatgtgaccgccgacggcatggcgaactatccggtgttggcgccgcggctgaaaaaaatcagcgacattgagggtaaagcgctgatggtgcacgccggcggcgacaaccattcggatcatccacaaccgctcggcggcggcggagaacgcttcgcctgcggtgtgatcaagtga

SEQ ID NO: 423064 - DNA, 2031 bp, Serratia marcescens
gtgaacctgccttttttggagtggagccgcaccccctggggtaaggcgaccggcggccaatggcgctatgcgctgcgcaactcactggcgatgtgtctggcgctatgggtagccttcgtgctcgaactcgacgaaccctattgggcgcttacttccgccgcggtggtgagcttccccaccatcggcggcgtgatcagcaaaagcatcggccgcatcttcggcagcctggtaggcgccgccgcgtcggtggcgatcgcaggccactgcctgaacgatccctggctgtttacgctgtttatcgccgcctggatcgggctgtgcacctatgtctccaaccattaccaaaacaacgtctcttacgccttcgcgctggcgggctataccgccgccatcatcgccttcggcacggtcaacgtcaccgatacccagcaaatcttcgatatcgcgcaggcgcgggtttgcgaagtgatcaccggcattctatgcggcgggttgatgatgatgatcctgcccagcacctcggacggcgaagccctgctgacctcgctgcggcgcatgcagctgcgcctgctggagcatgccgccatgctgtggcagccggagatcaccgcgcagatgcgcacctcgcacgaaggggtcatcggccagatcctgaccatgaacctgctgcgcattcaggcattctggagccattaccggctgcggcggcaaaataacctgctcaactatctgctgcaccaacagctgcgcatgaccagcgttatctccagcctgcgtcgcatgctgctgaactggccggatcgccccgccaatctgatgccggtgctgacgcaactgctggacgagttgcgcgatcccgccaccgacaaataccgtttggcgcgcctgcttcagcagatcgccccgcaagaggctacggactaccgccatcgcgccttctggctgcggctgcgcgatttctgttggctttacctgcgctgcaaccgctggctgcggcggttggaaagcgccacggcggtcagcgatctccaaccgccgcgcgtcacttcgctggcgcgccataccgacagctacgaagccgcctacaacggcctgcgcacctttttgtgcatcgtgatcggctgcgcctactggatcaacacgcagtgggacgccggcagcgcggcgctgacgctcaccgccatcagctgcgtgctctactcttccacgccttcgccgatcaacagcgtcagcaccttgctcaaggcggtgctgctgctctcggtcgcctgctttgtggtgaaattcggtttgatgatccagattgacgacttctgggtgttctgcgccttcctgttcccgatcctggtgaccatgcagatgctcaagctgcagaatccgccttatgccgcgctctgggggcagctgatcgtctttatgggctcgttcctgaccatcagcaatccgccgagctatgactaccagtcctttatcaatgacaacatcgctaaaatcgtcggcgtgctgctggccgggctggcgtttcagatcctgcgccccagttcggacaaacgcaaaagccgccgcattatccgcgcgctgcggcgcgactttatcgatcagttgagcaaacggccgcagcagagcgaaagccagttcgaatcgctgatctaccatcgcatcagccagctcaatcaaagtcaggatcaggacgctcgcacctggctgctgcgctggggcgtggtgctgctcaactgcagccatatcgtctggcagctgcgcgactggcaaacccgttccgatccgctgtcggcggtgcgcaacgtctgtatccactgcctgcgcggcatcatgacggagaaaggcgtgcagcacagttcgctggacgccacgctgcaggagttgctgcgcatgagcaacgcgctggcgcaccacccggaacaggcggcgcgcgatctggccggcctgatctggcggctctactgctcgctgcagcagttgcaacaggcgatgggccagcccaccgccgtaccggccgttagcggcggataa

SEQ ID NO: 423065 - DNA, 864 bp, Serratia marcescens
atgcagcataaaacattaaaatacttctctacggtgatcgtctgcgccattgccgtctgcgccggttggtggctctggaattattatatgcaatccccatggacccgtgatggaaaagtgcgcgccgaactcgtcaatatcacccctgaagtctctggaagattagagaaaataagcgcgaatgacaatcagttcgtacctgcgggaagtctgatttttaccctcgacccggtgccctaccagattgcgcaggacaatgccgaggccgcggtggcaaaagcgcaatccgatctggccaaagcggaccacgaggctgcccgccgccgcggtttaccacgtaacgttatttccgctgaagatttggacgagtcaaatttagccgcgcaggcaatgaaggccgcctataaagccgccctggccaatctggaacaggccaaatggaatttgagcaaaaccaaaatttacgcgccaaccgacggttatatcaccaacctgcagacgcgggtcgggaactacgccaacgccggtacgccgctggtggcgttggtggatgtgcattcgttttatgtgctcggttatttcgaagaaaccaagctgaagcatataaaagaaggcaataaagcggacatcgttttatataacggcaacacgccgctacagggggaagtagagagcatcggccgcgccatttacgatcagagcgttgacagcagcaacgatctattaatggacgttaaacctaatgttccttgggtgcgtttggctcagcgcgtgccggtacggataaaattgctcaacgtgcccgccgatttgacgctggtcgccggcaccacctgcaccatttcgattcatcagcggaactaa

SEQ ID NO: 423066 - DNA, 432 bp, Serratia marcescens
gtggagtcaacattaggttcagatttagcacgattagttcgtgtgtggcgcgcgctcatcgatcatcggctcaagccgttggagctgacccaaacgcattgggtcacgttgcacaatatcaatcgcttgccgccggagcagtcgcaaatccagctggccaaggcgatcggtatcgagcaaccgtcactggtccgtacgctggaccaactggaggagaaagggctgatcacgcgtcacacctgtgccaacgatcgccgcgcgaagcgcatcaagctgaccgaagcggccgatccgatcatcagggaagtggacagtgtgatcacgtctacgcgcagtgagattttaagcggcattaccgccgacgaagtgcatctgttggtagggctgattggcaagttagaacaaaatatcaccgaactgcagaacaaataa

SEQ ID NO: 423067 - DNA, 465 bp, Serratia marcescens
atgatcaagcgtcttctcgtcgttgccgtcgccgccgttacgctggccggctgtgccaatgaatccatgtccggtgatgtctactcgtcctcgcaggccaagcaggtgcagaccgtcacctacgggacgctggtttccgtgcgtccggttaaaattcagggcggcgaaggctccaacgccatggggatgatcggcggcgcggtgattggcgggctgttgggcaacaccgttggcggcggcaccggtcgtacgctggctaccgcggcgggcgctatcgccggcggcgcggcaggtaacagcatcggtgaagtggccggccgtacctccggctacgagctggagatcaaaaccgaccagaaagagaacatcgtggtggtgcagaaagcgggcgacaccaagttcagccctggccagcgcgtgcgcatggcgcgcatgggcgacaccatcaccgtttccccgctgtaa

SEQ ID NO: 423068 - DNA, 1122 bp, Serratia marcescens
atgaagtcaggccgctatataggcgtcatgtccggcaccagtctggacggaatcgatgtggtattggccgcgatcgacgatcgcatggtggcgcagcaggccagctatagccatccgatgccgatggcgttgaaaaaagagatcctgggcatgtgccaggggcagcaaaccacgctggccgccgtcggccggctggacgcgcgactgggcacgttgttcggcgaggcggtgctcggcctgctgaagcaaaccggcatcgacgcggagcagatcaccgccatcgggtgccacggccagacggtgtggcacgaaccggagggtgacgcgcgtttctcgatgcagctcggtgataacaaccgcatcgccgcgctgaccgatatcaccaccgtcggcgatttccgccggcgcgacatggcctacggcgggcagggcgcgccgctggtgccggcgttccatcaggcgctgctggggcatcccgtcgagcggcgcatggtgctgaacgtcggcggcatcgccaacctttctctgctgttgcccggtacgccggtgcgcggtttcgataccgggccgggcaacatgctgatggacgcctgggtatggcgccaccgcgcgcagccttacgatcaggacggcggctgggcgatgcaggggcgagtctgcttgccgctgttgcagcagatgctggcggatccgtacttcgcgctgccggcgccgaaaagcaccggccgcgagtatttcaatatcgcctggctggagcggcagctggccggattgccggcgattgcgccggtcgacgtgcaggccacgctcacggagctgaccgcggtcagcatcagcgagcaggtattgctggccggcgggtgcgagcgcctgttggtctgcggcggcggggcgcgcaacacgctgctgatggcgcgcctgtcggcgctgctgccgggcacggaggtcgggctgaccgacgattttggcgtcagcggcgacgacatggaggcgctggcctttgcctggctggccttccgcacgctgtccggccaggccggcaatctgccttcggtgaccggcgccagccgtgaaacggtgttgggtgggatttatccggttttgccattgggggcccgttag

SEQ ID NO: 423069 - DNA, 303 bp, Serratia marcescens
atgaaaaaagtcattttcgtcgccggcgcgctggcgctgtccggctgcagctacatcctgccgcaaagcagccagacgatgcactaccagtgcggcaccacgccgctgacggtggcgcttgacggcaaggcgagcgaagtcagcctgctgatggacggcgaacagctgcatctcaagcaggtgctggcgctgaccggcgccaaatacagcgacggcaaatacactttttggtcgaaagaccgtaacgcctatcttgagcgcaacggcaaggtagtcatgagcgactgcgtgttgacggagtga

SEQ ID NO: 423070 - DNA, 747 bp, Serratia marcescens
gtgaaggtcgacggcggcgtcggagcgattgagttcctgacgccgcaggcgcagaatgtaacgacggattttttcagttggtcgataacccagatgattgaaaagagtgagtttgatgttgcggacctgcgccgtgaatacacccgaggcggcctgcgccgcaacgatctgaccgccaacccgctcgaactgttcgagcgttggttgaaacaggcctgcgacgcgcgcctggccgatcccaccgccatgtgcgtcgcgaccgtcgacgaacacggccagccttatcaacgcatcgtgctgctgaagcatttcgatgagcaggggctggtgttctacaccaacctcggcagccgcaaggcgcagcagctggcgcacaacccgcatatcagcctgctgttcccctggcacatgctcgatcgccaggtgattttcctcggccaggcggagcgcctgtcgaccctcgaagtgctgaagtatttcaacagtcggccgaaagacagccagatcggcgcctgggtgtcgcagcagtcgtcgcgcatttccgcgcgcggcgtgctggaaagcaaattccttgagctgaagcagaagttccagcagggcgaggtgccgttgccgagtttctggggcggattccgcgtgaaatttgactccgtcgagttctggcagggcggcgcccatcgcctgcatgaccgtttcctgtatcagcgggacgggaatgactggaaaattgaccgactggcaccctga

SEQ ID NO: 423071 - DNA, 1275 bp, Serratia marcescens
atggcaagcagcaacttgattaaacaactgcaagagcggggcctcgttgcccaggttacggatgaggaagcgttagcggagcgactggcgcaagggccaattgcactgtattgcggtttcgatccgaccgctgacagcttgcatttgggccatctggttcctctgttgtgcctgaagcgcttccagctggccggccacaagccggtagcattggtgggcggcgccaccggcctcatcggcgatccgagcttcaaagcggcggaacgcaagctgaacaccaccgatacggtgaacgagtgggtcgagaagatccgcaagcaggtttccccgttcctcgatttcgactgcggtagcaacagcgctatcgcggccaacaactacgactggttcggcggcatgaacgtgctgaccttcctgcgtgacatcggcaagcacttctccgtcaaccagatgatcaacaaggaagcggtcaagcagcgcctgaatcgcgacgactccggcatctccttcaccgagttctcttataacctgctgcagggctacgatttctccgagctgtataaccgccaccaggtggagctgcagatcggcggttccgatcagtggggcaacatcacctcaggcatcgatctgacgcgtcgtcagcaccagaagcaggtgttcggcctgaccgtgccgttgatcaccaaagcagacggcaccaagttcggtaaaaccgaaggcggcgcggtctggctggcgccggaaaaaaccagcccgtacaagttctaccagttctggatcaacaccgccgacgccgacgtttaccgtttcctgaagttcttcaccttcatgagcctggaagacatcaacgcgctggaggaagaagacaagaacagcggcaaggcgccgcgcgcccagtacgtgctggcggaagaagtgaccggcatggtgcacggtgcggaaggcctggcggccgccaagcgcatcactcagagcctgttctccggcgcgctgcacgacatgaccgaagcggacttcgcccagctggcgcaggacggcatgccgaccattaaactggagcgcgacgccgacctgcagcaggcgctggtgaatgccgaactggtgccgtcacgcggccaggcgcgcaccatgatcggctccaacgcggtgaccatcaacggcgagaaacaatcggatgccgaataccgcttcagcgatgcggaccgtctgttcggccgctacacgctgctgcgccgcggcaagaaacactactgcctggtggattggcagtaa

SEQ ID NO: 423072 - DNA, 3105 bp, Serratia marcescens
atgagtttattgtcgtcacaacaggatgtggccatccttttttacgccacgctcggtaaaaaagccgatagcgccgccttgaacttctttgcccgccagctggaatcggggcagtacagcagagatcaactggcagaaaaattcatccagtctcaggatggacatcatcgctacgatggcctgacaacatcgcaaaaaattcaatacatctataaaaatacgacaggcgcggatccagcgcccgcagtgctggccacgctggtcgcgcaagccaatgcaggaaaaacgctggggctgataaccaaggatctcatcgccggcgtgaaaagctatatgggcgacgctgcggcaccggtcgcacagcaacagcatctgtttgatattattgatacaaccttacaccccgctttgtccccctatcccgccaacgccgaagcggcagccgatattcaagctctgttttacatcgtaggcagccttgcggtggcggaaggcgtcaattactggagccaggttctggcgacgggaaaagccgacgccagctatatcgccggccgtttcgtcgagacgcgcagcgcgttgaccacgttaagtaatgaagacttcgtcaaaaccgtctataaaaatacgttcggcgttgatgcaggcgcaagcgagctcgccaattacgtcaccgggttgaataatcataccgaaacgcgcggcgacgtcatcatgcgtctgatcgccgatattcgtaacgacactgcccatggcgcagccaaacaggcttttcttaatgctacccatgtctacgctgcgggtgagatggctgcgacccactatcaggaaagcgtagcgctgctctttctgcaactcgggaaaaaggccacgctggaatcaaccgggttggacagttacagcaaattcctcgccgcgggaaattccgagcttgatctgctgaccattctggctaaatcctcccccttcaaagatgccgcagacttcgccagggtttatcacgaactgtattacggcccggcgctgagcgaactgcaaaaacaggcaattctgctcaaagccggcaataatccgctgcaggcgacgctgaatattttgcatgcgttccgcaacggggaagcgccgctggagggcggagtcagccccagtcacgagcaactcgtcaatctcgaatacaaaattggcagcgagctggggtatcagatccgtggcaacgtcacgatgtcgaatgccgacggcgccctcaacggcagcctgaataccggtaagcaacatacgttaagtcatgcggaaatcagccaactgcgcgagatcactcttaacgcggaggtcggctccgcggtcgatctcagctttgccaaatcgttgcaaaaagtcacgctgcagggcgattttgccaccaatgacgcaatgctacagtcgctgagaaacctgaatatcactctcattcttagcgagggcaatctgctgaacgcccccgaagggattaactttaccaacgttaagaacagcaccgtcgtcgccgaccggctcgatatgacgacggcagccgcgcaaatcaatctggccgccgggaaacatcagcttgtctggcaaggcaatgccacagccgacagcggcaatagggtcagcagtgatttcaaagcgacggcgcttaatagcgatcccgagacatcttactacagtgtctcagccaattttttcaccaaggtcgtccacctgacggccagcgccggcggtggctatgatgctgaaatcacaaataacgttaatcagttcctgtacttcaactatgtagatttgacccattatcgcggtaccggagagatttatcttaacgggcagcgggtcgccactgaaggcaacaaggtctttgactttgggttgttcacgcaagaagcgaccgtctcccatccgatttacggcaacatcaactcgctaaaacaaggcgaaatggcgcagcccaatgcttcgcaaaacactacgggatcggctgggggggtaattacggcctactccggagatttaacgctgctcaacgtcagcagcgggcaatttaccctcggcggcgacttgaccgcgaaaagtcgtatccatatcagcgatacgacgcaaagcgacgacagctttaaattgttctttaccgatgcggctagccatacggtaaccaatctcaatatgggtactttcagctttacatcgaaccataaagaaacgctcgaaatccgtatgggcagcaacctcgacattgtgcaaaatcgcacgttgaccctgagcggcggggacaactcgattagcacgttgatgctgagcggctatatgtacacaggcgataaaccgctggtgcttaatctgaccgtcgccgcagattttagcgataacctgaagaccatcataggcagcgaatttaccgatgaacgccgttattactccgacatgaagctgtacctcgtcgcagaaaaaggcggcaccggcggcggcgctttctacaacacgctaaacacgctggccaataaagacgatttcgcccatgtcattgccgaacttgccggcgaccagttaacggtcgaccgcaccggattgaccgtctataaagccgacgttaagggcaacacgacgctggatagcgccggtgcgttacattttaccgatagcaaaatagacaatatggtcacgcttaataccggctatgccaacagcgtcatctccgtgggagaaaccgataacccatgggttttctccatgacaggagacaagaccgcaaccttgtacggcagcgccactacccaagctgagttacaaaatgcgttcagtggcctgaatgcgacggacaatgcccaagcgctgttctcgcaggttctggcgaagatgaccaacggcgccagcgccaacaacctggcggaagtcggattgctaaagttggacaaatcgctctatgtcatcgtggataacaatcataaccaaacgtttgacgccgatgatgtggtgttctcgatcggcaatcaggatccctatttggctgccgtctctctgcactaccactcgccagccattaccgtgaacggtgttgcggccgaaaactcgctgccggaggcgtttgcctaa

SEQ ID NO: 423073 - DNA, 861 bp, Serratia marcescens
atgaaaaacattctttctatccagtcgcacgtggtgtttggtcacgccggcaacagtgcggctgaattcccgatgcgccgcatgggcgtcaatgtctggccgctgaacacggtgcagttctccaaccatacgcaatacggccagtggaccggctgcgtcatgcctgccagccacctgaccgagatcgcgcagggtattgccaatatcgagcagctgcaacgctgtgatgcggtgctgagcggttatatcggttcgccggagcagggtgaccatattctggagattgtgcgtcaggttaagcaggcgaacccgaatgcctggtatttctgcgatccggtgatggggcatcctgaaaagggctgcatcgtggcgccgggcgtggccgagtttcactgccgccaggcgctgccgtgcagcgacatgatggcgccgaacctgctggagttggagatgctgagccagatggccgtcgccaacgtggccgatgcggtgcaggccgcccgcgtgctgatcgccaaggggccgcggctggtgctggtcaagcacctggcccgcgccggctatcacgccgactgcttcgaaatgctgctggtgacggcggacgaggcctggcacatcagccggccgctggtggacttcggcgcgcgtcaaccggttggcgtcggtgatttgaccagcggtctgctgctggtggatctgctgaagggcgaggcgctggacaaagcgctggagcacgtgaccgccgccgtgtatgaggtgatgctgaccacgcaggagatgggcgaatacgaactgcaggtggtggcggcgcaggatcggatcgtgcagccgctcagcgaattcaaagcggtaaagctgtaa

SEQ ID NO: 423074 - DNA, 606 bp, Serratia marcescens
atgaaactgttctataaagccggcgcctgttcgctgtccccgcatatcgtgctacgtgaggcagggctggattttacggcggagaaggtcgatctggcgcagaagaagaccgagagcggcgccgattacctcgccatcaaccccaagggacaggtaccggcgctgctgctggatgacggcagcctgctgacagaaggcgtggcgatcgtgcaatacctggcggaccgcgtgcccgatcgcaacctgatcccggcggcgggcaccctgtcgcgctaccacgcgatcgaatggctgaactacatcgccaccgaactgcacaaagggttcagcccgctgttcaacccgaaaacgcccgaggaataccaaaccatcgcgcgcgccaagctggagcagcagttcagctatctggattcggtgctggcgaagcagcacttcctgttgggaagccgtttcagcgtagccgacgcctacctgttcaccgtgttgcgttgggcgttcgccctgcagttcgacgtgcgcaagcacgcccatctggcggcctggttcgatcgcgttgcggcgcgcccggcggtagatgcggcgctgaacgccgaaggattgaagtaa

SEQ ID NO: 423075 - DNA, 885 bp, Serratia marcescens
atggcctcattttcgggtatttgggtggcgatggttacccctttcaatcacgatgccgtcgatttgccggcggtgaaacgcctggcgcggcacctgctcgacgccggcatcaatggcctggtggtctgcggctccaccggtgaagccgccgcgctgaacaaagaagaacagctggcggtgctcgacgccgtgctggaagtggcgcccgcacaccaggtcgtgatgggcctttccggcaataacatggccgccacgctgcagatgcagcaggccattcagctgcgcgacatcgccggcgtgctgatcccggcaccttactacattcgcccttcgcaatgcggcctgatcgattatttcacccagttggccgacgcctccagcgtgccggtgatcctgtacaacattccgcagcgcaccggcatcgccatggagctggccacattgcgccggctcgcgcgccatccgcgcatcaccgccatcaaggactgcggcggcaatcctgacgccaccatggcgctgatcgccgacggcgaaatcgatgtgatgaccggggaagacaatctgatcctcaccacgctgtgcctcggcggcaccggcgccatctccgccgccgcgcatgttcacccggaacgtttcgtgcagctggtgcagcaggtcgccgccggcgatttggccgcggcgcgcagcaacttctatgagctgctgccgatgatccaccagatgttcagcttcccgaatccggcgccggtcaagacggtgctggctcagcagaggctgatcgccaacgagctgcgctcgccgatgcaggtagcgccgcaggcgttgcaacagcagatcgccgcaacgctgacgcagctgcagcccgccgaggcgatcatcggttaa

SEQ ID NO: 423076 - DNA, 264 bp, Serratia marcescens
atgaaaaagttgacgttgaaagagatgacggaaagcgaacagcgggaagtgaaaaccgaactggacaaggcgcgcaagagccacggcaggccgctgaccaacgccgaacagcacaaggtcaaggatgaagtggtggcgcgcatcatggccgccagagcgaagctcgccaaggcggagcgtgcagaacgtaagtccaaccgctatcggccgagcggcgacaccttcagttggtccgccaccatcggctcccgcccgccgcgctga

SEQ ID NO: 423077 - DNA, 666 bp, Serratia marcescens
gtgtctttaccctcgatgacgcaagagctgttacaacctttttccccctaccaggcgctggcgcaaacgctgttgccgctcaccctcgagtcggacgacggttcgcatgacgtggcgcatctgcaccgggtctggaagaactgccgccggatcagcaagctggaaggcggcgaccggcgcattctctgtgcggcggtgctgctgcacgacgccgtcgcggtggaaaagaattcgccgcagcgccatctggcctcacgcatggcggcggagcaagccacgctgacgctgacccggctggaatgggcgccggcggatatcgcggcggtggctcacgccatcgaagcgcacagtttttccgccggcattcccccgcaaacgctggaggcgaagatcctgcaggatgccgatcgcctcgacgccatcggcctgatcggcgtggcgcgctgcttctatatcggcggccgcatgcgcagcgcgctgtacgacgccgccgacccgcgggccgagcatcgccaatacgacgacaagcgtttcagcctggatcacttcgaaaccaagctgttcaaactgcaagacggcttccagaccgccgccgggcggcacatggccgagcagcgcaccgaacgcatgcggcgctttgtcgacgatctgctggaagaggtgtaa

SEQ ID NO: 423078 - DNA, 393 bp, Serratia marcescens
atgccaacccctcttgaaatagtgcgcgcaacctatgaaggcagctccgaagaaaacggccgtaatctgctggcggcgctggcccccgatgccgagtggaccgaagccgccggtttcccctacgccggtacctatatcggcccggagaacatcatcaagaacgtgcatcagcgcctgggcagcgaatggcaaggttaccgcgccgatgtcgaccacttttacgacgccggcgacaatgtgatcgctcaaggtttttatcacggcacctaccgggccaccggcaaatccttcaacgcctcttttgcgcatatttatacgctgcgcggcggcaaaatcgtgaagttcgtgcagattgtcgacagcgccaaagtgctggaagcgatgcagccttaa

SEQ ID NO: 423079 - DNA, 270 bp, Serratia marcescens
atgcagcaaaaaccggtgttggacgaagccagacagttaaagcgactcaacgccgccacgcggcgtcaatcccatatgtataaatggatcgcgctgattgcggcgctggatgcgctgttggtgttttggtatgaccgggatatgcgcaacgtcaccttctcgggagcggttgcgctggtgtgcggctatctgtggatccgcgatcgcaacaaggcccggggttaccggcgcgagttcgaccgcaaattcggcaagcgcagcggcgattaa

SEQ ID NO: 423080 - DNA, 381 bp, Serratia marcescens
atgaacgataaaacggcacgcccgcaggatgtggttcagcaacagcttgacgcctataacgcccgcgacatcgacgccttcatggcctgctgggcggacgacgcgcagtattacgagcatcccgacacgctgctggccagcggcaaggcggcgatccgcgaacggcatctggtgcgtttccaggagccgagtctgtacggtgaacggataaaacgcatggcggtggggaacatggtggtcgatcaggaagtggtgacgcgtaacttcccgcaggggcgcggcaaaatggatgtcatcgccatttacgaagtggaacaggggcggatcgccaaagcctggttcaagatcggcccctgcgtgccggatgagggcgcgctctag

SEQ ID NO: 423081 - DNA, 381 bp, Serratia marcescens
atgacattattaaaacgcacgaattatccgcagttgcctacgccgggcggcccctatgtgcatgcggtgcgccacggcgatcgcctgtacgtgtcgggattgacggccttcgccaccgacgcgcaaggcttgagcgcgccggagcaaacgcaagagatcctcgagcagttagccactatcgccgcaagcgaaggcgttaatcttaaagcgttgattaaaatcagcgtgttcctgaccgacatcgccgatctggcgggcgtgcgcccggtgctgtttgactatttcgatggcgcgctgccggcctgttcactgatggcggtcagcgcgttgttttcaccgcaggtgtgcgtagagatagaagcggtgatggcgttgcaataa

SEQ ID NO: 423082 - DNA, 855 bp, Serratia marcescens
atgaacccgctttttactccctacctgcaacgctggcaactggaacaggacggcaaagccttcgaaacccacagcagtctgctgatgccggtgcgttaccggggcgaggcggctatgttgaagatcgcccgcgagcaggaagagcgcttcggcggccagctgatgtgctggtggcgcggggaaggcgccgcgcaggtgctggcgtggcatgacgacggcattctgctggagcgcgcgcagggtgaaggttcgttggcgcagctggtgcgtgacggcgacgatgagcaggccacgcaaatcctgtgcggggcgatcgccgccttgcatgcgccgcgagcggaaccgttgcccgagctgatcccgctgcaggaatggttcagctcactgtggccggcggcgcaggcgcacggcggcatgctgcgtctctgcgccacggcggcggcggaattgctgaacagcccgcgagaagagagcgtgttgcacggcgatattcaccatgacaacgtgctggacttcggcgaacgcggctggttggcgatcgatcccaagcgtttgtatggcgaacggggcttcgactacgccaatatcttctgcaatcccaactatggcatcgccaccgatccggccattttccagcgccgcgtggaacaggtctgtcgcttggccgggctggagcgccggcgcttgctgcaatggatcctcgcctggtcggggctgtccgccgcctggttcatggaagacgggcaggcggcggacatcgactttcgcgtcgccgagctggcggcgcgcgcgctggatctcccgctgccgggcggcgactcagggttcatcctgccagtaatcgagcgaggttga

SEQ ID NO: 423083 - DNA, 504 bp, Serratia marcescens
atgactgagaaagctgcgctgttgactcagcgcctgatacgtaatgtcgaacgggtagataagcggcacgatcggcggccgccgctgtatgacagcgtcggcactcgcctcggcaccggcaccgccgccgacaagctgggcgcctctttcgattgtgtcgcgccgggtatgcgctcctgcccctaccattttcactacgctcaggaggaaatgttcatcattctggaaggcagcggtacgctgcgggtggccggagaaatgctgccgatcgtcagcggggatgtcatcttcattccgccgggcccggaatacccgcaccagatcatcaacacctcagatgcgccgctgaagtacctgtccgtcagcacgcgcgagcagccggagctggtgatgtacccggattccggcaaataccaggcgatggcgcgcggcgcagacggccagcaggtgcgctacctgcagcgcccttcaacctcgctcgattactggcaggatgaaccctga

SEQ ID NO: 423084 - DNA, 1188 bp, Serratia marcescens
atgcgcccagccctctccctgcgccatctgaccctgcccgccgtcatggccggctttgtcgccgtcctggtgggttacaccagctctgccgcgatcattttccaggccgccgccgccgcgggcgccacgccggcgcagatcggcggctggctgagcgcgctggggatcgcgatgggcgtcacctcgctcggactctcgctttactaccgtaccccgatcctcaccgcctggtcgacgcccggtgcggcgctgctggtcaccagcctgcccggcaccccgatcaacgaggcgatcggggtgtttatcttcgcttctggtctgatcctgctgtgcggcgtcaccgggctgttcgcccgcctgatggactacattccgcaggcgatttccgccgcgatgctggcggggatcctgttgcgtttcggtctggacgccttcgcttcgctgcagctcaatttctctctgagcgccggcatggggctggcctatctactcagccgccgttatcaaccgcgctacgccatcgtgctgacgctggcgaccgggctggcgatcgctgcgctgcagggcaatatccagctgacacagcatgcgccggcgttcgccatgccggaatttatcgcgccgcacttcagctggccgacactgctgggcatcggcgtacccttcttcgcggtgaccatggcttcgcagaacgctcccggcatcgccacgctgcaggcggcgggctaccgcgtgcctacgtcaccgctgatcgcctggacggcgctgaccgcgctgctgctggcgccgttcggcggcttctcggtgtgcatcgccgcgatcaccgccgccatctgcatggggccggacgtgcatcccgatccgcagcggcgctatatgggcgcggtggccgccggcgttttctacctgctggccgggctgttcggcggcgccatcggcctgctgttcagcgcgttaccggtcgccttgatccacaccatcgccgggctggcgctgctcggcaccatcggcggcagcctgcaacgcgcgctgcatgatgaaaaacagcgcgacgcggcgctgatcgccttcctcatcaccgcctccggcgtcacgttgctcggcatcggttcggcattctggggcattgtcggcggcgccatcgcgcatctgctgctgtcgctgccgtggcgaaccaccgtgacgtaa

SEQ ID NO: 423085 - DNA, 564 bp, Serratia marcescens
atgcaggaacttgccggccatttggcacacacccttcgcacgctgcgcgcgcagcgcggctggagcctgacgcaggcggcggaatacaccggcgtcagcaaggcgatgctcgggcagatcgaacgcggcgaatccagcccgacggtggcgacactgtggaagatcgccaccggtttcaacgtggcgttctccgcctttcttgaggcgtcgcccgcgcagcagcaggcgacgctgcaccgctacggcgatctgccggtgtacgatcaggacaacgccgatatgcgcgtggtgccgctgtttccgtacgatcgccagctgggtttcgatatgttcgtcatcgatcttgcaccgggcgcgctcagcgagtcgtcgccccatgagccgggcgtgatcgagcatgtcatcgtgatcagcggccggttggagttggcgatagacggcgaatggcacagcctggctgccggcgaggcgatgcgctttcaggccgatcggccgcacgcttaccgcaacgccagttcacaaacggtgcgtatccacgatctgatccactatcctcaatcctga

SEQ ID NO: 423086 - DNA, 2094 bp, Serratia marcescens
atgacttcattacccaacagtatccgcctggcgatggcggcggaaggcggcgcggccgccggcgatgaattcctgtggctggaagagctgcagggtaaaaaagcgctgcaatgggtgcagcaggaaaatcagcgcaccgtggcgcgtttcggccagggcgaagactttcagcgcattgagcgcgaggtgctggatatcctcaataaagacacccaaatcccgtgggtgagcaagcgcggcgagtactattacaacttctggcaggatcaggccaatccgcgcggcctgctgcggcgcaccacgctggacgagtaccgcaaggccaaaccggcctgggagacggtgctggatatcgatgcgttgggcaaggcggaaggcaaggattgggtctatcagggctcgcaaccgctggcgccggaataccgctattgcctgatgcagctgtcgccggacggcggcgacgccaccgaaatccgcgaattcgatctggtggccaaacgcttcgtcaaggacggcttcaacgtgccggtggcgaaaagccgggtttcctgggtcgatcgggacacgctgttcatcgccaccgatttcggccccggctcgatgacccagtccggttacgcgcgcatcgccaaacgctggcggcgcggcacgccgctgagcgccgccgaaacgctgtacgaagcgcagcccgaggacatggcggtcttcgcctatcacgatcgcacgccgggctttgagcgcgatttcgtcggtcgtagcctggacttctatcgccgcgactatttcttgctggctcaggacggccggcagaaaaaaatcgatatcccggccgacgcagagctggacacgcatcgggaatggctgctgatcaaaccgagcagcgactgggaggtgggcggcaagcgttatccgtccggcgcgctgctggcggccaacttcgatgactatctggcgggcaagcgcgagctgcagctgttgtttaccccgacggcggagcaggcgctgagcggctacagcggcacccgcgatcatctgatcctcagcatcatggataacgtggtcaaccggctggaagtgctgacgccgcagggcggcagctggcaacgtcgcccgctgggcaaccccggcgccatcagcaccatttccgccggcggcatcgacgaagagagcaacgcctatttcctgaccgtcagcgggttcctgcagccgacctcgctgtacatgggcaatctcgacggcggtgaggcgacgctgctgaaacaggcgccgcaggattttgacgcgtcaggctaccaggtgagccagcattttgcgcgttccaaggacggcacccgcgtgccgtatttccagattgccgccaaagatctcaaaccggacggcagcacgccgacgttgctgtatggctacggcgggtttgaagtgccgctgctgccgggctatctcggcggcaaggcgccggcctggttggagcgcggcggggtgtacgtggtggccaacatccgcggcggcggcgaatacggcccggcctggcaccaggcggcgctcaagcagaaccgccatcgcgcctacgaggatttcgccgccgtggccgaagatctcatcgcacgcaaggtgacctcggcgccgcatttgggcgcgcgcggcggcagcaacggcggcctgttggtgggcaatatgctgacgctgtatccgcagctgttcggctgcatcgtctgcgaagtgccgctgctggacatgcagcgttatacccagctttccgccggcgcgtcgtggatcgccgaatacggtgacccgagcaagccggatgagtgggcttatatcaaaaccttctcgccgtaccacaacattcaggcgaaaacggcctatccgccggtgctgttctataccgccaccagcgacgatcgggtcaacccggcccacgcccgcaaaatggccgcgcgcatgcaggcgatggggtatcagcaggcctatttctatgaaaataccgaaggcgggcacagcgctgccgccgacaagcaacaggcggcgttccacagcgcgctggtaagcgaattcatgtgggccaacctgagcggcaaacccaagtcagcgtaa

SEQ ID NO: 423087 - DNA, 1515 bp, Serratia marcescens
gtgtcaacagcaaacaaccaacatccggagagcgttagccttaacgcgttcaaacagccgaaagcgttctatctgatcttctcgatcgaactgtgggagcgtttcggctactacggcctgcagggcatcatggcggtttatctggtcaagatgctcggcatgagcgaagccgactccatcaccctgttctcttccttcagcgccctggtatacggcttcgtcgccatcggcggctggctgggcgacaaagtgctgggcgccaaacgcgtgatcgtgctcggcgcgctggtgctggccgccggttacgccatggtggcctactccggccacgacatcttctgggtctacatgggcatggcgaccatcgccgtgggcagcggcctgttcaaggccaacccgtcctccctgttgtccacctgctatgagaaagacgatccgcgtctcgacggtgccttcaccatgtattacatgtcggtgaacatcggctccttcttctctatgctggccactccgtggctggcggcgaaatacggctggagcgtggcattctcgctgagcgtggtcggcatgctgatcaccctggtcaactttatgatgtgccgcaagtgggtgaaggaaaacggttccaagcctgacttcaagccgctgcatctgccgaaactgctgatggtgctggttggcatcgtggcgttgatcgccgtgtccagttggctgctgcacaaccaggtgatcgcacgctgggcgctggctctggtttccgccggcatcgttctggtgttcgccaaggaaaccttcgccctgcacggcgccgctcgccgtaagatgatcgtcgccttcctgctgatgctggaagcggtggtgttctttgtgctgtacagccagatgccaacctcgctgaacttcttcgccatccacaacgtggaacacagcatcttcggcgtcgccttcgagccggagcagtatcaggcgttgaacccgttctggatcatgctcgccagcccgattctggccgcgctgtataacaaaatgggcgatcgcctgccaatgccgcacaagttcgctttcggcatgatcctctgctcctgcgccttcctggtgctgccgtggggcgccagcttcgccaacgaacagggcatcgtgtcggtcaactggctgatcctgagctacgcgctgcagagcatcggtgagctgatgatttccggcctgggcctggcgatggtggcgcagctggtgccgcagcgtctgatgggcttcatcatgggctcctggttcctgactaccgccgccgccgcgctgatcgccggtaaggttgccggtctgactgccgtcccaagcgacatcaacgacgcgcacgcttcgctggccatctacagccatgtgtttatgcagatcggtatcgtcaccgccgtcatcgctatcctgatgatgctgaccgcgccgaagctgtaccgcatgacgctggacaccaccgaagacgccaatcagaaagcgcaggaagccaccgcggctcgctga

SEQ ID NO: 423088 - DNA, 642 bp, Serratia marcescens
atgaacaagcagaagcgactggaaattctgacccggctgcgcgacaacaacccgcacccgaccaccgagctggtgtacaccacgccgtttgaactgctgatcgcggtattgctgtccgcacaggccaccgacgtcagcgtcaacaaggcgaccgccaagctttatccggtcgccaacacccccgccgccatgctggcgctgggggttgatggcgtcaaggagtacatcaagaccattggcctgttcaacagcaaggccgaaaacgtgatcaaaacctgccgcatgctgctggagctgcacggcggcgaagtgccggaagatcgcgccgcgctggaagcgctgccgggcgtcggccgcaagaccgccaacgtggtgctcaataccgccttcggctgggcgaccatcgccgtggacacccacatcttccgggtgtgcaaccgcactcacttcgcgccaggcaagaacgtcgatcaggtggaagagaagctgttgaaggtggtgcccgctgaattcaaggtcgattgccaccactggctgatcctgcacgggcgctacacctgcatcgcgcgcaaaccgcgctgtggctcctgcattatcgaagacctgtgcgagtataaagaaaaggtttatccggaatcctga

SEQ ID NO: 423089 - DNA, 699 bp, Serratia marcescens
atgagtgaagccaaagaattgatcgtccaggggttgtggaagaacaactccgccctggtgcagctgctgggcatgtgcccgctgctggcggtgacctccaccgtcaccaacgcgctcggcctggggttggccaccaccctggttttggtcttgaccaacgcctcgatttccgcggtgcgccgctgggtgccgagcgaagtgcgtattccgatctacgtgatgatcatcgccgcggtggtgagcatcgtgcagatgctgatcaacgcctatgccttcggtttgtatcagtcgctcgggatctttattccgttgatcgtgaccaactgcatcgtggtcggccgtgccgaagcggtggcggcgcgaaaaccggtcggcctctcggcgctggatggtctggccatcggcctcggcgccaccggcgtgatggtgacgctgggctcgatgcgagaactgttgggcaacggcacgctgttcgatggcgccgaccagctgctgggcggctgggccaagtcgctgcgcatcgaagtggtgcatttcgacagccccttcctgctggccatgttgccgccgggcgcctttatcggcctggggctgctgctggctgtcaaatatctgatcgacgaaaaaatgaaggcgcgcaaagcccgcgccgtggcggtggaaccgctgctggaacaaggacgtgctgagaaggcctga

SEQ ID NO: 423090 - DNA, 630 bp, Serratia marcescens
atgctgaattccatgagaaagcacggcaccacgctggcggtgttcgcggcggtcaccaccggcctgactgccgtggtctataccttgacgaaaggcaccatcgcccatcaggcggcgctgcagcaaaaagcgttgctcgatcaggtggtgccgccggaaaactacgacaacattatgcagaacgaatgcctcctggtcagcgatccggcgctgggtgacggcgcgccgcaccgcttgtacctggcgcgcaaaaacgggcaaccgaccgccgccgcgctggaaaccaccgcaccggacggctactctggcgccatcaagctgctggtcggcgccgatttcaacggcacggtgctcggcacccgcgtgattgaacaccacgaaaccccggggctgggggacaaaatcgaactgcgcatttccgactggatttccttcttcagcggcaagaaaatcgaaggcccggacgataagcgctgggcggtgaagaaagacggcggtatgttcgatcagttcaccggcgccaccattacaccgcgtgcggtggtcaatgcagtgcgccgcacggcgttgtatatggaaacgctgccgcctaaacttgaaagcttacctgcgtgtggagccgccgaatga

SEQ ID NO: 423091 - DNA, 1086 bp, Serratia marcescens
atgaagttcaggccggtatcacccacagccgccaaaggcttacacatcgccagctcgccgttcacccacaaccagcaaagcaccagccgcatcatgctgtgggtgatgttgacgtgcattcccggcatcgcggcgcagatttggttcttcggctacggcgtattgattcaggtggcgctggcggcgatcgtcgcgctggccgcagaaggcgcgatcctcaggctgcgcaagctgccggtgcgcagccggctggcggataactccgccctgctgaccgcgctgctgctcggcatcagcctgccgccgctggccccgtggtggatgatcgttatcggtaccttcttcgccatcgtcatcgccaagcagctgtacggcggcctcgggcagaacccgttcaacccggcgatggtcggttacgtggtgctgctgatctccttcccggtacagatgaccagctggctgccgccggatgagctgcgcgccaccgcgctgtcgctccacgacacgctgctggccattttcagcggccatacctcgcaaggcgcgacgctgcacgaactgcagatgggcgtggacggcatcagccaggccacgccgctcgacggcttcaaaaccggcctgcgcagcggccacagcgtggaacaggtgttacagcagccgctgttcggcggcgcgctggccggcatcggctggcaatgggtcaacctcggcttcctggccggcggcctgtttatgctggcgcgccgcctaatccattggcaaatccctttcagcatgttggccgccatcgccttctgctccggccttgcctggtggatcgatccggcgcatcaggcttcgccgctgattcacctgttctccggcgccagcatgctgggcgcgttctttatcgccaccgatccggtcagcgcctccaccacgccgaagggccgcctgatctacggcgcgctgatcggcgtgctggtctggctgatccgcgtctatggcggctaccccgacggcgtggctttcgccgtgctgctcgccaacatcaccgtcccgttaatcgaccactacacgcagccgcgcgtgtacggccatcgctga

SEQ ID NO: 423092 - DNA, 894 bp, Serratia marcescens
atgacaaatgaagacattttttttattgaagagctaattgagtgggtggagatacatctggagaaacggccaaacctggatgaagtcgcgcgtatttcgggctattccaagtggcatctgcagcgtaaattcaagcgtattaccggcattcaactcgccacctacatccgttcgcgtatcctgacgcgcgccgcggtggcgctgcgcattactcgtcgctcgatcatcgacatctccgatgagctgggcttcgactctcagcagacctttacccgcatgttcaagcagcgcttcggcaccacgcccaatcgctaccgatcgatgacgcactgggacgtgaaaaacctgatgccgcgctttaacttcgatgccagctacggcgccggttattacccggaagtgaagcggctgacgctgcccgagatgcagttggtcggtttcacgcgccggctggatttcgcctccgaacaggagctggagtactcttcctgcatggcgatgaaggacgagattttcaacgacttcttcaaggggctgcacgtcgactgtcggcggatttacagcatctactcccctcatgccggggagggcgacgagctctcatccacgctggtgatggcggtcgatcctgaacacaaaaaagatattctttccaactatcaaatcgacactttccatctgccgagccgcgagtttatctccatcaaccataagggttcggcgaaagagtgtttgcagtttttcggctacctgatgtcgcatgtaatgccggggctgaaggatgaagtgcgcggcagtatggaaatggagatcattcaaaccaaagagtggaatccggaatccaaactgcgccagattgatgtggattacacctacctgatctctatcgattaa

SEQ ID NO: 423093 - DNA, 2430 bp, Serratia marcescens
atgcttaatctgttcgccgcctttaaaaaagaccggatctgggatttcaacggcgggatccatccgccggaaatgaaaacgcagtccagcggtgcgccgctgcgtgtcgctcccctgcccaagacctttatcattccgctgcaacagcatctggggcctgaaggcgagctgtgcgtcaatgccggcgatcgggtgttgaaaggccagccgctgaccgtcggccgcggccgcaccgtgccggttcacgccccgacctcgggcaccgtcagcgccatcacgccgcacatcaccgcgcacccttccgggctgacggagctgtgcgtgattatcgaggcggacggcgaagaccgctggtgcgagcgcgatccggtggctgactaccgccaagcgcccgccgcggatctgattcaacgtattcatcaggccggcatcgccggtctgggcggcgccggtttcccaaccgctagcaagctgcagggcggcatgagcggcgtggaaacgctgatcctcaacgccgccgagtgcgaaccttacatcaccgccgacgatcgcctgatgcaggaacatgccgatcagatcgttgaaggcacgcagatcctgcaacatattctgcaacccaaggtcacgctgatcggcatcgaagacaacaaaccggaggcgatcgcggcgctgaagcaggcgttacgcggccagtccggcattgcgctgcgcgttatccccaccaaatacccgtccggcggcgccaaacagctgaccaagatcctgaccggcaaggaagtgccgcacggcaagcactcctctgccatcggcgtattgatgcaaaacgtcggcaccgccttcgccatcaagcgagcgatcgtcgacggtgaaccgctgattgagcgcgtagtgaccctgaccggcgacgcgatcgagcgcccgggcaacctgtgggcgcgcatcggcacgccggtgcagcacctgcttgacttcgccggtttccgcccgcaggcgcagcagatggtggtcatgggcggcccgctgatgggcttcaccctgcctgcgctgaacgtgccgatcgttaagatcagcaactgcattctggcgccgacggtcgatgaaatgacaccgcaggagccggagcagtcctgcatccgctgcggcctgtgtgtagacgcttgccctgccgggctgctgccgcagcagctgtactggttcagccgtgggcaggagcacgacaaggcgcgcaaccataacctgttcgactgcattgaatgcggcgcctgcgcgttcgtctgccccagcaacatcccgctggtgcagtactaccgtcaggaaaaggccgagatcaaggctatcgatctggaagcggcgcgcgccgccgaggccaaggcgcgttacgaagccaagctggcccgcctggagcgcgagaagctggcgcgcgaagagcggcacaaaaaagccgccgtcaaactgaccgacgacgatcagggtgcggtgcaggccgcgttggcgcgcgtgcgcagcaaaaatgccgaagcggcggtcacgccggtcgacggccagcagccggataacagcgaaatgatcgccgcccgcgaagcgcgtaaagcgcaggcgcgtgaacgccgcgcccagttggcggccgaggcggaaaaagaggcgccaccggcggcctccggcgacgacgcgcgcaaagccgccgtggccgcggcgctggcccgcgtgaaagcgcgcaaggaagcgccggccgcagacaacgccgccccggcggcaacagaggacgatccgcgtaaagcggccgttgctgccgccctggcgcgcgtcaaagccaaaaaggcagagcagcaggcagataccccagccgcagcggaaccggctccggcaagcgccgaagaagatccgcgcaaggcggcggttgctgccgctctggcgcgtgtcaaagccaagaaagcggcgcagcaggcagatgcccctgcaccggcggaaacggcgccggcagccgccgaagaagacccgcgcaaggcggcggtcgcggcggctatcgcccgagccaaagccaagaaagcggcgcagcaggcggacgcccctgcagcggcggaaacggcgccggcaaccgccgaagaagatccgcgtaaggccgcggtcgctgccgctctggcgcgtgtcaaagccaagaaagcggcgcagcagacggatgcccctgcagcggcggaaacggcggcggcagccaccgaggaagatccgcgcaaggccgcggtcgcggcggcactggcgcgtgtcaaagccaagaaagcggctcagcaggcggatgcccctgcagcggcggaaacggcggcggcagtcaccgaggaagatccgcgcaaggcggcggtcgcggcggctatcgcccgcgccaaagccaaaaaagccgccagggaatcgctggcggcggaaacggaagacaaatga

SEQ ID NO: 423094 - DNA, 573 bp, Serratia marcescens
atgactgcgttgtggatagctatcgcggctttaagcgcgctcgggctgctgttcggactggtgctgggctacgccgcgcgccgttttgaggtggaggaggatccggtcgccgagcaggtcgacgcgatcctgccgcagagccagtgcggccagtgcggctaccccggttgccgcccctacgccgaggcggtggccaacggcgagatgatcaacaaatgcgcgccgggtggcgaacaggtgatgttgaaactggcggagctgctcaacgtcgagccgcagccgctgggcagcgaagccgccgccgagccggagcgtaaagtggcctatatcgacgaggccaactgcatcggctgcaccaagtgcattcaggcctgcccggtggacgccatcgtcggcgccacccgcgccatgcacaccgtcatcaccgacctctgcaccggctgcgacctgtgcgtcgccccttgccctaccgactgtattgaaatgagaccggtcgccaccaccaccgccaactggaagtgggacatgaagacgatcccggtgcaagtgatccacgtggagcaacatgcttaa

SEQ ID NO: 423095 - DNA, 582 bp, Serratia marcescens
atgaccgaatacctgctcctgtttgtcggcaccgtactggtgaacaacttcgttctggtgaagtttcttggcctgtgcccgttcctcggcgtttccaagaagctggaaagcgccatcggcatgggaatggccaccaccttcgtcatgacgctggcctccgtcagcgcctgggtgatcaacacctttattctggttccgctggatctggtgtatctgcgcacgctctccttcattctggtgatcgccgtcgtcgtgcagttcaccgagatggtggtgcgcaagaccagcccggcgctctaccgcctgctgggcatcttcctgccgctgatcaccaccaactgcgcggtgcttggcgtagcgttgcttaacgttaacctcggctataacttcctgcagtccgccgtgtacggcttcagcgccgccgccggtttctcgctggtcatggtgctgtttgccgccattcgcgaacgtctggcggtcgccgacgtgccggcgccgttccgcggctcctcgatcgcactgatcaccgccgggctgatgtcgctggcctttatgggctttaccgggctggtgaaattctaa

SEQ ID NO: 423096 - DNA, 441 bp, Serratia marcescens
atgtctcaagctgaatactctcgtatcggcggttggttgctggccccgatggcctatctgatcgtcaccctgctcagcgccagcctgatgctgctcctgtacgccatggcgatctttatgcccgaatcgcgcgactatctgctgaccaacgcccaggcgtttaccctgcaatggtacttttcggtgctgaccacgctcttgatgtggtgcttcaccctgtggctgctgtggctgttttgccagcgctcgcagcgcttccccaagctgttcttgctgtggctgctgatcacggtgctcctggcggtgaaagccttcgccttcgcgccggtgccggatgaagtggcagtgcgcagcctcggctggccgctgctgatggcggcgctgctggtgccttacatcaagcgctcgcagcgggtcaaaggcacctttaccgaacgttaa

SEQ ID NO: 423097 - DNA, 1041 bp, Serratia marcescens
atggctgagaaaattcgtgtcgggctggtcggttacggctacgccggcaaaacctttcatgcgccgctgatcgccggtacgccggggctggagctggctaccgtctccagcagcgatgccggcaaagtgcacgccgactggccgtcgatggcggtggtgggcgatgcgcaggcgctgttcgccgatcccaccctcgatctgatcgtgattcccactcccaacgacacccacttcccgctggcgcagcaggcgctggccgccggcaagcacgtggtggtggataaaccgtttaccgtgacattgtcacaagcgcaggcgctgcaacagcaggcgcagcagagcggtttgctgctgtcggtgttccacaaccgccgctgggacagcgacttccttaccttgaaagcgctgctgaatgagggcgcgctgggcgaggtggtgtatttcgagtcgcatttcgatcgctaccggccgcaggtgcgccagcgctggcgtgaacagggcggcgtcggcagcggtatctggtacgatttggcgccgcacttgctcgatcaggcgctgcaactcttcggcaagcccgagcggctgttcgtcgatctgggggaattgcggccgggggcgcaggcggtggactatttccacgccttgctgagctatggcaatcgccgcgtggtgctgcacgccagcatgctggcggcggcggagagcccgcgttacgtggtgcacggcacccgcggcagctatatcaaatacggcctggacctgcaggaagaccggctgaaggccggtgagcgcctgccgcaggccgattggggctatgacatgcgcgacggcgtggtgacgctgtcacgtggcgatctgctggcggagcagccgctgctcaacattcccggcaactacccggcctattacgccgcggtgcgcgacgcgatcgccggcatcggcgaaaacccggtgccggccgccgacgccatcacggtgatggcattgatcgaactggggctggaatcggcccggctgcagcaggcgctgccggtggtctga

SEQ ID NO: 423098 - DNA, 1005 bp, Serratia marcescens
atgtcctggttgcagcgtttgcgcattgataaatttttgctggttctgattttggtggtgatcgtcgcctcgctgttcccttgcgaaggcatctggaaaaccttctttgaacacctgaccaccgccgccatcgcgctgctgttctttatgcacggcgccaagctgtcgcgcgaggcgatcgtcgccggcatgagccactggaagctgcatctgctggtgttcctcagcacctttgcgctgttcccgctgcttgggctggcgatgaatctgctggtgccgggcatcatgacgccgacggtctatctcggcttcctctatctgtgcgcgctgccggccacggtgcaatcggccatcgcctttacctcggcggcgggcggcaacgtggcggcggcgatctgcagcgcctcggcgtcgagcattctcggcgtgttcctgtcgccgctgctggtgggggcgttgatgcatacccagggcggcaataccgacgtgctgcacgccatcggttcaatcattctgcagctgatggtgccgttcgtggttggccatctggcgcggccgctgatcggcaagtgggtcgatcgccatcgtaagctgatcaacctgaccgaccgctcgtcgatcctgctggtggtgtataccgcgttcagcgcggcggtggtggaagggatttggcatcgcatcgacggctggtcgctgctgaccatcctggttatgtcgttggtgctgctgacggtggtgttggtgatcaacacctatgcggcgcgttggctgggcttcaacaccgccgatgaaatcaccatcgtcttctgcggctcgaaaaagagcctggcgaacggcatcccgatggccaacgtgctgttcccggccgcggcggtgggcgccatggtgctgccgctgatgattttccaccaggtgcagctgatggtgtgcgcggtgctggcgcagcgctatgcgcgtaaaaccgccaaacaacgggccgaggcggaaacgctggcggccaaatag

SEQ ID NO: 423099 - DNA, 546 bp, Serratia marcescens
atgtctgacaaactacgccgcatcgtgctgaccggcggcccgggttcgggcaaaagcacgctcatcgaggttcttcatcgccgtggctacccgcattcgcaggaggcgggccgggcgattattcaggatcaggcgagtattggcggcaatgcgctgccgtggggcgatcgccaggctttcgccgagcggatgctggattgggaactgcgctcatggcgggaagcgacgggcgcaacatgctggttcttcgatcgcggcctgccggatatcgccggttacctgacgctgtgcgggttgccgatccccgcccccttaaccgcggcgatcggcgcttttcgctatgccgatacggtgttcatcgccccaccgtggcgagcgatctacgcgcaggacagcgagagaaaacaatctttcgccgaagccgagcagacctatcgagcgatgctggccgcctatcgccaacatggctatcagctgcaggaactgccgcgcacctcacccgacgagcgcgccgactttctgctcgacgcgctgggctgccgttag

SEQ ID NO: 423100 - DNA, 999 bp, Serratia marcescens
atgatcgatccccgcctaccgcttaccgacattcaccgccatcttgacggcaacatccgcgcgcagaccattctcgacctcggtcgccagttcaatctcgccctgccggccaacgatttggagagcctgcgcccgcacgtgcagatcacccacgccgaaccggatctggtcagcttcctgcagaaactggactggggcgtggcggtgctgggcgatctggacgcctgccgccgggtggcctacgaaaacgtcgaagacgccgccaacgccggcctgcactacgccgagctgcgtttctccccttactacatggcgatgaagcaccagctgccggtcgccggcgtggtggaagcggtgatcgacgggatccgttcgggctgccgcgatcgcgacatcgacattcgcctgatcggcatcatgagccgcacctttggcgaggccgcctgtctgcaggaattggaagggttgctggcgcaccgcgacggcattaccgcgctggatttggcgggtgatgagctgggcttccccggcagcctgttcctcaaccacttcaaccgcgcgcgcgacgccggcctgcgcatcaccgtgcatgcgggcgaagccgccggcccggaaagtatctggcaggcgatccgcgagctgggcgccgagcgtatcggccacggggtgaaagcggttgaagatccggcgctgatggatttcctggcggaacacggcatcggcatcgagtcctgcctgacctccaacatccagaccagcaccgtgccttcgctggcacagcatccgctggccaccttcctgcgccacggcgtgctggcatcgatcaacaccgacgatccggcggttcagggcatcgagatcgagcacgaataccgcgtcgccgcgccgcaggccgggctgacgccgcaggaaatccgcaccgcgcaggaaaacggcctgaagctggccttcctcagcgagcaggaaaaacaggcgctgcgcgccaaagtgcaaggttaa

SEQ ID NO: 423101 - DNA, 756 bp, Serratia marcescens
atgttgaccagccagcgcaagaagatcatcctggaaaaactggcccaggacggccaggtgttggccaagcagctcagcgaaatgtttgggttgtcggaagacactgtccggcgcgatctgcgcgaactggacgccgaggggttgctgcaacgggtacatggcggcgccctgccggtttcctctgccattgccagcttcgccgagcgcaatcagttggaatccggcgccaaacgcgcgatcgccaaagcggcggcggcgatgatcgcccctggccaggtagtgattatcgatggtggcaccacctctgcagaactggtccggcagctgccgcccaatctgaacgccactatcgtcacccacagccccagcgtcgccgtgggcttggtcgatcaccccacggtggaggtgatcctgatcggcggccggctgtacaagcattcgatcgtcagcgttggcgccgccgcggtggaagcgatgtcgcatattcgcgccgatatctattttatgggcgtaaccggcgtgcaccccaccgcggggctgagcaccggcgatctggaagaggcctacatcaagcgggcgctggcggcccgcgcggcggaaaccgtggtgctggcctccgccgccaagcttaacgccgcctcgcagtatgcgatcggtgacattacgctggcgcataccatcatcgttgaacgcgccaccgacgacgcattgatcgcgccgttgcagcaggcgggcgtcagcgtgttgaaagcctga

SEQ ID NO: 423102 - DNA, 597 bp, Serratia marcescens
atgatagccaccaaagacagggttcgcattgtcgaaacccgggtgttgtccgatgactggtacctgctgaaaaaaaccacctttgattttctgcggcgcgacggcgtttggcagcgacagagccgtgagacctatgatcgcggcgacggcgcggtgattttgctgttcaaccggcaggcgcaaacggtggtcctgacacgccagttccgctttccggtgttcgtcaacggccatgacggcatgttgattgaggccgccgccgggttgctggacaacgcatcgccggaggcgcgtatccgcgccgaagcggaagaggaaaccggctatttcgtgcagaacgtggagaaggtgttcgaagcctacatgagccccggctcggtcaccgagaagctgcactttttcgtcggcgaatatcaggcgagcgatcgcctcaacgagggcggcggggtggtggcggagggggaagatctggaggtgctcgagctgccgctggcgcaggccctgcaggcggttcgccagggcacgatcgttgacgccaaaaccatcatgctgctgcagtttgtcgccttgaatcggacgttggaggaagaacgatga

SEQ ID NO: 423103 - DNA, 369 bp, Serratia marcescens
atgaaagcgcaacaaatcctgatcgccggcccctaccgcagcggcaccgatggcgatccgcagcgtatcgccgccaatctggcgcgcctggaacaggcggcgctggcggtttaccagcgggggcacgtgccggtgatcggcgaatggctggcgctgcctttggcggcggcggcgggttccactcaggttggcgatgcggtgagcgaggcgtttctttacccggtggctcaccgactgattgcgcagtgtcaggcggtgtatcgcatcgaaggggcgtctgcgggggccgataacgacgtgcggttggccaacgagtggggtctgacggtctatcgccgcctggaggagatcccgcctgttcaggggtaa

SEQ ID NO: 423104 - DNA, 1182 bp, Serratia marcescens
atgtttgatttctccaccccgatcgaccgccacggcacctggtgcacccagtgggactatatcgccgatcgtttcggcagcgacgacctgctgccgttcaccatctccgatatggatttcgccaccgcgccgtgcattctcgacgcattgcagcagcgcctgcaacacggcgtgctgggctacagccgctggcagcacgaggattttctcggcgcgctgcgccactggtatcagcaacgtttcaacgtcggcatcgacaccgcgacggcggtgtacggcccttccgttatctacatggcggcgcagctgatccgccagtggtcggtgccgggcgattacgtggtgacccataccccggcctacgacgccttctacaaggtgatcctcgccaaccagcgccagctgttggcctgcccgctgcaaaaagccggcgacgactggcgctgcgatatggctcaccttgaggcgttgctggcgcggccgcagaccaagatcctgctgctgtgcagcccgcataaccccaccggcaaagtgtggcgccgcgacgagctgcagcagatggccgaactgtgcgagcgccacgacgtgcgcgtcatcagcgatgagatccacatggacatggtgtggggggaacaccgccatacgccgtggagccaggtggcgagcggcgcctgggccctgctgacctcaggttccaagagtttcaacattccggcactgaccggcgcctatggcttcatcagcgacgccgccagccgcgaagcctacttccagcagctcaaagcccgcgacggcctctcttcgccggcggtgctggcggtggccgcgcacgtggccgcctatcgccacggcgaaccctggctggacgccctgcgcgactacctgcaggataatctgacctacgtcgccgagcggctggagcaggcttttcccgcgctgggctggcgtccgccgcaggccacctacctggcctggatcgatctgcggccgctggccgtagacgatcgggcgctgcagcaggtgctgatcgagcgcgaaaaggtggcgatcatgccaggctttacctacggcgaggaaggccgcgggttcctgcgcctcaacgtcggctgcccgcgcagcaagctggaggccggcatggacaagctgatcgccggattgcggttggtgctgagcgaccaatag

SEQ ID NO: 423105 - DNA, 1620 bp, Serratia marcescens
atgtcagcagccaacaaacccaaaatcacgctctgggagttcttccagagcctgggcaaaaccttcatgttgcccgtcgccttgctctctttctgcggcatcatgctggggatcggcagctcgctgagcagccgcgacgtgatcaccctgatgccgtttatcggccacccgatcttccagctgatctttacctggatgagcaaggtaggctccttcgccttcagcttcctgccggtgatgttcgccatcgccattccgctgggtatggcgcgcgagaacaagggcgtcgccgccttctccggcttcgtcggcttcgccgtgctgaatctgggcaccaacttctacctgaccgccgccggcgtgctgcccaccggcgatccgctggtgctgaaagccaacaatatccagaacatcctcggcattcagtcgatcgataccggcatcctcggcgcggtgatcgtcggcatcatcgtctatcgcctgcatgaacgcttccacaccatccgcctgccggacgcgctggcgttcttcggcggcacgcgcttcgtgccgatcgtcaccaccgtggtgctgggcctgtgcggcctggtgatcccgctgatctggccgtggttcgccgccggcatcaccgggctgggctgggtgatcaacagcgccggcgcctttggcccgatgctgttcggcaccggcgaacgcctgctgctgccgttcggcctgcagcacattctggtggcgctgatccgctttaccgaggcgggcggcaccatggaagtatgcggccacagcgtcagcggcgccctgaccatcttccaggcgcagctttcctgcccaaccaccaccggcttcgccgaaagcgccacccgcttcctgtcgcagggtaaaatgccggcgttcctcggcggcctgccgggcgcggcgctggcgatgtaccactgtgccaaaccggagaaccgtcataaaatcaaagggctgctgatttccggcgtggtggcctgcgtggtcggcggcaccaccgagccgatcgagttcctgttcctgttcgtcgcgccgttcctctacctgatccacgcgctgctcaccgggctgggctttaccgtgatggcgctgctgggcgtaaccatcggcaataccgacggcaatatcatcgacttcgtggtgttcggcattctgcacggcaccgccaccaagtggtatctggtgccggtggtggccgccgtctggttcgtcggctattacgccattttccgcttcgccatccagcgctttaacatcaaaacgccgggccgcgagagcgatggcgccgttagccaaagcgcgccgagcggcgcggtgggcaaatccggctacaacgtgccggcgattttggcggcgctcggcggcccggacaacatcatcacgctggacaactgcatcacccgcctgcgcctgtcggtcaacgacatgagccgggtggacgacgcggcgctgaaggccaaccgcgctatcggcgtggtgcatctcaacgaccataatctgcaggtggtgatcggcccgcaggtgcaatcggtgaaggatgaattagactcactgatagccacggcgcaacctgccgcggcgctgcagggagccacccatgtttga

SEQ ID NO: 423106 - DNA, 1032 bp, Serratia marcescens
atgagcatcaaaaagatcaccatcaccgatgtggcgcaacaggcgggcgtgtcggtcaccacggtttccctggtgttgagcggcaaggggcgcatttcgccgaccaccgtcgagaaggtcaatcaggcgatagagcagctgggctatgtgcgcaatcgccaggcggcgacgctgcgcggcggggagtccggggtgatcggccttattctgcgcgacatctgcgaacccttctatgccgaaatgaccgccgggctgagcgaagcgctggaggcgcacgacaagctgctgtttttgacgcagagcgggcgcgacggccagggcttgcagcgggcgtttgacgcgctgctggcgcagggcgtcgacggcatcgtgctggcgggcggcattcgcgcggcggcgggcctgaaggagaaggcggccgagcagggcgtgccgctggtctgcgtggcgcgctccagcggtctcgacggcgtggacgtggtgcggccggacaacatgcaggccgccaagctggccaccgaatttctgatctcgcggggccacagccaaatcgcctacctcggcggccagagcgattcattgacgcgtgccgagcggctgggcggcttttgcgccacgctggtgcagtatggcctgccgtttcgcagcgaatggatcgtcgagtgcgattgccggcagcgccaggcggcggaagcggcggagcaactgctgcgccattacccgaatattaccgccatcgtctgccacaaggcatcggtggcgctcggcgcctattttggcctggcgcgcagcggccgcagcatcggttcggacggggtcgacgcctactacgggcggcaggtggcgctgatcggctttggcgacgtgccggaggctgaactgaccgagccgccgctgaccttcgtctccagctcggcgcgggaagtggggcgcagcgccgccgcgcgcctgctgcagcgcatcggtgacgccgacctgccggcgcagaacgtcattctgccgccgacgctgatccggcgcggctccgcctag

SEQ ID NO: 423107 - DNA, 882 bp, Serratia marcescens
atgcgcaatcgacttcccctcaatgccctgcgggcgttcgaatcctccgctcgccacctgaacttcacccgcgccggtctggagctgcgcgtcacccaggccgccgtcagccagcaggtgcgcatgctggaagaacagctgggcattcagctgttccgccgcctgccgcgcgggctggatctgaccgaagagggccaggcgctgctgccggtattgagcgacgccttcgaccgcatcgaggcggtgctgcagcagttcgaaggcgggcatttccacgaggtgctgacggtggcggtggtcggcaccttcgccgtcggctggctgatgccgcggctggcggcgttccgcacggcgcacccgtttatcgatctgcgggtgctgacccacaacaacctggtcaatctgtcggccgacggcatggatttcgccatccgcttcggcgaaggcctctggcccgccacctgcaatatcaagctgttcgacgcgccgctgacggtgctctgcccgccggcggtcgccgcgcgcctgcgcacgccgcaggatctgcagcacgagcagctgatgcgcacctaccgcaaggatgagtgggagcgctggttcgcggcggcacaggtgacgccgtggcggatcaacggcccggtgttcgactcgtcaaggctgatggtggaaggcgcgatccagtgcgatggcgtggcgctggcgccggtcagcatgttccgccgcgaactggccgccggcgcgctgcagcggccgttcgccgccgaggccgcgctcggcgcctattggctgacccatttgaaatcgcgagatctgacgccggcgatgaaaacctttatcggctggatccgccgggaggcggaggaggaacagcagcagggctag

SEQ ID NO: 423108 - DNA, 1137 bp, Serratia marcescens
atgacgaaaatgaaccgcctggcggcagcgctgatcgccgcactgatcttgccgaccgcgcaggccgcgcagcagcaggatatcgacgccgttattcagccgctgatgaaaaaatatggcgtaccgggcatggcgatcgccgtgtcggtcgacggcaaacagcagatttacccgtatggcgtcgcctcgaagcagaccggcaaaccgatcaccgaggagacgctgttcgaagtgggctcgctgagcaaaaccttcaccgcgacgctggcggtctatgcgcagcagcagggcaagctgtcgttcaacgatccggccagccgctacctgcccgagctgcgcggcagcgccttcgacggcgtcagcctgctgaatctggcgacgcatacctccggcctgccgctgttcgtgccggacgacgtcaccaacaacgcccagctgatggcctactaccgggcctggcagccgaaacacccggcgggcagctaccgggtctattccaacctcggcatcggcatgctgggcatgatcgccgccaagagcctcgaccagccgtttatccaggcgatggaacaggggatgctgccggcgctgggcatgagccacacctacgttcaggtgccggcggcgcagatggctaactatgcgcagggttacagcaaggacgataagccggtgcgggtcaatcccggcccgctggacgccgaatcttacggcatcaagtccaacgctcgcgatctgattcgctatctggacgccaacctgcagcaggtgaaggtggcgcagccgtggcgcgacgcgctggccgcgacgcacgtcgggtattacaaggcgggcgcgttcacgcaggatctgatgtgggagaactacccgtatccggtgaaactgtcgcgtttgattgaaggcaacaacgccgggatgatcatgaacggcacgccggccaccgccatcacgccgccgcagccggaattgcgcgccggctggtataacaaaaccggctccaccggcggcttctccacctacgcggtatttatcccggcgaaaaatatcgccgtggtgatgctggccaacaagtggttcccgaacgacgatcgcgtcgaggcggcttaccacatcgtccaggcgctggagaagcgctga

SEQ ID NO: 423109 - DNA, 909 bp, Serratia marcescens
atgagttcactcctgcagctgttgccctatttcgaagccgtcgcgcgcctgggcaactttacccgcgcggccagccagctgggcgtcacgccgccggcggtgtcgcaaaacattcaggcgctggagaatcagctgggagtacggttatttcatcgcaccagccgctcggtgcgcctcagtgacgagggccggttgttctatcagaaggtatcgccggcgatgagccagatcgacgtggcggcggacgacgtgcgcgctctgggcgcgcagccggcgggcctgctgcgcattacgctgccgcagctggccgcttcgctgctggtaatgccgcatctggcggaatttcaacggcgctatcccgacgtgcagctggagctgtttaccgaagaccgcttttccgatctggtgctgggcagtttcgatgccggcattcgcatgcacgccatgctgcaaaaggacatgatcgccgtgccgatcgacaacggtcagcgtcgggtgctggtcgcctcgcccgactatctggcgcgctgcggcgtaccggccacgccggacgatctgcccgttcaccactgcctgcgctaccgtttccccggcagcggcaaactggaaccctggtatttcagcctgggcgacgatgaacgcgcgctggacgtcagcggcagtttgatttttaacgaagatcggctgctcaaggatgcggcgttggcgggcctgggtatcgcacagcgttttcagggcacggtgttgcaggagctggcgcaggggcaactggtggaagtgctgccggattacgccagcgaagcgtcggggtttttcatctactttcccgccggccggcatctgccgctcaagctgcgcgcctttatcgatttcatgcgcgagcaacgtgaacggcagcatcgctggtag

SEQ ID NO: 423110 - DNA, 1164 bp, Serratia marcescens
atgtcggcagaacaacgggcgttaacagaacggatcgcggcgatcgatcaacaggcgatggccgaagggcgcatcgtgggtagcgtagtgctggtggcgcggcggggcgagatttgctacgccggggcggccggctatgccgatcgcgaagcgcggcggccgatgcggcgagaaacgcagtttcgactgtcgtcggtctccaaaccctataccacgctggcggcgctgcgcctgattgagcagggcaagctgagcctggacgacgcggtcagcgactggctgccgtggttcactccggcgttggcggacggccggcgcccggcgatcaagattcgtcatttgctgagccacaccgccgggctggactatcggctgaaccagccgccggcgggcgtttatcatcagctggggatccaggacggcgtggagctgtcgacgctgacgctggagcaaaacctgcggctgttggcacaggcaccgttgctgtcggcgccgggggagcgcttcaattattcgctggcgatcgacgtgcttggcgcggtgctggaacgggtgacgggcatgccgctgcagcagctgtttgtcgaatgggtggcgcggccgctggggctcggcaataccgcgttttatgcggcggacgccgcgaacctggcgacgccgtattacaacacgccgcaagggccgcagcgcatgcatgaaggcctgcggctggcgctgccggaggagatggcggggggcgaggtactgttttcacccgcgcgggcgcttaacgccggggcctatccttccggcggcgcgggcatggtcggcgatgccgacgatgtgctgcgcctggtggaggcgttgcgcagcggcgggcagggcatgttgcggccggacacggtggcgttgctgcgcagcccgcacgtgggggcgcaggcgcaaacgcaagggccgggctggggattcggtttcggcggggcgctgctggtggacacagatgccgcgcagacgccgcagcatgccggcacgctgacctggggcggcgtttacggccacagctggttctttgatccacaggcgcagttgagcgtggtgatactgaccaacaccgcgtttgaaggcatgtgcggccgctatccgcagcagatccgcgatgcggtttacgccgcggaaatggggtaa

SEQ ID NO: 423111 - DNA, 1533 bp, Serratia marcescens
atgaaaaaatcgttagtcgctgtcagcgtcattgtggttcttggcgcagcatggaccggggcatcctggtacaccgggaaactgatcgagcagcacatgggcgaagtcgtcgacaacgccaacggccagctgaaagcttacctgccgaaagccggcgtgaagctgagctatgaaaattaccagcgcggcctgttcagcagtaaagtgcgttatgtgctgcgttccgacggcacggataccagtgaagacgcggcgctgaaagccggcgaagaagtggcgttcctggaaaccatcgatcacggcccgttccccttcgcccagctgaaaaaattcaatctgctgccgagcatggcgtcggtgcataccgagctggaaaataccccggcggtgaaaggcctgtttgacaccaccaaaggcaaatcgctgtttaccgccgattcgcgcatctcttacagcggggacacctcgtccgccatcgacatcatcccgctggactaccagaaggataagtcttcgctgaaattcagcggcgccaccattaacgccgatgtgtccagcgatctgaaaaaattcgtgctggacgccaatagcgacaatatcgtgttcgccagcccgaacgaattcggtcaaaacgagcagatcaccttccagggcttcaacctgaagggcaacagcaacgagagcaagttcggcgtgaagctcggcgatcagacgatgacgctgaagcagttcaaactgacgatcgacggtaaagataccgtggcgttggacggtttcaacctggtgagcaagttcggcgagcaaggcagcagcaacatcggcggccagatcgactacaccatggacgcgctcaaggtgcagggcaacgatttcggcgccggcaagctggcgctgaaaatcgacaacgtcgacggcaaggcgctgaaagacttcgccgacagctacaaccgccagaccatggcgctgctgcaacagggcgagaacctggatccggccgtgtatgagcagcaaaacgccgagctgttgcaaaagaacctgccgctgctgctgaaaggcaacccgagcctcagcatcgcgccgctgagctggaaaaacagcaagggcgagagcaccttcacgctggatctggcgctgaccgatccgagcaaagccgcctccccggcgcaatcgccggatcagctgatcgcgcaggcggttaaaaagctggatatcaacctgaccattccggaagcgatggccaccgaagtgaccgcgaaaaccgcgctgttgcagggttacaatgcggaagacgcgcagaaactggcgcagcagcaagtgcagggcctggcggccatgggccagatgttcaagctgaccacccagaaagacggcgtgatcgcgagcaagttccactatgccgacaaccaggttgacctcaacggcaacaagatgtcgctgcaagagttcatcggccagttcgccatgctgggcgccccggcggaagacgctgaaccggcgcaggaagcggaacccgctccggcaccggcgcagtaa

SEQ ID NO: 423112 - DNA, 1179 bp, Serratia marcescens
atgcaaaaaatgaccaacgcggtacagaattacgcctggggcagccacgatgcgctgacccgtctttacggcatcgccaaccctgataatctgccgatggccgaactgtggatgggcgcccatcccaagagcccttcccgcgtgccgggcgccgacggcgagctgcgttcgctgcgctttcttatcgatgaagaccagccaaaacagctgggcaccaacgtcgccagccgctttggcgagttgccgttcctgtttaaagtactctgcgccgatcagccactgtcgatccaggtccacccgagcaaagcggcggccgaaatcggcttcgcgaaagagaatgccgccggcatccccctgagcgccgccgaacgcaactataaagatcccaaccacaagcccgagctggtgttcgccctcacgccgttcctggcgatgaacggctttcgcgaactggccgatatcgtttccctgctgcaaccgatcgccggcgcacaccacgacatcgccgccttcctgcaacagccggacaccgcgcatctcgcaaccctgttcgccagcctgctgacgatgagcggcgagcaaaagtcgctggcgctcggcgtattgaaagccgcgctcaacaaccagcagggggaaccctgggacaccgtacgctttatcgccggcttctatccggacgacagcggcctgttctcaccgctgctgctgaacgtggtgcagctcgcgccgggcgaagcaatgttcctgtatgccgaaacgccgcacgcctacctgaaaggcgtggcgctggaggtgatggccaactcggacaacgtgttgcgcgcgggcctgacgccgaaattcatcgacgtgcccgagctgctggccaatctgcagttccgcccgcagccggcttccggcctgctgacccagccggagccgcgcggcaacgagctgttcttcccgattccggtggaggatttcgccttctcgctgcacgatttgaccaccgccccgcaggcgctggcgcagcaaagcgccgccatcgtgttctgcgtcaccggcgaagcgacgctggaaaaatccgggcaacgcctgacgctcaaaccgggcgaatcctgctttatcggggctttcgaatccccggtcaacgtcagcggcagcggccgcatcgccagggtttataaccagctggcctaa

SEQ ID NO: 423113 - DNA, 333 bp, Serratia marcescens
atgaaaaaactgttgttgctgttggggctttgcgccggcgcagcccaggcggcggtgattgtcacctatccctacgcggcgccgcgcgccgtggcgatcgcgccggcgccgatcgtcgttgcacccgcgccggtcgcggttcccgccgcgatcgtgcccgtggcgcacccgttggcgctcaccgccggcgcggcggcgaccggggcctatcggcatcatgaacggcaggacgcctacgacgagatcaatcatctgcagcaacaacgtatcgatgagctcaatcatttacaggcgcagcgcatcaataattttaattcgcgtcatccgcgttaa

SEQ ID NO: 423114 - DNA, 1398 bp, Serratia marcescens
atggcaggcgttcgtatcgaaaaagactctatgggccccatcgaagtaccggccgacaagctgtggggcgcgcaaacccagcgttcgttggcgcatttccgcatttcctccgaaaagatgccgaccgcgctgatccacgcgctggcgttgaccaagcgcgccgccgcgcaggtgaacgtggatctggggctgctgccggccgaacggggcgccgccatcatcagcgccgccgacgaagtgctggcggacagccatgccgaccagttcccgctgtcgatctggcaaaccggctccggcacccagaccaacatgaacatgaacgaagtgttggccaaccgcgccagcgagctgctgggcggcgtgcgcggtgaagagcgcaaggtgcacccgaacgacgacgtcaataaaagccagagctccaacgacgtgtttcccaccgcgatgcacgtggcggcggtgattgcgctgcgcgaacatctgatccccgagctgaaagtgctgcacaagacgctgagcgacaaggccgaagcctaccgcgacatcgtcaaaatcggccgcacccatctgcaggacgccacgccgctgaccctggggcaggagatctccggttgggcggcgatgctggcgcacaatctgaaacacatcgaggacagtattccgcacatcgccgagctggcgcttggcggcacggcggtcggcaccgggctgaacacccatccggagtacgcggtgcgcgtcgctaaagcgctggcggaattgacccatcagccgttcgtcaccgccccgaacaagttcgaagcgctggcgacctgcgacgcgctggtgcaggggcatggcgcgctgaaagggctggcggcctcgctgatgaagatcgccaacgacgtgcgctggctggcttccggcccgcgctgcggcatcggcgagatttcgatcccggagaacgaaccgggcagttccatcatgccgggcaaggtcaacccgacccagtgcgaggcgatgaccatgctgtgcgcccaggtgctgggcaacgacgtggcggtgaacattggcggcgcttccggcaacttcgagctgaacgtgttccgcccgatggtgatccacaactacctgcagtcgattcgcctgctggccgacggcatgcagggtttcaacgagcactgcgcggtgggcatcgaaccgaaccgcgatcgcatcacccagttgctgaacgaatcgctgatgctggtgacggcgctcaacacccacatcggctacgacaaggcggcggaaatcgccaagaaagcgcacaaggaagggctgacgctgaaagccgcggcgctgaagctgggctacctgaccgaagcgcagttcgacgagtgggtgcggccggaagcgatggtcggaagcatgcagaaatga

SEQ ID NO: 423115 - DNA, 690 bp, Serratia marcescens
atgtcgcgcgcacaacgtttactcgatctgatgcagctgctgcgcagccgccgttatccggtggcgggccatgcgctggcgcagacgctgggcatcagcatgcgcacgctgtaccgcgatatcgctacgctgcagcagcagggggcggagatcgccggcgaggcgggcgtcggctatgtgctgcgccccggctttatgctgccgccgctgatgttctcgcaggcggagacagaagcgttggtgctgggcatgcgctgggtcagccgccgcggcgacagccaactggcgagcgccgcgggccaggcgctggccaagatcgccgccgtgctgccgccggcgctgcgggaggagctggaggccaacacgctattgatcgcgccggttcaggcaccgccggtggcagatgagctgcgggtgctgatccgtgacaccatccgccgcgagcgcaagctgcatatcgactatctcgatctggcggggcagcgcagcgaacgcctgctgtggccctttgcgctgggctttttcgaccagctccaggtactggtcgcctggtgcgagctgcgccaggcgtttcgccattttcgcctcgatcgcattcaggccgctactccgttggaacagcgctatccgcgcggccggcggcggctgctgaaagagtggcgcctcagcgagggcattgcggagcaatag

SEQ ID NO: 423116 - DNA, 369 bp, Serratia marcescens
atgactcttcccagcatgaccctgctttacgtcgacaacccgctgaacagcgccgccttttatcaacgcttactgggacaggcgccggtggaactttctcccggcttcgccctgttcgtgctcaacaacggctttaagctggggatgtgggccaaacagggggtaaaacctgcggcgaccctgaccggcggcggcggtgaactgggctttttgtgccaggatccgcaagaggtcgaggcgcgctataaccagtggcgcgaactcgggctgccgattgagcaaacgccgaccgagatggcgttcggttacaccttcgtggcgcgggatccggacggccatcgcctgcgggtgtatgccctcagcgagtag

SEQ ID NO: 423117 - DNA, 939 bp, Serratia marcescens
atgagcagatacgatgtgattggccggatgaacgcctgctttaccgaactggagcaggcgctcggcgcgctgcagcagcagatcgccccgctgcggttgctggcggcgcgggtgttcagcctgccggaggttgaaaaaggccaggaacatcaggccatctcacatatcgcggtcgaacagcatgtggggcaagcggcgcgcgatctggcgctggagtactatcagcggctgtttatccaccatagccgggagaatgtcagcagcaaggccgccgttcgcctgcccggcgtcatctgtctggcggtggagcagccggagtatcaggtgctgcaaacgcagctggcgctgatcaatcgcctgaagggcgagctggaacagattatcaccgtcgattccggcctggcgccggagcagcgtttcgagttcgtgcacacccatctgcacgggctgattaccctcagcgcctatcgcaccctcaccgccctgaccaatcccgactccgtgcgctttggctgggccaacaagcacatcatcaaaaacgtcaagcgggacgacatcctggcgcagctggagaaaagcctgaaagccggccgcgcggtgccgccgcacagccgtgaacagtgggctgccctggtcagccgcgagatagacgacgtcagccgcctgccgcagcacgcgacgctgaaaatcaagcggccggtcaaagtgcagccgatcgcccgggtgtggtatcagcagcagcaaaaacaggtgcaacacccctgcccgctgccgctgatcgccctgtgtcaggttgaaaacggcgccgcggtgccgaagattggcgagctgctcaactacgacgtcgacgcggtgaaacaccgttacaaacccgacgcccggccgctgcggctgctggtgccacgcctgcacctgtataccgacgacgctactcgctga

SEQ ID NO: 423118 - DNA, 1797 bp, Serratia marcescens
gtggatattaaacagaaagtcaaaaacatgacgctggaagagaaaatcgggcaaaaaatcatgctggattttcgctactgggatcggagcggtagcagcaatcaggatatgaccgttcccgatgaagccattggcaagctgatcgccgataaccacgtgggtggggtgatcctgtttgccaataatctgaaagacaagcagcagatcaacacattgacggcctggtatgccgcgatgaaaacccacgcgggcattcgtttgtttattggcaccgataacgaaggtggtaacgttttccggctgccgcgcggcgactatgcctcatttcccggcaatatggcgctcgcagcggcgattgagggcggtgcggataaacatctcgccgttgaacaaggcaaactgatggcccaggatatgcgcgcgttgcatatcaataccaactttgccccggtcgtggacgtcaacaccaacccgttcaatccggtgattaacgttcgcgccttcagcgatgataagaacaccgtttcccgtctggcagagaaaatggtggcgggcatgaaacagcaggggctgatcaccgcttacaaacacttccccggccatggcagcacctcgaccgactcgcataccggtttgccgcgcgtcgatcgcacgcgggaagaggcttttgccatcgatatcgctccttacaagcaggccatcgatcgctgcgcggcgccggacatggtcatgaccgcccatattcagtatccggcactggataaccgccagatagacacccgcagcggtgaaaaaatcacggtgccggccaccatgtcgcatgaaattcagacccagatcctgcgcaatgaattggggtatgtcggcgtaacgatttcagacgcgctggatatgggcgcgattgccgagcatttcagccagcaagcggccgctgaaaacgtctttgccgccggggtggatattgccctgatgcctgtcagcatcgcttcgccggcccaggcgcgcttgctgccggatctgatccgttaccttgcggacagggtgaaaacggggcatctcagcgaggctgatatcgatgcctcggtcgagcgaattttgcgcctgaaattacgccataacctgatgggccatagcgacaggccgtgttccaacgacgcttcgtcctcagcgcacaagctggaaaaacgcatcgccgatcgctccattaccgtggtgatcaatcgccacagcctgttgccgttgaaggacaaaacgctgcgctactttattttgaccccgtggggcgagcaggccaacggcattgcgcgcgtgatggcgcaggaggggtatcagaacgtcgttgccgcgaaggaaacggagctgagcgacgcccaagtcagagagcatattgccggctgcgacgtgttcctgctcggaacgctgtcaacccgctttacgcctgccgagcaggatggggtggtgacttccgcaaccggagcgggcaatgacggcagcccttatccgggctggttgaaatacgccgccgagcaggggaaaaaacgcgttcacctctcactgcgcgccccttacgatatcgtgaactatgccgcagaggtggaggcggccgtcgccacctacgcctactacggttatgacagcggcgtgtggcgcggcccttcgatggtctctttggcgcaggtgctgacgggtaaaatcaaaccgcagggcaaattgccggtcaacacctggcatgactacgatgcggaaaccaatacgggcaaggtggcgttccctcgcgggactgggctgagctggtga

SEQ ID NO: 423119 - DNA, 1287 bp, Serratia marcescens
atgccgacaggcgcaacaaaattaggcggatggctgttgatggccgccatgctgggcgtgagcggatgcgccaagccacccgaaccggagaagcccccgcggccgacaccgccgataacaccgatgcggggcatctggctggccacggtcattggcctggactggccgccggcggcctccctgaaggcggaaaccgcgcaagagcgggtttgccagcagaaacaggggctgacggacgcgctggacgagatggtgaaaaccgggattaacacggtctattttcaggttaaaccggacggcacggccctgtggcgctcaaacatcttgccctggtctgaggtgttgaccggcaccgttggccaggatcccggctatgatccgctggcctttatgctgcaagaagcgcaccggcgcggcatcaaggtgcatgcctggttgaacccttatcgggtttccatgaatacccgcccacagacgattgaggcactcaatcatacgctgcagtcgccgccggccagcgtctatgcgctgcatcccgactggatacgcaccgccaacgagcgcttcgtgctcgaccccggcctgcccgacgtgcgcaactggatcaccggcgtggtggctgaaatagtcaaaaactacgatgtcgacggcattcagtttgacgattacttctattacgaaacgccgcaatcgccgctggatgatgaacgaacatatcgcgcatacggcaaaggatttgcagacaaagccgcctggcgcagagacaacacgctgcaattgataaaacaggtgtcagccgccgtcaaagcattgaagcccgaggttgcgtttggcgtcagcccggcgggcgtatggcgaaacaaagcggacgatcctgacggttcggcgacgcgggcaggcgcgccatcgtatgatacggcctatgccgatacgcgccagtgggtaaaattggggctgctcgattacatcgcaccgcagctgtattggccttttgatcgtgaaattgtccgctacgacgtgctggccaactggtgggccgaggtggtgaaaggcacgtcggttcggctctatgccggggtggcgctgtataaagtgggtacgcctgcggctagcgagccggcctgggccgtcgagggcggcgttcccgaactgaaaaggcagctcgatctcaacgaaagcctgccgggaatggggggaaccatcctgttccggcaacgctatctgactgagccgcaaacggataaggcggtggcgtacctgcgcacccgctggaaaaccggtcaataa

SEQ ID NO: 423120 - DNA, 1299 bp, Serratia marcescens
gtgacaacccctgtgcgttctgcggccgcgatgccgtcgacgctggccgccaacgatgacgcggccgctgcgccaaaagtaaaacgctccaccctcaacaacaaactcccctacatcgaacgcggcacgccgcagtttatgcgcgtaacgctggcgctgttttccgccgggctggcgaccttcgcgctgctctactgcgtgcagccgatcctgccggtgctgtcgcaagatttcggcgtctcgccggcggaaagcagcctgtcgctctcggtctccaccggcctgctggcgatcggcctgatgttcaccgggccgctgtccgacgccatcggccgcaaatcggtgatggtggtggcgttgctgctggcggcggtctgcacgctgatctgcgcctttatgaccagctggcatggcattttgctgatgcgcgcgctgatcggcctgtcgctgagcggcgtggcggcggtcggcatgacctatctcagcgaagagatccatcccagcttcgtcgccttctcgatggggctgtatatcagcggcaactcgatcggcggcatgagcggccgcctggtgaccggggtgttgaccgacttcttctcctggcgcgtgtcgctcggagttatcggcctgttcgccctcgccgccgcctgcatgttctggcgcatcctgcccgcctcgcggcattttcgcgccagctcgctgcgcccgcgcaccctgctgatcaatttcaaactgcattggcacgataagggcctgccgctgctgttcgcggaaggtttcctgctgatgggcagcttcgtcaccctgttcaactacatcggctatcgcctgctggcggatccttaccacctgagccaggcgatcgtcggcctgctgtcggtggtgtacctcaccggctcctacagctcgcccaaggccggcgcgctcacctcgcgcttcgggcgcggcccggtgctgctggcctcgatcgtaattatgctgatcgggattctgattaccgcgctgccacaggtgccggcgatctttatcggcatgatgctgttcaccgccggctttttcgccgcccactcggtggccagcagctggatcggccgccgcgcgcgccgcgccaaaggccaggcgtcgtcgctgtatctgttctgctattacgtcggctcgagcgtggccggcaccctcggcggcgtgttctggcacagtttcggctggaatggcgtggcggcgttcatcagcctgatgctgctgctggcgctgctggtagtgcattacctgaaacgcctgccggaagcggcgcgcctttga

SEQ ID NO: 423121 - DNA, 891 bp, Serratia marcescens
atgaatatcgaattgaggcacctgcgttactttatcgccgtggcggaagagctgcattttggccgcgccgccgaacggctgcgcatctcccagccgccgctcagccagcaaatccaggcgctggaggagatggtcggcgcgcggctgctggcgcgcaacaaccgcaacgtcagtttgacccaggccggggagatgttcctcaaagaagcctatcaggtgctcgatcaggtcgggcgcgcggcggaaaaggcggcgcgtctggatcgcggcgaactgggggaaatgaccatcggctttacctcttccgcgccctttatcggcgtggtgtcgcgcagcctgcgcgcctttcgtcagcactcgccgcaggtgcatatcaaaatgcgcgaaatcaacaccaaacagcagatcgaaccgctgctgaacggtgagctggatctgggggtgatgcgcaacacgcggctgccggaagcgcttcactatcagctgctgctgcgcgaaccgctggtggcggtggtgccgcaagggcatccgctggcggaaacgcccggcggcgcgctgcggtttcaacatctggcgcaggagccgttcgtgttcttctcgcgtgaagtcggcaccgcgctgtacgacgaaattctgctgctgctcggcaaggccggcataactccgtacatcacccaggaagtgggcgaagcgatgaccattatcgggctggtttccgccgggttgggggtgtcgattctgccggcctctttcgcccgggtgcgggtggacggcgtgcgctatttgccgctggcggaacccgacgccaccaccgaagtgtggctggtgcatcaccgccggcggccgctgaccgctgcggcgcaggcgctgatggcgttgatgctcaaatga

SEQ ID NO: 423122 - DNA, 1218 bp, Serratia marcescens
gtgattgcggttgggcagcctgggcatatcgatcaaatcaaacagactaatgcgggggcggtttatcggctaatcgatcaactgggcccgatttcgcgcatcgaactgtcaaaacgcgcgcagctggcgcccgccagcatcaccaagatcgtgcgcgaactgctggaagcccacctggtcaaggaaaccgagtaccaggaaatcggcagccggggccgcccggcggtgggcctggtgctggacaccgaagcctggcattacctgtccgcccgcatcagccgcggcagcatcacgctggcgctgcgcgatctcagcagcaaactggtggtggaggagctgctgccgctggcggccgaacaccccgaaccgctgttgaaacgcatcctgaccgaagtcgaccaattctttatccgccaccaaagcaagctggagcggctgacggcgatcgccatcacgctgccgggcatgatcgacgtgcagtccggcgtggtgcaccgcatgccgttttacgacgtgctggagatgccgctcggcccggcgctggaaacccgcaccggcctgccggtttacctgcagcacgacatcagcgcctggaccatggccgaggcgctgtacggcgcctcgcgcggcagccagaacgtcattcaggtggtgatcgaccacaacgtcggcgccggggtgatcaccggcggccatgtgctgcacgccggcagccacagcgtggtggagatcggccacacccaggtcgatccttacggcaaacgctgctattgcggcaaccacggctgtctcgaaaccgtggccagcatcgaaaacatgctggagatcgcccagcagcggctgagcggctcgatgagctccagcctgcacggcgcgccgctgaccgtcgaatcgctgtgcgacgccgcgctggcgggggatcagctggcgcgggacatcattctcggcgtcggccacagcgtggggcgcattctggcaatcatggtcaacctgttcaatccggagaagatcctggtgggctcgccgctcaaccgcgcggcggagatcttgcatccggccatcgcctcctgcattcgtcagcaggcgctgccggcctacagcgagcaggtcaaggtcgaatccacgcagttcttcaatcagggcaccatgcccggcgcggcgctggtgaaagaggcgctgtacaacggttcattgctggtgcagctgctgcagggctaa

SEQ ID NO: 423123 - DNA, 759 bp, Serratia marcescens
atgagggcgcatcccctagaatttttccgcaagacttcttcgccgccggtgcggcgacacattgttaacggggcattctggggcattttattcatgttgaagcgtttatttgtgacaggcacggataccgacgtcggtaaaaccgtggtttcccgcgggttgatgcaggcgctggccgccgatggccgttcggtggccggctacaagccgatcgccgcgcgctgccaggaaaccagtgagggcatccgcaataaagacgctttggtgttgcaggccacctcaaccctgccgctgtcctacgaggagatcaatcccatcacctgcctggatgaggtgtttcacgcgcatgcaaccgaggacatcaactatggcgtgatgagcagcggtctgcgcgatctgtccgccaaagccgacacggtggtggtggaaggcagcggcggttggcgggtgctgatgaacgatctgcggccttacgccgagtgggtggtgcaggaacagctgccggtggtgctggtggtgggcatcaaactgggctgcgtcagccacgcgctgctgaccgcgcagtcgatcatcaacgacggtctgccgctgctgggctgggtcgccaaccgcatcaacccggggttggcgcactatgccgaaaccatcacggcgctgcagcagcgtattcccgcgccgctgctgggtgaaattccgtatctgccgcgcgcggagcagcgcgaactggcgcactacctcgatatttccacgctgctgtaa

SEQ ID NO: 423124 - DNA, 495 bp, Serratia marcescens
atgacccccgatctgctagtgcgcatcctgttaaccggcgccggcgccaccctctgtatggatctgtgggcgctgctgctgaagcggcgcttcgacatcccttctctcgattatgcgctggtgggccgttggtttctcggcatgttcgacggccgctggtttcacgccaccatcgttacggcgccgccgcgccagggggagagagaaatcggctggatattgcattacgccatcggcatcgcgtttgcctttatcccgctcgggttggcgggcagcgagtggtatgcggcgccggagccgctcatcgcgctgttgagcggctggctgagcctggcggcgccgtttctggtgatgcagcccgcgctgggctttggcgtggcggcggcgaaaaccgcctacccgcgaaaagcgcggctcctcagcctgctcacccacacggtgtatgggctgggcctgctgatcgccgcccggctgttggcgacgctctgcgcctga

SEQ ID NO: 423125 - DNA, 393 bp, Serratia marcescens
atggcaaaagaactggatatcggcgcggtggcgcgcctgagcggagtcgcgccttccgcgctgcggcattacgagaagaaagggctgatcgcgtcgacgggccgccacggtttgcgccgccaatacgccgccggcgtgcttgaccaactgcggctgatcgcgctggcgcgcctggccggttttacgctggacgagatgagcgccttgtttgacgaacggggcaagatagcgctcgatcgcgggctgctggcggcgcgggcggatgaactggatcgccatatccaacgcctgatgcaggtgcgcgacgggctgcgccacatggtcgattgccctgaacccgagcacctgcagtgcccgcagttcaggaaaatcctgcagcagggcgagttctaa

SEQ ID NO: 423126 - DNA, 1302 bp, Serratia marcescens
atgaaaagattggtccatctgcaccactatcgcgccctgttgcgcagcctgtttatcgccgtgttcatcggcgtcgccgccgccctggcggtgtggctgttccaccgttcgatgattggcctcgagtggctgctgctcggcaatgccgacggcagcctggtggccgccgccgccgcgctgcccggctggcggcgtgccctgacgccggcgctgggcgggctggcggcgggcctgctgctgtatatgcatcagcgctaccgccaccagcgcccggcggcgcccaccgactatatggaagcgatcgagaccggcaacggcaagctggacaccggcgccagcctggtgaaatgcctggcgtcgctgctggtggtgtcgagcggcagcgccatcggccgcgaaggcgcgatgatcctgctggcggcgctggtgggctcgctgttcgcccagcgctttacgcacgagaaagagtggaaactgtgggtggcctgcgccgccgccgccgggatggccagcgcctatcatgcgccgctggcgggcagcctgtttatcgccgagatcctgttcggcaccctgatgctggcctcgctcggcccggtggtgatcgccgcggtcagcgccctgctgatgaccaacctgctcaacggcggccaggcgccgctctatctggtgacgccgctcgccgcccccttgccgacgcaatacctgctgatggcgctggtcggcgtggtggccggcgccggtgggccgctgtttttatggctgatgaccgccaccggccatgccttccgctccctgcggttgaagccgccgttgcagctggcgctgggcggcctgatcgtcgggctgctttcgctgctgttcccgcaggtgtggggcaacggttacagcgtggtacaggcgctgctgatcgcgccgccgggggtattgctgctgggggcgatcctggtgtgcaaactgttggcgatcctcgccagcagcgggtcgggcgcgccgggcggggtcttcaccccgacgctgttcgtcggcgccgcgctcggttcgatcatcggtcagctgtttggcctgtggccgggcatggatgcggcggtgccgctgctgctggcgctgaccggcatggccaccctgctggccgccaccacccatgcgccaatcatggcggcgctgatggtgtttgaaatgaccggcgaatacgcgctgctgcccggcattctgctctcgtgcgtgatcgccaccaccgtgtcgcgcggcctgcggccggtgtcggtgtatcactcggcgccgccgcccaaacgcgaggcttag

SEQ ID NO: 423127 - DNA, 1140 bp, Serratia marcescens
atgattaaattggaaaatctgaccaaacagttcatgcaaaagaacggcacgccgttcaacgccgtcgacaacatcaatctggacgtgccggaaggcgaaatctgcgtgctgctcggcccttccggctgcggcaaaaccaccacgctgaagatgatcaaccgcctgatcgaacccaccggcggcaccattctggtcaacggcgaagacaccagcgcgctggataccgtcagcctgcgccgcaaaatcggctacgtcatccagcagatcggcctgtttcccaacatgaccatcgaggagaacatcaccgtggtgccgcgcatgctgggctgggacaaaaaacgctgccacgatcgcgccgaggagctgatgagcatggtggcgctggatcccaagcgttttttgcaccgctacccgaaagagatgtccggcgggcagcagcagcgcatcggcgtgatccgcgcgctggcggccgatccaccggtgctgctgatggatgaacccttcggcgcagtggatccgatcaaccgcgaaaccatccagaacgagtttctcgacatgcagcgccagctgaaaaaaaccgtgatgctggtgagccacgacatcgacgaagcgctgaagctcggcgatcgcatcgcggtgttccgccagggcaaaatcgtgcagaacgccagcgccgatgagctgctggcgcgaccggccaacgacttcgtcgcttcctttgtcggccaggatcgcacgctgaagcgcctgctgctggtgcaggccggcgacgtggccgatcaacaggaaacggtgacggtgcggcgggagacgccgctagtggaagcgttcgggctgatggacgatatcgacgcccgctcggtgacggtggtggacgccgacggcaagccgctgggatacgtcaagcgccgcgaggcacgcggcgcgccgggcgtctgcgccgacagcctgcaccatttccgcgtcaccgcccgtgcggaggagaacctgcgcgtggtgctgtcgaagctgtacgagcacaacacctcctggatgccgatcgtcgatgaagacggccgctacagcggcgaaatctcgcaggattatatcgccgactacctcagctccggccgcacgcgccgggtgctgacgccgcaataa

SEQ ID NO: 423128 - DNA, 651 bp, Serratia marcescens
atgaataccatactttacgcctggcaaaactgggcctatatcgccggattgacgctggaacatctgctgctggtcggcgtcgccgtcggcctggcgatcctgatcggcgtgccgctcggcgtgctgatcgtccgccacaaatggctggcgacgccggtgctgagcctggccacgctggtgctgaccgtgccctccatcgccctgttcgggctgatgatcccgctgttttccttaatcggccacggcatcggctacgtgccggcgatcaccgcggtgttcctttactcgctgctgccgatcgtgcgcaacacccacaccgcgctcgacaacctgcccggcgggctgcgcgaagccggccgcggcatcggcatgacgttctggcaacgcctgcgctgggtggagatcccggtggcgctgccggtgattttcggcggcattcgcaccgccgtggtgatgaatatcggcgtgatggcgatcgctgcggtgatcggcgccggcggcctcggcctgctgctgctcaacggcatcagcagcagcgacatccgccagttgattaccggtgccgtgatgatcagcctgctggcgatcgtcctcgattggttattgcaccgcttgcaaattgcgctaacgcccaaggggatccgctcatga

SEQ ID NO: 423129 - DNA, 909 bp, Serratia marcescens
atgactcgatggttacaacgcctccgccacgcgctgctgttctccttgctgatgaccggcgcggccgcctgggccgccccgctgacgctggcgagcaagaactttaccgaacagcgcattctgtcggcgatcaccgtgcaatacctgcgggccaaaggttttcaggtcgtacccaagaccaatctggccacggtgatcacccgcaacgccatgataaacaaacagatcgacatgacctgggaatacaccggcacctcgctgatcatctttaaccacatcaataagcgcatgacgccgcaggaaacttacgacacggtgaaaaagctcgacgccaaactcggcctggtgtggctgcagccggcggacatgaacaacacctacgccttcgccatgcagcgccagcgcgcggaaaaagagcagattcgcaccatgtcgcagctggtggccaaagtggaacaggtgcgtagaaccgacccgaaacacaactggctgctggggctggatctggagtttgccggccgctcggacggcctgaagccgatgcaggcgctgtacgacatgccgctcgatcgtccgcaaatccgccaaatggaccccggcctggtctacaacgccatccgcgacggcttcgtcgacgccgggctggtgtacaccaccgacggccgggtgaaaggcttcgatctgcaggtgctcgaagacgacaagggttacttcccgagctatgcggtcacgccggtggtgcgcgccgacgtgttgcaaaacacgccggggctggaagaggcgctgaacacgctgtcgaaacagttcaacaatcaggtgatcaccgagcttaacgccagggtggatatcgactaccagacgccgcaacaggtcgccgacgcgttcctcaagcagcgcggcctgatttag

SEQ ID NO: 423130 - DNA, 717 bp, Serratia marcescens
atgcacaagtcagcgccataccggcgcctgctcctcgggagcctgctgtttatcgccgtcgtcgcgctgctggtttacggcatcggctgggaaaccctcaagtcgcgccgggaagatttgatttacctcggccagcagcacatgttcctggtggcgtgctccatgctgctgtcgctgctggtcggtattcccagcggcatcctgctgagccgccctttcgcccgccgctgggcggagcacgtgatgcagatctttaacgtcggcaacaccctgccgccgctggcggtgctggcgctggcgatggtgatcatcggcatcggcgaccggccggcggtggtggcgctgttcctcgcctcgctgctgcccatcgtgcgcaatacctatgccggcctgcgttcggtgccgccggcgctggtcgaggccgccaacggtattggcatgaccgccgggcagcggctgcgccaggtcgaactgcccaacgccctgccggtgatcttcgccggggtacgcatcgcgatggcgatcaacgtcggcaccgcgccgctggcgtttttgatcggcgccagcagctacggcgaactgatcttccccggcatctacctgaacgacttcccgacgctgatcctcggcgccgccgccaccgcgctgatcgccctgctgctcgatctggcgctggccggtctcggccgccggctcagcccgcacaccgcatcctga

SEQ ID NO: 423131 - DNA, 1488 bp, Serratia marcescens
atgacaaataacgtttcacccgcacccatcgcccaccgcccgctgatcctgatcgcctgcatgctggcgatgttcatgtcggcgatcgaagccaccatcgtcgccaccgccatgccgaccatcatcggcgatctcggcggcttttcgctgctgggctgggtgttcgcggtctatttgctggcgcaggcgatcaccattcccatctacggccggctggcggatctctacggccgcaagcgggtgttcttcttcggcgccacgctgttcctgctgggatcggtgctgtgcggcttcgcccccgacatgtattggctgatcggcttccgtctgctgcaggggctgggcgccggtgccatcatgccgatcgcctccaccatcatcggcgacatctacagcgccaccgagcggccgaaggtgatgggctacctgtcgagcgtgtggggcgtgtcggcgatcatcggcccgctgctgggggcgtttatcgtgcagcacctgccgtgggcgctggtgttctgggtcaacctgccgatcggcctgctggcgatgttcttcctctggcgctatctgccggcgcatcagcagctgcggcggcacgcgctggatctggcgggcaccgcctggctgacgctgtttgtttcggcgctgctgctcgcgctgttgcagatggaaagcctgggatggtgggtggcgccgttgctcgcgctggcggcggcgtcgctggcgctgcttgtccgccaggagcggcgcgcggtcgaaccgctgttcccgctggcgctgtggcaaagccgggtgatcgtcgccggcaacatcggcgggctggtgatcggcgcggcgatgatgggcattagcgccttcctgcctactttcattcagggcgtaatgggcggctcgccgctggaggcgggcaccacgctggcgctgatgtcgatcggttggccgctggccagcacgctgagcggccgtttgatgctgatgacctcgtaccgcgcgacggcgttgctgggtgcgctgctgttggtggcgggcggcctgatcctgctgatgctgcagccgaccggcggcctgctgtggggccggggggcggcgtttatggtcggcgccggcatggggttgtgcaacaccacgtttttagtgtcggtgcagaacgcggcgcattacagcattcgcggcatcgccaccgcctgtacggtgtttacccgcatggtggggtcggccatcggcaccgcgattttgggtgccacgctgaacctcaacctgcagtggcgtttgccggagattgacgatccggtgcagcggctgatggagccggcggtgcggcagagcatgggaagcgaagcgctggcgcagctgatccagcaggtggcggcttcgctgcattgggtgtttctggtgtcggcgttggtgtcgttgctggcgttggcggcggcgatgctgatcccggcgcgttgtcgaccgcagggcgaaggggaagaggcggagcaggcgtaa

SEQ ID NO: 423132 - DNA, 300 bp, Serratia marcescens
atgaagaaaacgctgatattaaccgctgtcttgctggccggcgcgccgttggcggccctggcctcctgcgaaagcgtgaaagcggacatttcgcagaaaatcatcaataacggcgttccggagtccggcttcaaactggagatcgtgcctaacgatcaggccgatcaagcgggcggccaagtggtcggccactgcgaaaacgacacccagaagatcgtctatacccgcctgaacaatggcgacgatcgcggtgacgcggcgcagaccggcagcagccaggatacctccaacacgcagtaa

SEQ ID NO: 423133 - DNA, 369 bp, Serratia marcescens
atgaaaacattttcgacccaacgactgctgcgcgggatgctgccggtcgccatgctggccgttatgggcgcctggcaggcgccggcgctggccgccacctgcacgcagggcagcacctgcgtcaccgtcgatggcaaaggcagcggcgcgatgagcaccgaagaagcacgccagagcaaagagcagtggaatgataccaaatccctgcgccacaaggttaacactcgcgtcgagaaagagttcgacaaggccgatcgcgcggcggatgacgaagatcgctgcaacgacagcaacaacgtcaacgcgtactgggagccggacacccgtaaatgtctggatcgtcagaccgggcgtcggattaatccttaa

SEQ ID NO: 423134 - DNA, 1203 bp, Serratia marcescens
atgtcaaatcttgcgcttgatcttaaaatagaaggcgacttcatagattcttttatttactctggggttttatacctccttgattctgaatttaggttcacatcatattcttggaactctttatgtgattttatcttaaaaagaaatggattcaaatttagcgatgctagctttatcttaaaatactcgaaagacaataggaatgagaatggctcagcgcatacaatagacaccaacattagtggaagtgagcttcttttgctgaaaaaagattctatcgatattaacacttggccatccgatataaacttattctcaaataaattatatttctctggtgatgatggtgtttattttataaatacaaatcatagcactgctgagtttgacaagagaaaaatgcaaaaagttttcggcatgaaaagtttctctatatctcctaataccaataatagacttgctttagcagttggccgtgaaggcgtttttacttcaactttaaaatatggaattaaagtacctgcagaatctaaagtatccggtagcagttgtatcgatatagattggatgaatgataatcttttcattaactcagatactctcgttgttgaacagttttgtaagattgagaatagaaataacgttgagtctaatgatttattttcatcaataaaaagcgaaatatcaaaagaatatgaagaagaacatgttatttctgaagagttatctaagaaagcctacaggaaatatgttgaggcaattttaaataagcctcctgaaactatgcaattaaaggaaaattataaatatggttggtctagtggtgattgcgatttcatattaaataaagacgatagaatattagctcagaataatatttctggtgagaaaatagatatttcattgaagggtcgctcctcagatttaattaaagtgcgaacttcaggctgcggaaccattatagaatccaaagatggtagactattcatgctttcggagcatgaagttaaagatatatcgagtgaattcgtttcttggcgagtttaccctagggcaaaaaaccatgccaatcacttgcacataataaacgatgaaaatataaacattaaagtttataacaaaacacattccatccttaatacttttctttctaagggaaatgatgatgattacaattacaaaatatccagcctgatcagctag

SEQ ID NO: 423135 - DNA, 945 bp, Serratia marcescens
atgggggaaaatcccccgcaaaatcgactggagagccgcgtgccgagcctgatttattcctttgcccaactggaagccttcaccgccgtggccgagcacggcagcctggcgaaagccgcgctcaagctgggcaaagaccgcacgacgctgcgcgatttgattgattttctcgaggatggcttgggctatgcgctgttcctgcgcgaggggcgcagcctgcacctgacgccggaaggcgagcagctgcaacgccaggcgcacttactgatgcgccaggtgaaagcgtttgaggcatttgccaaagacgtgcccaagagcgcagcgcaggaaatctcgttggtctacgatcccttcacgccccgcgcgctgctgcaggcgctgattgccgcgatggcccagcgcaacacgcgcctgagcctgattaacgcctcgcgcgacgaagcggaaagcctgctggcaagcggccaggccgatctgggcatctgccaggcgcgccaccgcagcgtgggcgacgccatggagtggcgcgccttaggggcgatagagatggatttttatgcgtctaaagcgcttttccccggcgcggaacagccgctttcgctgctggagctctcgctcacgccacaggtgatcatgcacccggattctgacgaaccggtggcgcgccgcctgcaaatttccgggcataccattttcaccaacgagctggagatgctgcgcgccctgctcgaacagggctgcggctgggggttcctgccgacgcacatgcatgccgaacagtggaaaaacgtcaacacgctgcgcaccgaagtgggcagccaggggattagccaaaccatggtaaccatatggaagccgggcaatgaccggcgggcgctgattgatgagacgttggggttgttgccgggggtgtggcgggggttgggggtgaaaagtcgcggttag

SEQ ID NO: 423136 - DNA, 1308 bp, Serratia marcescens
atgaaaagcaaagtgtttaaccgcagcctgctggcgggcgttgtcatcagtctctgcagcggcctgttggcgcccgccgcgctggccgcctgtgcgggcaccgaactcagtgcctgtcccgcgcctttcgatgcgcaattgccggacacgcataagatgctcacctggagccagagcgaccgggtgatcggttttcgtaatgactaccgcaactatgccggggatgtgtttcatcacggcaacgccacgccgctgcttactgccgctaaacagctaacaaatgccagctatcgggtgaatggcaaaacctacagcctgcaggattacctgcagcgccagaacgtcagcggcatgctggtattgaaagacggcaaaatcgcctggaaatatctggggcagggcaataccgacaccacgctgtggacgtcgcgctcggtgggcaaatccgtggtcgccacgctggtgggcgtggcgattaaacagggcaagatccactcgctcgacgatctcatcacgcaatacgaacccgatctgaaaggtaccgcgtgggacggcgtgaccctcaggcagctgatcacccacacctccggcgtggcgtggaatgaggattacaccaacccgaaatcggacttcgcgcagctgaccgagtgtgaagccaggcccggcacctatgcctgcgtgcgcaagctggtggccggtttgcaccgtgcgcacccggccgggcagaactggtcttactcctccggcggcgcgtggctgctgggcgacgtgctggagcgcgccaccggcatgccgctggcggcctatctgcagcaaagcatctggcagccatacggcatggcgagcgacggcgtgtggcatgcctacgccaaaggccagcacgacgtgggcgcgcacggcttcaacgccacgttggaagactgggggcgcttcggcgagtttatcctgcataacgggacgttgccgaacggcaaacagatcttgccggctgattgggtagcccagtcgtccaactggacgcgggcggctggctcggtgtcggcggcccatcctgacgggatttacggcttccagtggtggaacaacgaagtgccggtgaatgcgaccaacgttgagcctactccgcaggcatccctgaagcattccctgtgggcgctggggatcttcggccagatgattatggttaatcaggcagagaatttggtgatcgtccagtggtctacctggccgcaggcggagccgtccttcagcgcgcaaccactggaggcatcgctgatgtttagtgcgatagcgaaggaattgcgttaa

SEQ ID NO: 423137 - DNA, 705 bp, Serratia marcescens
atggaatatgaaccacaggatttttttgaaggccgtcaactggaagtcgcgcagctgatttatgatggcgatgaagtgaaactgaaagaaaagcttccctctataagcaaggaagaactgaatcgaccagtgaaagcagacatgacactgctgttttggtcggtgttgaactcaatctatgataaaaacacgccggaaaggctgaaaataataaccgacctggtaaaaagtggcgcagacccgctgcaacccagaccagagggcgggagcagcccagcggaattcgtcatgaaagccgacaaggggatttgggtcaaagccatgctcgacggcggtttatcaccaaacgcgaaagacaaggtattcaatgaacccattgtattccaaacaatcaaagccaaaaaccctgaaacgttaaaggtgatgctggattatggcgcagacataaatacaagagactcattgggaaacaccttgttaataagctcattggattctcattcgtttgatcatacgattcttttgttagagagaggtgcggatagtaaaatcaaagggaagtttggttggactatgggcaatcagcttcagcgctttatagatagaggcgtaggagatgccgaggataaagagaaaattgacaagataaaagagttattaattaaaaagggtggtgactggcctccactacctgtagagaattga

SEQ ID NO: 423138 - DNA, 690 bp, Serratia marcescens
atggaatatgaaccacaggatttttttgaaggccgtcaattggaagtcgcacagctgatttatgatggcgacgaagtgaaactgaatgagaagcttccttcaataagcaaggaagaactgaatcgaccagtgaaagcagacatgaccctgctgttttggtcggtgttgaactcaatctatgataaaaacacgccggaaaggctgaaaataataaccgacctggtaaaagctggcgcagacccgttgcagcccagaccggagggcgggagcagcccggcggaattcgtcatgaaagccgacaaggggatttgggtcaaagccatgctcgacggcggtttaccgccaaacgcaaaagataaggtattcaatgagcccattgtattccaaacaatcaaagccaaaaacccagaaacattaaaggtgatgctggattatggcgcggatataaacatcagagactccttgcaacaaaccttattaatggatgctttttttagctcagcctttgagcatatgaccttactgctcaatcggggtgcgaatcctaacccggtaaatataaacaatctttcgctgttaacagcagtgaatcggcaaataaaagacagccaagatggctcagaatacaatgtacagtgtaagaaaatactcgagctcatgcttttgaaaggagcaaaggaaacacagtaa

SEQ ID NO: 423139 - DNA, 1503 bp, Serratia marcescens
atgttttcccgtttgaaactgctgtatatcgccgatgatattatttcgcctgatgaattcccccgtatagtcagcccttccagcgcctgtcacggcctttcatacatgccggacaatgacattctgtcgcttttttctggttttcgcggtggcgaacggatccgccgtgaagtcggcgttacgcaaaacggaataagctctaacctgcgcgcaagagtgcagagcgacctgatgagcggcgttgtcgtagcggttgaaacccggcccggcgtgttggcgacgatggggccattttacgccgacatcgacggctacctgataccgcagggaagacaagagcccaactacccggtggacaagatagtgaagcggtacgaagaggccgtgaagtcttatggcggccgccgggcgcgcccgtccgtcttccccgcacaagtcacgcgggccaaaccggcccttggcccggatatcccggcgcaaggtggaagagcctcacagtcggtcgtgtctggccccttgaccaaagcgcaacgctggcaggagcgaaaatacctcattggccgcgggcaacggagtatctacccggacgcccgaatcgcctcggaacgcttggcggcaaacaatgtcgccgtcgagaaggcaaagctggcggagaatatctacaagaccacgaatccgctaaaggatacacccggcgttcccgagggctggaaagatatcagtaacgataatgcggccctgagtaaaattgggctaaacagaaatatgctcttcgacagagatgaatcgccggattttttggcaagggtatatcaacctgacaacagtatttttggtaaagagatgaatccgacggtcgtgttcagaggatcaagagcgccagagttcccggagggaatcggcagcgccgccaaaaaggcccttaagggcgatttgtcaggaattaaaaatgtgaatgactggataaataatggcgcgcaggggatgggggcgaactcagattattataagcaggcggttaaaataggattacaagtaaagaactcctccggtgtcgatatttctggtcattcattgggcgggggaatggcctccgccgcatcaatgaccagtggaaaacccgcctggacgtttaatgcagccggactccatcatggaactgtagggaaatacggagctgaaatgattggttcaaccaagaacatacaggcctatcgagttgagggagagctgttaaccacgttacaggaggttaataacgaaagtgactatgagcttataagaaatgccctgcccgatgctttacaaaaaccctggggcgtagcattgcctttcaccttgaaagagtggtcatcactggcggtgcctgatgccgctggcataccgcacactcttgctggagggacaggaaccctgctcgataaacacggtatagaccagacaataaagttgattgaagatcagaaagacgaggatgtcgccactatcagggggagaatatga

SEQ ID NO: 423140 - DNA, 1080 bp, Serratia marcescens
atgactatttttagccgttacctgatccgcaacgtgttcatcggcttcgccgccgcggccgggctgctcattccgctgttcaccacctttacgctgatcaacgagctggaggacgtgaccccgggcggctaccgctggcagcaggcgctgctggtgaccgtgctgaccctgccgcgcagcctggtcgatctggggccgtttatcgcgctgctcggcggcatcgtcgggctggggcagctgtcgaaaaccctggagctgaccgcgatccgctccgccgggatgtcgatattccgcatcgcgctggtgatgctcgccgccgggctgctgatgaacctgtcgctcggcgccctcgatgaatgggcggcctcgccgctgcagcaacgcgcgctgcagatgaagaacaacgccctggcgcagtcgaacaataacgacgtcaccgttaacccgctgtgggcgcggcgcggcaacgagtttgtgacggtcaaaaccgtcgatgagaacgaccagccccacggcatcgagatcttccgttatcaggccaaccgcgcgctggaatcttacatttacgccgacagcgccagcaccgccgccgacggcagctggctgctgcacaacgtgatgcagaaaagctggcaaggcagaaaagagacgattgagcggcatagcagcctgccgtggcgctcgctgttcgccgtgccgagcctgaaagagctgactctgccggccggcagcttctcgctgcaacagctggagcgctatatcgattacctgcagggctcggggcagcccagcaccgaataccgcctggcgctgtggaaaaaactcggccagcccctgctggtgctggcgatgattttgctggccatcccgtttacctttaccgccccgcgcgcccccggcatgggcagccggttagcgctcggcgtcatcatcgggctgctgacctacatcgcttaccagatcgtcctcaacctggggttgctgttcaccctcaacgcgcccttcaccgcccttgccccgccgcttttgatcctggcgttggcgctggcgctggtttatcggtttgatcggcggggttaa

SEQ ID NO: 423141 - DNA, 1071 bp, Serratia marcescens
atgtctttgattgaacgctacatcacggttgagatccgccgcctggtgatgatgagcgccgggtttctgatctttatgttcgccagctactccgcccagcgctacctgaccgacgccgccaacggcacgctggcgctgcgggtggtggccgacgtggtgttctataagtcgctgatcgcgctggagatgatattgcccgtcgcgctgtatgtctcggtggcggtggcgctgagccagctgtacagcgatgcggaaatcaccgccatgctggccgccggcgccagcccgctgcggctgtacaaggcggtgctgatactggccgtgccgctggcgatagcggtcacgctgctgtcgctgtatggcaggccctgggcgtacgccaatatttatcagctgcagcaagagtcgcagtcggtgctggacgtgagccacctgcaggccgacaaattcaacgtcagcggcaacggccgcatgatcctcgccaaccacgtcgacaaaacggccaaccacctgacggacgccctgatttatgtgcgcggcggccatcataccaacctgtaccgcgcgcagtcggtggaggtgctcgacgcctcccccgccagccccgccgtgcggctgaaaaccggcaccgcctatgtgctggatcgtcagggcaccgacgacaacgggcagaattacgacaacttcgacatcgcgctcaaaccgttcgtacccagcgccgagagccggcacaaatcggcctcgccggcggagctggcgcgctccgccgatccgggtgacgccgccgaactgcaatggcgcgaaagccgcgggctgaccaccgtgctgatggtgctgctggcgatcccctttagccgcatcaagccgcggcaggggcgctacgccgcgctactgcccctgacggtgctgtttaccgcgattttctatggcggcaacatttgccgcacgctggtcgccaacggctctgtgccgacgatccccggcgtttggctggtgccgctggcgatggctgccggcatcgccctgctgctggcacgcgacttatccctgctgcggaaaccctcccgatga

SEQ ID NO: 423142 - DNA, 567 bp, Serratia marcescens
atgacgttgcgtcgcttactgatcttcacgctgctgctgtcgccgctggcgacatccgcgcataacttcgtgcagggccggccggtggcgccgatcgccatcgccgatcgcggcgaactgctgctgcgcaacggcgatttcagctaccggccgtggaacagcgcaaaactggtgggcaaagtgcgggtgatccaatacatcgccgggcgcacctccgccaagaagaagaactcgctgctgatcaacgccgtcaaggacgcgaacctgccgggcgatcgcttccagcccaccaccatcgtcaacaccgacgacgcgataccgggctccggctttttcgtgcgcggcaagatcgagaaaaacaagcggaattacccttgggcgcagttcatcgtcgacagcgacgggctggggcgcatggcctggcggctgccggaggagagctccaccatcgtggtgctggaccaggccgggcgcgtgcagtgggcgaaggacggcgcactcaccccgcaggaagttgatcaggtgatcgccctgctgcgcgcgctgatcgcgcgggagacgccatga

SEQ ID NO: 423143 - DNA, 870 bp, Serratia marcescens
atgaccgctcacgataattggaagaagttctccgccgaaaccacccaggcgctgtttgtcgcggtggaagaagacgacctggttgaggcgaatatcagcctgccgcagcagatcgatctggaatgctcccccgagagcatccgggacaactacgcgctgtgcctgcagttttgggaagacggcttttcccgccgcgagctgctgcaactggtgaacggtttcctgcaagacccgcagttggcagcgcccacccgcatgcgctacaaatatatccgcgcccgctacaagcacctgcgcttcgcccagcagctgtacggcgccccccaccgcgccaaccgcctgttccacaccaccactgtggtgctcggccattttcaggacgcgtttcgcaacggcaaccagaagaacctgacgctgtacggcaacctgctgcggctgctgctcagcaagccggtatggtcatatgtgcgctatgcgctgcgccacacccgcctggaaagcgcacagggctttatcgcctaccgccaggagcaaatgcgccagctgcagacgctgatcgccagcccggcgctgaccgggcaccagttccacaacgtgcgcaaaatcgtcagccgccaggtgtcgttttacgacacgctgagatcgatcgaccccgacaaccgcgaggcccggcagatctcgcgcttcctggcggcgattaacggcctgatgggcgaccggcacgacgtgatggtggcggacaaactggccggcggcgatatctacgatcggccggcgatcctggatatcgacattcgccagcgcctggagctgctgctggcgcgctttccgctgtcgttttccccgccggccgtcgcggcgggcagataa

SEQ ID NO: 423144 - DNA, 1338 bp, Serratia marcescens
atgaaacggtggttttccgatggtgcgtttcgctccattttacgtaatgccgcctatttaggctccggcagcgtggccagcgcgctgctcggcctgctggcgctctcctgcgccggtaaaggcatgtcgcctgaaatgttcggcgtgctggtggtgatccaggcctataccaaagcggtcagcgatttcatcaaattccagacctggcagtttgtggtgcaattcggcaccccggcgctggagcatcaaaacaccgggcgcttccgcgacgtcgtcgccttctccttcgggctggatatcgccagcggcgtcatcgccgtgctgggcggcatgatcatgctgccgttcttgtctcacgccctggggctggacagcgaaagtttctggctcgccatgctgtactgcaccctgatcccgtcgatgacctcgtccacgccgaccggcgtgctgcgcgccttcaaccgcttcgatctcatcgctatccagcaggcgatcaagccgttcctgcaggcggtgggcagcgtcatctcctattatttcgatctgggattccccggctttatcgtcacctggtacgcctctaacctgatcggtggcacgctgttctggtggttcaccgcgcgcgagctgcaccgccgcgatatccacggcgcgctgaggccgcgcctgttcaacgtcgcgcgccgcatcgagggcgcctggaacttcgtctggaccaccaacatcgcccacaccatctgggccgcgcgcaactcctgcaccaccgtgttggtgggcgtggtgctcgggccggccgccgccgggctgttcaagatcgccatgaccttcttcgatgcgacgggcaccccggccaaactgctggagaaaagcttctatccggagatcatgcgcctggatccgcgcaccaagaccccgtggctgctgggcctgcgctcctcgctgctggccggcggcatcggcctggccgtcgcggtgttgatgctgctggtgggcaaaccgctcatttccgcggtgttcgggcagcaatacctggaagcctatgacctgattcaaatcatgctgggcgcgatcatcgtctccatgatgggcttcccgcaggaatccttactgtttatggcaggcaagcagcgcgctttcctgatcgcgcaggcgacggcctcggcggcctacattgcgctgctggtgtcgatggcgtatgccttcggcgtgcagggtgccgccttcgcttatttattggggcaatgtttagacgttctgttatccctgataccgacgatcggcgcctaccgcaatcgctttatgttggggctgaatgcgcccaaagagagtaatcaatga

SEQ ID NO: 423145 - DNA, 795 bp, Serratia marcescens
atgaaaaaaaataaactcaccgccgaacagaatacctcttccgcctgcatcaccgggctgattgccgtggtgggcagcgacggcaccggcaagtccacgctgaccgccgatctggtcaagaacctgcagcaacatcgccccacggagcggcgctatttggggctgatctccggcgaagacggcgacaaaatcaagaaattgccgttcatcggcgtgtggctggaacggcgcctggcggccaaatccgataaaacccagcgcatgagcaacaggccgccggcgctgtgggcggcgctgatcatgtacggcttttcgctgtggcgcgcctccaacctgcgcaaggtgcggcggctggcgcagagcggcgtgctggtgatcagcgatcgctacccgcaggcggaaatttcaggtttttactacgacgggcccggcatcggcgtggaacgcgcaaaaggctggctattgagccgcctggcggcgcgcgaacgccgtttatatcaacgcatggccgtctatcggccggaactgatcattcgcctcgatatcgacgtcgatacggcgttttcccgcaagcccgatcacagctatgaagagctgaaagacaagatttccgccatggtgcgcctgcagtacaacggcgcgcgcatcatcgagctggacgccagagccccttacgacgaggtgctgagcaacgcactcaacgccatttccgccgtggtgaaccccgcgaagcgcccacagagcgacatcgggcaacccggcgaaaacgccggcgaagaaactcaggtttattaa

SEQ ID NO: 423146 - DNA, 726 bp, Serratia marcescens
gtgagtcagcagataagaccttcatctgatcgctcgcccgtgcgcgtaatagcgataaccggctgtgacggctcgggaaaatccacgttagccgcccgcctggtcaacgccttatcgccgcaagaacctgccgaactgctttatctcggccagtcttccgggcgcattggcgaatggatcagttcgctgccgattattggcgcccctttcgggcgttatttattgaagaagtcgcagcgcgtgcatgagcgcccttccacgccgccggataatgccacggcgctggtgatttttttactctcctattggcgcgtttataaattccgtcgcatgctgaagaaaagccgcagcggcgcattgctgatcaccgatcgttatccgcaggccgaagtggcggggtttcgtttcgatggcccgcagctggcgaaaaccgccggcggcaatcgctggatccgctggctgagaaagcgcgaacaaaacctctaccaatggatggcgtcttatcagcccttattattaattcggctggatattgacgaacaaacggcctattcacgcaaacccgatcactcattggcggcgttgcgtgaaaagatcgccgtcatcccgcacctgacgtttaacggcgctaacatattggatttagacggccgcgaaccggccaatcgtattttcgacgagtctctgcgcgccgttaaaatatcgctgagggccgccaatgcctag

SEQ ID NO: 423147 - DNA, 732 bp, Serratia marcescens
atgagtgcaaaatttccgccgctgattgcggttatcggcagcgacggatcgggtaagtccaccgtttgtgaacatctgatcgcgtatatgaaacattatggcccggcggtgcaggtgcatctgggcaaacaggcgggcaacgtcggccgcgcggcggcgaagttgccgctgctcgggcgctcggtgggcaaggctatcgagagcaataccaaaaaagtcaaaacgaaaaaatcccgcattggcctgctgccgtcggcggtgatcatcgctttcgtggggcggcgcttgctgcggtttcgccgcatgctggcgtatcggcggcaagggttcatcgtgttgaccgaccgttttccgcaggcgcagatccccggcgcttacgacggcacggtttttcccgtcgacgttgaagggagccggtttgtccgttggctggcggcgcgcgagcgggcggcgttccaatggatggcggggcaaaaaccggatctggtgctcaagctgaatgtcagtctggcggtggcctgcgcgcgcaaacccgatcaccgcaaagcggcgctggagaagaagatcgccgtcacgccgttattgacgttcgaaggcgccgacatcgtggatctcgatgccgatcggccgatcgaggaggtgctttcggcggcggaaaaagccatcgcggaatttatggcggcgcagggttatcgctattccgctgaggaagtatcaacggctgcgcactga

SEQ ID NO: 423148 - DNA, 1173 bp, Serratia marcescens
atgggactgtatgataagtttgcgcgcctcgccaatgaccgcgaacaatttcaaacgtccggtctgaatccgttcggtacctgtatcgacgaagtctattccgccacccagggccgcatcggcgatcaaaagattgtcctcgccggcaccaataattaccttggcctgacgttcgatgcacaggcgatcgccgccggccaggcggccctggccgcgctcggcaccggcaccaccggctcgcgcatggcgaacggcagctacggatcgcacctgacgctggaacgggagctggcggaattcttcgatcgcccgagcgccatcgtattctccaccggctacaccgccaacctgggcgtcatcagcacgctggcggggccgggcgccgtggtattgatcgacgcggacagccacgcaagcatttacgacgcctgcgccctcggcggcgcggagattattcgcttccgccacaatgacgccgccgatctggagcgccgcatggtgcgcctgggcgagcgtgcgcgcgaggcgatcattatcgtggaaggcatctacagcatgctgggcgacgtcgccccgctggtggaaatcgtcgacatcaagcggcggctcggcgggtatctgctggtcgacgaagcgcactccttcggcgtgatgggcgagcacggccgcggcctggccgaagcgctgggcgtcgagcaagacgtggatatcatcctgggcaccttcagcaaaagcctggcttcgatcggcggtttcgccgttggcggcaaggggatggacgtgctgcgctacagcagccggccgtatatctttaccgcgtcgccgtcgccgtcgagcatcgcgtcggtgcgcacggcgctgcaaaaaatcgcgcgccatcccgaactgcgggaaaagctgtggagcaacgcgcaccgcctgtaccacggcctcgccgagctggggtataccctggggccgcgcatcagcccggtggtgccggtgatgatcggttcgaaggaagaagggctgcgtttctggcgcgagctgatcgcccacggcgtgtatgtaaacctggtgctgccaccggccgcgccggcgggcgttaccctgctgcgctgcagcgtcaatgccgcgcacagcgatgaagaaatagacaccatcgtgcgcgcctttgcggcgctgaaaaaataa

SEQ ID NO: 423149 - DNA, 261 bp, Serratia marcescens
atgctaaatcgcgatgctgtaatggattatatcctgacgtgtttgcaaggtatcgtcgaaggcggagtggaaataaaacctgatagcgatctcgtcaatgatcttggcctggaatccatcagagtcctggatctgctgatgatgctggaagatgaattagatatctccattcctatcaatatattgcttgatgtcagaacgcctgagcaactgcttgacgcgctgcgcccttatctggagaaaaaccatgggactgtatga

SEQ ID NO: 423150 - DNA, 915 bp, Serratia marcescens
atgagcggcacggtggcagtgacgggcgcgaccggttttatcggccggcacatcgtccaggaactgctggcgcaagggtttaacgtgcgcgccctgacgcggcgcgcgggaaaagccgccgccgacaacctgcagtggatccccggcgcgctggaggatcggccctcgctcaccgagctggtgcgcggcgcggagtgcgtcgtgcactgtgcgggccaggtgcgcgggcacgcggaagcggtgttcacccgctgcaacgtcaccggcagcctgaatctgatgcaggcggccaaacagaacggccgctgccgtcgcttcttgttcatgtcttcgctggcagcccgccatccggcgctgtcctggtacgcccattcaaaacaggccgccgagcagcaactcattgccgccaccggcgagatcgcgctggggattttccgcccaacggcggtttacgggcccggcgataaagagctgaaaccgctgttcaacggcctgctgcgcggcgtgctgccccggctgggcgcgcctgacgccaggctctcttttctgcacgtgagcgatttggccaaggcggtcagccaatgggtacaggccgaacccgcgcagccgaatatttacgaactgtgcgacggcgtggccgaaggctataactggctgcgcctgcgggacatcggcgccgccgtgcggcacgggccggtgcgcctggtgggcattccgctgccgctgctgaaagccctggcggatatcagcgtggtgtggaaccgcctggtcaaacaagagccgatgctgacgcgcagcaaaatacgcgaattaacccatcacgactggtccgccagtaatcacgcgctgtcgcaacagattaattggtttccacaggtaagtttggagcgcgcgctgcgcgaagggctgttttaa

SEQ ID NO: 423151 - DNA, 1707 bp, Serratia marcescens
atgcgctatgcggacttccccactttagtggacgcgttggattacgcggcactgggcaatacgggaatgaatttttacgaccgtcgcaatcaactcgtgaccgttctcgaatatcgcacgctgcagcaaaaagcgatctcgggcgcgcggcgtttattgtccctgaaactcaagaaaggcgatcgcgtggcgcttatcgccgaaaccagcgcgggattcgtcgaagcctttttcgcttgccagtacgccggcctggtggcggtgccgctggcgatcccgatgggcgtgggccagcgcgactcctacaccgccaagctgaaggggctgatcgccagctgcaaccccgcggcgatcgtcagcagcgaagagtggacgccgctgatcgcctcagccacggaaaacacctcggcgctgcacatcctcagcgatgcggattttaacgccttgccggagccggagatcgccttgccggcgccttcgcccgacgatatcgcctatctccaatacacctcgggcagcacccgctttccgcgcggcgtgatcattacccagcgggcggcgatggcgaacctgaacgcgatcagtcgcgacgggatcaagctgcgcgcgggcgaccgctgcgtttcgtggctgcccttctatcacgatatgggcctggtcggtttcctgctgacgccggtggcgacccagctgtccgtcgattacctgcgcacgcaagatttcgccatgcgcccgatgcagtggctgaaactgatcgccaaaaatcgcggcacggtgtccgtcgccccgccgttcggctacgatctgtgcctgcgccgcagcaacgccaaagagctggccgatctggatctttccagctggcgggtcgcgggcgtgggcgccgagccgatcccggccgagctgctcggccagttcggcgaacacttcagcagcatcaacttcgacagcaaagccttcatgccgtgctacggcctggccgagaacaccctggcggtgagtttttccgatccctgctccggcccgcaaaccaacgcggtcgaccgcgatattttggagtacgagggtaaagcggtcgcgcccggcaagaaaacccgcgccgtctcgaccttcgtcaactgcggccgagcgctgcccggccaccgcatcgagatccgcagcgaaaccgggcaaccgctgccggaacgccaggtcggccatatcacgatctccggccccagcctgatgaacggctatttctgcgacgacgagtcccagcagcaaattcaggtgaccggctggatggataccggcgatctgggctacctgctggacggctatctgtacgtcaccggccgcaagaaggatttgatcatcattcgcggccgcaatatctggccgcaggatatcgagtacgtcgcggaatccgaaccggaaatccgttccggcgatgcgatcgccttcgtaaccgaagagcacgacgaagcggccaggatcattttgcaaatccagtgccgagtcagctcggaagaacgccgggaacaaatcgtgcgttcgctgagcgcgcgcattcaaagcgagttcggcatcgcggtggacatcgagctgctgccgccgcacagcattccccgcacgtcgtcgggcaaacccgcgcgcgcggaggccaaaaaacgctggctgagcgcctcgctctacccgcacatgccgcagctggccggtttcgcgcaatga

SEQ ID NO: 423152 - DNA, 1125 bp, Serratia marcescens
atgatccgtgttgagaaagttctgagtaaacgcgaacttaaagaatttattgctttcccctcgcaactgtttcgcgatgatccgaactggattgagccgctgcatgtagagcgcgaagagcacctgtcaaagaagaatcccggcaccgaccatattgaatggcaggcatgggtggccaaaaaacagggcaaagtcgttgggcgcatcacggcgcaaatcgatgctctgcaccgggagttgcatggcgaggataccggccatttcggcatgattgacgccgttgacgatcccgccgttttcagcactttattcacggtggcggaggagtggctgaggtcgaaaggcgcgcgcaaaatcaccgggccattcagcctcaatatcaatcaggaaagcggcctgttggtcgaggggttcgatacgccgccttccgccctgatgacacacgcgaagccctactatgcggcgcaaatagcgcagcagggctacagcgaagggattgatttgcttgcctattggatgaaaagaaccgacctgcatttttcgccgtcgttaacccggatgatggatcaggtgcgcaaaaaggtgaccgttcgccgcctcaaccgcaagcgctttcgcgaggagatgcaggtgctgcgcgaggtgttcaactccggatggcagcataactgggggtttgtcccgttcaccgagcacgagttcgccaccatgggggatcagctgaagttcctggtgcccgacgatatgatccatatcgccgaggtggatggcgccccctgcgcctttatcgtcggtctgccgaacatcaacgaagcgattgccgatctgcaggggcggttattgccgcttggctgggcgaagctcttgtggcggctgaaagtcagcggcgtgcgcaccgcgcgcgtgccgttgatgggcgtgcgccaggaatatcaattcagccgcatcgggccgattattgcgttgctgctgattgaggcgctgcgcgagcctttcgccaagcgcaatatcgacgcgctggaaatgtcgtggatcctggaaaccaataccggcatgcggacgattttagaacgcatcggcgcggttccctataagcgctaccgcttatacgagaaaacgctttaa

SEQ ID NO: 423153 - DNA, 366 bp, Serratia marcescens
atgcctgtggaaaagaaaaaaggaataagccgattaacctacagcataaggaattcctgggccggatttattgacgccgtgcttaccgaagatgcgtttcgccaattattggttattaacgccattttactggttgttacatttggtttagatattacaaatatagaacggctgttattaatcgcctgcagttttctgctattggtggttgagctgcttaatacggcgattgaaaccgtggtcgatcgcatttcgctggaattacatccgttatccaaacgcgctaaagatctgggcggcgctgcgcagctggtggcggtggtgatgactatcattatttggggaatggtgctgctggggcgataa

SEQ ID NO: 423154 - DNA, 900 bp, Serratia marcescens
atgcccgtgaattttgatctcaacgatctttatgccttccgcgcgctggtggagtacggcaattttcggctggcagcagaatccatctgcctgtcgcagtcggccctgagccgcaggattgagaagctggaaaacgcgctgggcagcaaactgttcgatcgtactacccggcgcgtgacgctgacgctgtacgggcaggcgtttgccgagcgttcggatcagctgctgatgaatgtcgaagcggtgttggccgatatcgataaggtcagccaggagcgtaccgggctggtcaccgtcgccacggtgccgtcggcggcctactatttcatgcccgacgtgatacgccgtttccggcttcgctatccgcgcgtgcgcgtcaagctgatcgacggcagcgcgggcaatgtgattgaggcggtcaccggcggccaggctgacttcggcatctgctttgccgggcggctgcagcctaaccttgaatttgtgccgttggtgggggacgtttacgtggccgcctgccggcgcgaccatccgctcgccgctaaaaagagcctcacctggcgggaattttatcagcaggattacgtgtcgctggataaaacctccggcaatcgcaatttgctcgatcagcgcctggaacacctcgtgccggagcgccccagcgtgtgcgaaactcgccatgtgacgaccatgctgggcatggttgaggcgggcatcggcattgccgccgtgcccgccatgtcgatgcccgcttcagagcattcggtgttgacgtcggtgccgctggtcgagccggtggtgaaacgcaccgtgggcctgatccggcgcggcggccgcatgcagtctttcgtcgccgccgagttggaaaagctgattactgaacagtatcactctgcctga

SEQ ID NO: 423155 - DNA, 807 bp, Serratia marcescens
atgcaaaaactcactcgttcgatcctcgccgcgctggtgtgcgcctccttcagcaccgcggcgctggccaaagacgtgaccgtgatgatctccggcggcttcaaggccgcgctggagaaactggccccggaatatgaagcccaaagcggcgacaaaatcattctggtgtccggcccttccatggggaaaacgccgcaggcgatccccgcgcggctggcgcgcggagagcaagccgatgtggtgatcatggtgggcgacgcgctgacccaactggacaaaggcggctggatccagcggggttcgcgcgtggagctggccgattcgccgatcggcatggtggtgaaacagggcgcgcccaagccggcgataaaaacggatgccgagctgcgtaatgccttgctgcaagccgactctttcgcctattccgacagcgccagcggccgctacgtcagcggccaactattcaaaaagctgggcatcgaggaacaggtgaaaggaaaagcgcacatgattgagcgcattccggtggcctctgaagtggcgcaggggaaatacgcgttgggcttccagcaggtcagcgaattgctgcccgtggcgggcgtcacctttatcggcgaactgccggaaaacgtgcagtacatcacccgcttcgccggcgcggtaaccgccaaggcggaacatcgccgcgaaggcaaagcgctgctggagttcctcgcctcctctcaggcacagccgaccattcgcgcgaccggcatgcgaagcgtgccggcgcagcagccggtcaggcagagtgatactgttcagtaa

SEQ ID NO: 423156 - DNA, 1296 bp, Serratia marcescens
atgcattcctctacctcacccatgaccacccgggccaaagccggcgcgatcctgcgcgtcacctccggcaactttctggaacagttcgacttctttctgttcggcttttacgccacctacatcgcacacacctttttcccggccagcagcgagttcgcctcgctgatgatgaccttcgcggtattcggcgccggttttctgatgcgccccattggcgccatcgtgctgggcgcttacatcgataaagtcggccgccgcaaagggctgatcgtcaccctgtcgatcatggccgcgggcaccttcctgatcgtattgatcccctcttaccagagcatcgggctttgggcgccgctgctggtgctgtgcgggcgcctgctgcaaggcttctcggcgggcgcggagctgggcggcgtgtccgtctatctggccgaaatcgccacgccgggccgtaagggcttctacaccagttggcagtccggcagccagcaggtggcgatcatggtggcggcagcgatgggcttcgcgctcaatgcggcgctggaagaaagcgccattcgcgaatggggctggcgcctgcctttcctgttcggctgcctgattgttcccttcatcttcttgctgcgccgcaagctggaagagacgcaggaatttaccgcccgccgccaccacctggcgatgcacgacgtgtttaaaaccctgctgaaaaactggccggtggtgatggccggcatgctgatggtcgccatgaccaccaccgcgttttacctgatcaccgtgtatgcgccgaccttcggcaaaaaggtgctgttgctcagcgcctccgacagcttgctggtcactttactggtcgcgatttccaacttcatctggctgcccatcggcggtgcgctgtcggatcgcttcggccgcaagccggtgctggtcgccatgacgctgctggcgctggccaccgcctacccggcgctgagcctgctcgccgccgcccccagcttcagcatgatgctggccgtgctgctgtggctgtccttcatttacggcctctacaacggcgccatgatcccggccttaaccgagatcatgccaacggaagtgcgggtggccgggttctcgctggcctacagcctggcaacggcggtgttcggcggctttacgccggtgatctccaccgcgttgatcgaatacaccggcgataaggcttcaccgggctactggatgagcttcgccgcgctgtgcgccttgctggcgacgctgtatctgtatcgccgcatcgccatgccgctgcaaaccgcacgctaa

SEQ ID NO: 423157 - DNA, 354 bp, Serratia marcescens
gtgtgggaaattaaaacaacggatgcgtttgataactggtttagctcactccacgatgccgatcgggctggcgtgcttgccgcattgatggtcctgcgggaaaaggggccggggctgcccagaccctatgccgatacggttaaaggttcgcgttacagcaatatgaaagagctgcgcattcagagccgtggcgaaccgttgcgggcattcttcgccttcgatccgtaccgtatcggcattgtgctttgcgcgggcaataaagccggtaatgaaaaacgtttttacgatcggatgatccaggctgccgatcgggaattcacgaactggctgaacacattaaacgagaaggagtga

SEQ ID NO: 423158 - DNA, 303 bp, Serratia marcescens
atgggcagaacgctggaacagcttattgcggatgaaaagcccgaggtcgtggccaaagcgcaagcgctggcggctgacatcatgctgaacatccaccttgccgagctgcgcgagaaggtgcagaaaacgcaggttgaaatggcgcaggcgctgggtatccggcaaccgaccgttgccgtgatggaaaaaccgggccgcgatctgaaactgtcttcgctcaaacgctatgttgaggcggccggcggcaagctgcgcctggatgttgaactgccggacggctctcactacgaatttgtgctgtaa

SEQ ID NO: 423159 - DNA, 1209 bp, Serratia marcescens
atgaagaaaacgtgggttatggcggtgttttcggccctgatttcagggcaggtggcggcgcagagttgggtgctgaccagcgctgaagatggcctggagaaaggaaactggaagatttcgagtgaggcgctgaaggttaaggataaaacgttcagcattgagcagaaagtgttgcacggcggcaagcaggaaggcagcaaagtcgtgattatccgcagcgaggatggcctgaccattacgctgagtcccacgcgcggcatgaacctcctgcgggcggaaggatttggcgcgaaaatggggtgggattctccggtcaaagaggtggtcaaccccgcctttatcaacctggaaagccgcaatgggctcggctggctggaaggtttcaatgagatgatggtgcgctgcggctatgagtggaccggtcatccggtgaccgaaggagggcaaatttacaccttgcacggtaaagcgggcaatacgccggcctcactggttgaggttgaggtagcggatacggcgccgtatgaaattcgtattcgcggcctgatcaaagagagcacattcaaaaaagccgatctgcaaaccctgaccgaactgcgctacgtacccggcagcaacagtttcagcctgcatgatgtgttaaccaaccgggcggattatccccacgactaccagattatctaccacagcaatttcggcgcgccgattctggaaaatggcgcccgcttcctggcgccgatggccagcatcagcccgtttaacgactatgccaaagccgggttgaagacctggggaacctatgccggccccaccaaagggttcgatgaaatggtctttaacatcaagccattatcggatccgaatcatcagacactggcggcgctggtcaatcacgcgggcgacaaaggggtggcgattcagttcgatacccgccaattgcccgtcctgacgctgtggaagaataccgatacgttaaaacagggatatgtgacggggattgagccgggcaccagctatgcctacccggtcaccatcgagcgcgaacaaaaacgcgttaagcaattgcagcctggcgccagtgcgcagtttgatctgacctataccttgctgcacagcaaagcgcaggtggcggatctggagaggaagattgctgatattcagggtaaggtaaaaattgatgaaaatgccgcgccgatagccaaagagtaa

SEQ ID NO: 423160 - DNA, 1119 bp, Serratia marcescens
atgtcatcgaaattgataaaaagtccgctcgctgctttgctcatcggttgtttaggtacggcgttttccgcgcaggccgatatcgtcatcggcgtcgccgggccgttctccgggccgaacgccacctatggcgatcagtattggcgcggggcttcgcaggcggcggcggacatcaacgccgccggcggcatcaaaggggaaaaaatcaagctggtgcagggggatgacgcctgcgaaccgaaacaggcggtcgcggtcgccaaccggctggtggatcaggaaaaggtctcggcggtggtcggccacttctgctcttcttctaccatgcccgcctccgaggtgtatgacgaggccggcatcatcgccatcacccccggctccaccaacccgcagatcaccgagcgcggcatgaagaccatgttccgcatgtgcgggcgcgacgatcagcagggcgtgatcgccaccaactacatgctggacaccctgaaggccaagcgcatcgcggtgatccacgataaagacacctatggccaggggctggcggacgcggcgaaggcggcgatgaacaagcgcggggtcaaggaagtgctgtatgaggggctgtcgcgcggcgagaaagacttcaacgcgctggtgaccaagatcgcctcggtcaagccggacgtggtctacttcggcggctgccatccggaagccgggccgctggtgcgccagatgcgcgagcagggcgtgaccgccaagttcttctccggcgactgcgtggtgaccgaagaactggtgaccgccgccggcgggccgcagtacaccaacggcgtgctgatgaccttcggcaacgatccgcgtcagatcccggaaggcaaagcggtgatcgccaagttccgcgccagcggctttgagccggaagggtacaccctctactcctacgcctcgatccaggcgatcgccgccgccttcaacgccaccggcggcaaagacagcgccaaggccgccgaatggctgaagtcgcacgatgtggataccgtgatgggcaaaaaagcctgggaccagaagggcgacctgaaggtctcggactacgtggtctaccaatgggatgacaagggcaaatatcaccagctgtaa

SEQ ID NO: 423161 - DNA, 915 bp, Serratia marcescens
atggatgtattttttctgcaacagctgatcaacggcctgaccctcggtgcggtgtatggcctgatcgccatcggctacaccatggtttacggcatcatcggcatgatcaacttcgcccacggcgaggtgtacatgatctccgcctacctgtgcgccatcggtttggcgctgctgtcgttcttcgggctgcactcgttcccgctgctgatcctcggcacgctggtgttcaccatcgtcatcaccggggtgtacggctgggtgatcgagcgcatcgcctacaagccgctgcgcaactccacccgcctggcgcccttgatctccgccatcggcatgtcgttaatcctgcaaaactacgcgcagataagccaggggccgcgccagcagggcatcccgacgctgctgagcggcgtgttccgcctggagttcgacggcggcgtggtgcaaatcacctacaccaaagtgtttattctggtggcgtcgctgctcggcatggcgatcctcacctacatcattcagcgcacccggctggggcgcatctgccgcgccacccagcaggatcgcaaaatggcttcgattctcggcatcaataccgatcgggtgatctcgctggtgttcgtgatcggcgccgccatggccgggctggccggggtgctgatcaccatgaactacggcaccttcgatttttacgtcggctttatcatcggcatcaaggccttcaccgccgcggtgctgggcggcatcggctcgctgccgggtgccatgctgggcgggctgctgctcggggtagcggaggcgcagttcgccggcatggtgaactcggattacaaggacgtgttctccttcgggttgctggtggcgatcctgatcttccgtccgcagggcctgcttggccggccgctgatcgccaaggtctaa

SEQ ID NO: 423162 - DNA, 1287 bp, Serratia marcescens
atgtcgcaatccgtgatccacggcgggctggacgttaaacgcagcctgctggacgccgtcttggccgggctgatcgccctgatcgtgttcgggccgatcgtcggcatcgtgctgaacggctacagctttaacttcgaaccgcaccggctggtgtggattatcatcgcggtgatggccgggcggctgctgctgagcctgttcctgcaaaccgcgccggggcgcagggtgctggcgcgcttcgacggcggcaacgacggcgtttacgtgcggccgctggactataaatccaacctgcgctggctcctgccgctgatggcggcgatcgcgctgctgttcccgttcgtcgccaccaaatacctgctgacggtggcgatcctcggcctgatctacgtgctgctcggcctggggctgaatatcgtggtcgggctggcggggctgctcgatctggggtacgtggcgttttacgccatcggcgcctacgggctggcgctgggctatcagtacctcgggctggggttttgggcgatgctgccgctgggggcgctgatggcggcgctggccggcgcgctgctgggtttcccggtgctgcgcatgcacggcgactacctggcgattgtcacgctggggttcggtgagatcatccggctggtgctgaacaactggatgtcgctcaccggtgggccgaacggcgtctcggtgccggcgccgacggtgttcggcctggagttcggccgccgcgccaaagacggcggggtgccgatccacgagtttctcggcatcgattacaaccccaacctcaagttcatcttcatctacgcggtgctgtttttggtggtgctgctggtgctgtacatcaagcaccggctgacgcgcatgccgatcggccgcgcctgggaggcgctgcgcgaggatgagatcgcctgccgctctctcgggctcaatcacgtgctggtgaagctgtcggcctttatgctgggcgcctccaccgccgggctggcgggggtgttttttgccacctatcagggcttcgtcaacccgacctcgttcaccttcttcgagtcggcgctgatcctggcgatcgtggtgctgggcggcatgggctccaccctcggcgtggtgctggcggccttcgtgctgacggtggcgccggagctgctgcgcagcttcgccgaataccgggtgctgctgttcggcgtgctgatggtggcgatgatgatctggcggccgcgcgggctggtgcgcatcagccgcgccagcttcgccgagcgcaagggggtggcgccatga

SEQ ID NO: 423163 - DNA, 876 bp, Serratia marcescens
atgagcgacgccattttgcgggtggagcacctgatgatgcgctttggcggcatcaaggcgctgaacgacgtcaatctggaggtagagcgcggctccatcaccgccctgatcggccccaacggcgccggcaagaccacggtgttcaactgcctgaccggcttttaccgcgccagcggcggcgcgatcctgctcaatacccacaagcggccgaccgacgtgatccaggtgctggggcagaagttccgcgccggcgactggatacgcccgaagcggctcggctcgcgcctctattacaagatgttcggcggcactcatttggtcaaccgcgccgggctggcgcgcaccttccagaatatccgcctgttccgcgaaatgtcggtagtcgagaacctgctggtggcgcagcacatgcagagcaaccgcaacctgatcgccggggtgctgaatacgccgggctaccgccgggcggagagcgccgcgctggatcacgccttctactggctggaggtggtggatctggtggactgcgccaaccggctggctggggagatgtcctacggccagcagcggcggctggagatcgcgcgcgccatgtgcaccgcgccggagatgatctgtctcgacgaaccggccgccgggctgaacccggtggaaacggccacgctgagccgcatcatccgtttcctgcgccagcatcacggcatcacggtgctgctgatcgagcatgacatgggcatggtgatggagatctccgatcgggtgatcgtgctcgatcacggcgacgtgatcgcccgcggcacgccgcaggagatccagcacaacgaggcggtgatcgccgcctacctgggcgcggacgaagaggagctggcgggatga

SEQ ID NO: 423164 - DNA, 717 bp, Serratia marcescens
atgagcgaagcgatgctggaatttcgcgaagtggacgtgttttacgggccgatccaggcgctgcgcaaggtgtcgctgcaggtcaacgccggggagacggtggcgctgatcggcgccaacggcgcgggaaaatccacgctgttgatgtcgatcttcggccagccgcgcatcgccggcgggcagatcctgtttggcggcgaggacatcagccgccgctccacgcactacgtggcggccggcggcatcgcgcaagcgccggaagggcggcgcatctttccggacatgagcgtggaggagaacctgctgatgggcaccatcaccgtcggcaaccgctatctggcggaggatctgcagcgcatgttcgagctgtttccgcgcctcaaggagcggcgcaaccagcgggcgatgaccctgtccggcggcgagcagcagatgctggcgatcgcccgcgcgctgatgagccggccgaagctgctgctgttggacgagccgagcctggggctggcgccgatcgtggtgcggcagatcttcggcgtgctgcgcgagctgacccgcagcggcatgacgctgtttctggtggagcagaacgccaaccacgcgctgaagctgtccgatcgcggttatgtgatggtcaacggccagatccgcctcaccggcagcggccaggagttgttgaacgatccggaggtgagaaaggcctatctgggcggcggctga

SEQ ID NO: 423165 - DNA, 423 bp, Serratia marcescens
atgacgaacgatcgggaagcgctgctgcaattttcgcaggcgttctgtgaagcattgagcaacgacgatgaagggttgaagcgtgaggttctcgcacatgcgggcaaccgttggtcgctgggggtattgcatatcctgggcacccacgggccgctgcgccacggcgagataggccgccaattagcgggcgtgacgcagagaatgctgacgcggacgctgcgccatctcgagcgggacgggttgatatcgcgctgcgattatcaggaaaagctgccccgcgtggtttacaccatcaccgacgcggggaaagagatgctgctcaacatgctgccgctctggtcgtggattatcgcctccgccgacgccttcagggcagcccgctcacgctacgatgatcaagaacgaagcgccgccgagggatga

SEQ ID NO: 423166 - DNA, 948 bp, Serratia marcescens
atgaaatccacaaatccatccatcaataccgtgctcatactcggcgccggtgaactggggctgccggtattgcgcgcgatgagccggcaggcccggttacaccacgctttaaacatcagcgtactgctccggcctgaggccgcccgcgccgtcaccggcccgtatcgcgcgcggcgggatgcgctgacgcggctcggtatcgccgtagtggaaggcgacctgcagcaaaacagcgtggatgagctgagcgcgttgctgcgcggctttgacgcggtgatcaactgcagcggctttgtcggcggggtgggcacgcagataaagatcacccaggccgttttgcaggcgggcgtggcgcgctacttcccgtggcagttcggcgtggactacgatgttgtcggcaaaggcagcgggcaacaggtgtgggatgaacagctcgaagtgcgccatctgctgcgtgcgcagaaggcgacggagtgggtgattgtttccacgggcattttcaccagctacctgtttgacccgagttttggcgtggtggacgcggccaccaaaacggtgcgcgcgttgggcgactggcgttacgcggtgacgctgaccacccccgaggacattggccggctgacggccgcgatttttttccatcggcccgcgtttcgcaaccaggtggtctatatcgccggggacacgctgacctaccgcgagcttgccgatgtcatgcaggcgcactggggcgttgaggtcaacagagccctgttggacaaagagcggctgcaggaggaggtgcggaaccatccgcgcgacgtcggcgccaaataccggctggctttcgcccggcccgacggcgtggcctgggataaggcgaaaaccttcaatgcgcgccagggcatagccaccactaccgccgagcagtggctggcgcagcaatgcccgatctctcaggacggttag

SEQ ID NO: 423167 - DNA, 687 bp, Serratia marcescens
atgtccgcgatttatgattggtccgtgctcgcattgcgcaatgtttacgatcgccgcattcagggcaagcctgtgctcgacagcgccgcgctgttccccgacgccgaacgtttcaccgcccagtggaggcagatccgcgaagaggcgctgaccgtcgcccacgatctgcacaatattccccgctttcacgagatcatgatccagcaggcgtcgatttccgccaacgacgcgcgcgactggcgcatgttcatcatgaaggcctacggccagccgatcgcccgcaacctggcgcgctgcccgacgctggcggcgctgatcgcctcgtcgccggacgtgctgtccgcctcgctctccttcctggcgcccggcaagcaggtgccgccccaccgcgggccgtttcgcggcattctgcgcggctatctggtgctggacatgcccaaacgcgccgacggggtgccggcggcggtgctgaaagtggacggccgcgaataccggctgcacgagggggagttcatgctgtgggacgacaccttcgaacacgaagtgtggaacgacagcccgcaggtgcgcaccgtgctgctgctggacatccgccgccgcgacatgcccggcgggctgcggctgctctccagcgccatcgtcgccctggtgcggctgaacgtgcgctggatgcaacgccatttctga

SEQ ID NO: 423168 - DNA, 1191 bp, Serratia marcescens
atggaacacgctcccgtttcgcgctcaaccgcctggttgcgcgtggttatcctcgccgtctcggcctttatcttcaacaccaccgaatttattccggtcggtctgctgagcgacatcgccgccagcttctcgatgcaaaccgaacaggtcggcctgatcatcaccatctacgcctggatcgtcgccgccgcctcattggcgtgcatgctgctgaccagcaaaatcgagcgccgcaagctgctgatcggcgtgttcatgctgtttatcgccagccacgtgctgaccgccgtggcctggaacttcaccacgctggtcatttcgcgcgccggcgtggcgctggcgcactcagtgttctggtcgatcaccgcctcgctggcgatccgcgtggcgccgccgggcaagaaagcccaggcgttgagcctgctggcgggcggcaccgcgctggcgatggtgctcgggctgccgctcgggcgggtggtggggcaactgctcggctggcgcatgacctttatcggcatcgcggtgtgcgccaccctggcgctggtgctgctgtggcgcctgctgccggtgctgaaaagtgagcactccggttcgctggccagcgtgccgctgctgttcaaacgcccggcgctgctggcgctgtacatgctgaccgtcatcgtggtgacggcacacttcaccgcctacagctacatcgagccgtttatccagaccgtggccgggctgtcggagaacttcaccacgctgatgctgctgctgttcggcgccgccggcatcgtcggcagcctgctgttcagccgctacagcgagcgttttccttccggcttctttatcggcgccatcgcgctgctggccttgagcctgctgctgctgttgccggccgccggcagcgaaagccacctgaccgtgctgtgcatcttctggggcatggcgatcatggccatcggcctgtcgatgcaggccaaagtgctgagcctggcgccggacgccaccgacgtggcgatggcgatcttctccggtctgtacaacttcggcatcggcagcggggcgctgctgggcaaccaggtgagcctgcatctgggcatgggcaacatcggcttcgtcgccgcgccgctggcgctgatcgccctcggctggtgcctgctgagtttctaccgcagcgaacggctgcagcagcaccccagccgttaa

SEQ ID NO: 423169 - DNA, 1395 bp, Serratia marcescens
gtgagtgactctgtagcggcgtcgccgatccatgcgcgggatttggcggccagaatcgacgccttgcccgcgtcggccggcctgtggcgctttatcattctgctgtcgctgggcggctttttcgaactctacgatctgttccagaccggctatatcagcaccggccttatcgccgacggcattttccacaccggcgcgcagggcgtcttcggcgtgtcggatcaggcggccttcgcctccgccacctttctcggcctgttcgtcggcgccagcctgctgagtccgtacgccgatcgcttcggccgccgcgccaccttcatgttcgccctgatctggtatggcgccttctcgctgctgctggcgtttcaacagcaggcggagtgggtgatctttctgcgctttctggtgggcgtcgggctcggcattgagctggtgaccatcgatacctacctgacggagtgggtgcccgcgcatctgcgcacccgggctttcgccttcgcgttcttcgtgcagttcctgtcggtgccggcggtggcgctgatgtcctggtggctggtgccgcagacgatttggggcctgagcggctggcgctacgtggtgatcgccggtgcgctggcttcgctggtgatttggctggtgcgcaaggggctgccggagtcgccgcgctggctggtgcagcagcggcgctatgcgcaggcccggcaggtgatgcgggatatggagcggcgctgcggcgtggcggccgcggacttcccgtcgcgcccggtggacgatgccgagggcgcgccgctgcgcggccgctttcgcgatatctgggcgccgcagtatcgcgatcgcacgctgatgctggtggtgatgaatttctttcaggccatcggcttcttcggcttcggcaactggctgccggcgctgctgtcgggcaagggcgcttcggtcacccacagcctgctgtacgctttcttcatcacgctggcctacccgctgggctcgctgctgtgcagcttctacgccgacaagatggagaacaagtggcagatcgtgttgtcttgcctggtgacggtgatcttcggctcgctgttcgcgctgcagaacaacccgctgtggctgatcctgtgcggcttcttcatcacctggtccaacgcctggctgacctacagctaccactcgtatcaatccgagatcttcccgacccacatccgcgcccgcgccgtcggtttctgctactccttcagccgcctgtcgacggtgttcagcagcatcattatcggcattatcttgcagtacggcggctcgctgggggtgatcgcgtttatcgtcgccagcatgctgatcgtgatgctggtgattgggctgttcggcccgaaaacgcgcggcatcgatctggaaaacatctga

SEQ ID NO: 423170 - DNA, 831 bp, Serratia marcescens
atgagcatcctcaccgcgcccgatggcgcgcgcattttctataaggattggggccgcggccagccgatcctgttctcccacggttggccgctgtccgccgatgtctgggacaaccagctgctgtttttcggccagagcggattccgcgtgatcgcccacgatcgccgcggccacggccgttcggatcagacctggcacggcaacgacatcaaccaatacgccgacgatctggccctgctgatcgaaacgctggatctgcgcgatctgatcctggtcggccacgccatcggcggcggcgaagtggcgcgctacatcggccgccacggcagcgatcgggtggcgaaggtggtgctggtgggcgccgtgccgccgctgatgctgcaaacgccggccaacccggaaggcgcaccgatggcggccttcgacggcattcgcagcggcgtggcgggcaaccgctcgcagttcttcaaagatctggcggtgccgttctacggtctcccctgcgacgaggtggagagcaatgcggggctgatcgaccacttctggctgatgggcatgcagggcggcatgaaagggcagtacgacggcgtgagcgcgttctccgaagtggacttcaccgccgatctgctggcgatcgacaggccgacgctgctggtgcatggcgacgccgatcggatcgtgccgatcggcgcctcggtgctgaaagccgctaagcttatgcaacaggcggagctgaacgtttacgccggcggcgctcacggcttggcgcaggtcgatcccgatcgcttcaacgccgatctgctggcctttatccagaattcgccgttctaa

SEQ ID NO: 423171 - DNA, 426 bp, Serratia marcescens
atgaacctgactgctatcgccgcccgctgcgcgcagcggctgcatgcgcccgcggtgcgctggctgctgctgctcgccatttgcgccgcctacattcagggcggattggtcaaggcgctgaacgtcgaaggcgccatcgccgagatgacccatttcggtctgcagccggcggcgctgttcgccgtgctggtgacgctgctggaactggcggcgtcggcgctgatcctaagcggcttttatcgctggctcggcgcgttggcgctggccggttttaccctgatggcgacgctgatggccaatccgttctggcagttcgacggggcggaacgcggccagatgatgaacggattttttgaacaccttgggctggccggcgcgctgttgctggtggcatttaacgatttgaaggagcgaacggatggctga

SEQ ID NO: 423172 - DNA, 1611 bp, Serratia marcescens
atggctgaacagacggacaacaaggcggcggcgggcggcttcgcgccgctgaaaatccccttatttgcggtgctgtggggcgccacggtgctcggcaacgtcggcagctttatgcgcgacgtcgccagctcgtggctgattaccgatctgtcgagtaacccttcggcggtggcgctgatgcagaccgccgccacgctgccggtgttcctgctggcgatcccggccggggtactgtcggacatcctcgatcggcggcgctttctgatcttcgtgcaaattttgctggcctgcgtcagcggcagcctgctggtgctgtcgcagaccggtgcgttgacggtggaatacctgctggcgctgacctttgtcggcggcatcggcgcggcgctgatggggccgacctggcaggcgatcgtgccggagctggtgccgcgcaccgagctgaaaaacgccgtggcgctgaattcgctgggcatcaacatcgcccgctccatcggcccggcggccggcggcctgctgctggccagcttcggcgccggcgcggcctacggtgcggacgtgatgagctatgtactggtgatcgcggcgctgctgtggtggaagcggccgaaggccgaggacagcggcctgtcggaacacttcttcggcgccttccgcgccggcctgcgctatgcccgttccagccgcgagctgcacgtggtactgctgcgggcagcggtgttcttcgccttctccagctcggtctgggcgctgctgccgctggtggcgcgccgcatgctgggcggcagcgccggtttttacggcgttctgctgggggcggtaggcgccggggcgatcctcggggcgatcgcgctgccgcgcctgcgccagcggctgaatgccgacgggctggtgctgctggcggcggtgctcaccgccgtggtgatggcggccctgtcgctggcgccgccgcagtggctggcggtggtgctgctgttggtgctgggcgccggctggatcattgcgctgaccacgctcaacggcgcggcgcagggcgtgctgcccaactgggtgcgcggccgcggcctggccatctacctgatggtgttcaacggcgcgatggcggcgggcagcctgttgtgggggctggtggcgcaggagctgggcgtggcggccacgctgctggtcggcggtgtcggcctgctggcggcggggctgctgttccatcgcctgcggctgccgaccggcgaggccgatctgcagccgtcgaaccattggccggagccgttggtcaacacgccggttgagaacgatcgcggcccggtgatgattcaggtggagtaccgcatccgcgaacaggatcggccgcagttcttgcgcacgctgctgatgctggagcgggcgcgtcgccgcgacggcgcttacgcctggggcattaccgagcacaccggcgatccggaatgcatcatggagtggttcctggtggagtcctgggcagagcacctgcggcagcaccagcgggtgtcgcacgccgacgccgatctgcagcaggcggcgctgcgcttccatatcgggccggagaaaccggtggtgcatcacttcctgtcgctcgaccggcggcaggtgaagcattaa

SEQ ID NO: 423173 - DNA, 1053 bp, Serratia marcescens
atgacggcaccttctgcttttgcccgcgagcttgggctgcgctatccgatcgttcaggggccgatgaacggcgcgtcgccgccggcgttggcggtggcggtgagcaacgccggggcgctgggctcgtgcgcggcggcgctgttttcaccggcggtgatcctcgaacgggtgcagcagatccgcgcgcagaccgccgcgccgttcaacatcaacctgtttctgctcgatgagcagcacccggatctcgccgagctcaagcgtgcccagcacctgctgcggccgttccgcgaagcgctggggctgagcgagccgccaatccccacccaattcgccgaaaacaaccgtgaccagatagcggccttgctggaggcggcgccgccggtggccagcttcaccttcggcgtgctgccgcgcgccacggtcacgcagttcaagaaggccggctcgcgggtgatcggcaccgccaccacggtggcggaagcccgcgcctgggaagaagcgggcgccgacttcgtttgcgtctcgggcgcggaagcgggcggccaccgcccgactttccttggcgatatcgagcaatcctgcgtcggcctgatggccctgctgccgcaggtggtggcggcggtgaagatcccggtgatcgccgcgggcggtatcatgaacgggcgcggcatcgcggctgcgcgcttgctgggcgcacaggcggcgcagctgggcaccgcgtttctgtgcagcccggagtcgggcatcgccgaagcctggcgggcggcgctgagcaacgccggtgatgacagcacgcgcctgacgcgcgccttcagcggccgcccggcgcgcggcatcgtcaatgatttcatgcgccagatgcgcgcggaagaggcgcagatcctgccttatccggtgcagaacgtgctcaccggcgatatccgccaggcggcggccaaggccgggcgcggagagtttatgtcgctgtgggccgggcagggcgtgggcctggcgcggccgatgccggcggcggagctggtcgccaccctggcggcggagctggaagcggtgtga

SEQ ID NO: 423174 - DNA, 1383 bp, Serratia marcescens
atgtcattagctaccgataaaatctcagattatttaaccgattatgaaagaggcgatcgcgagggaagcagcaagccttcatacgccacggaagacgtttcagatctgttgctgaggagccattattccgccaatggcaaaggcgtgactgaccatgcggcaacaataacctactctttccccgtgtataccgacagcgataagccaggatccgcacagcttaccgccgcccaacaggcccaaaccaagctttcattgcagtcctggtcagacgtggccaatatcaccttcaccgaggtcaaaggcaccgatgccaaaagtgctgatataaagtttggtttttataaggcggccagcggaggcaattacacctcctatgaaagtacgcaaaacgacctgaaaagcaccatctggatcagcggcaacaaaggctacgacgcttcgaatccgcagaccaataactatgccagggatacgctgacccacgaaatagggcatgcgctcgggctctcccaccccggaaactatgatgcctccaacgcgacctaccccacctacaccaactcggcgaaatattatgaggacgaccatcaatattctttgatgagctattttagtgaacaaaacaccggcgccgactataaaggcgtatggccctcggggccgcagctggatgatattaccgccattcagaagctgtacggcgcgaacaccatcacgcgcaccggtgataccacctatggtttcaactcgaatacggatcgagactttttgagcgttaaggcgtccacggacaaaatcgtggcggctatctgggatgccggcggcaacgacacgctggatttttcaggctacagccaagatcagcgcatcaacattaacgaaggctcattctcagatgtgggcggattgaaggcgaatatcgccatcgcctatggcgcgcagattgaaaatatcatcggcggcagcggcgccgatatcttagtgggcaacgcactgaacaatacgctcaaaggcggcgcaggcaacgatatcatttacggtgccgacggcgccgatcagctctggggcaatgcaggcgccgacaccttcgtcttcagcgcagccgacgacagccaggccgccgcgccggactggatccgtgatttccaaacggcggtggataaaatcgatctgtcgtggctcaaccagacggttaaggccgaggggggcgagttgcacttcgtcgataatttaagcggctcgctgtatgaagcggcgctgaattatgactcgcagcagaatgtcaccgatctggcgatcaatctctccggccataaccagcctgatttcctggttaaaatcgttgggcaggtcgacgcctccgccgatattctcgtctag

SEQ ID NO: 423175 - DNA, 1290 bp, Serratia marcescens
atgatgaaacgcacgttttccgcactgttgctgttctccacgctccccgccctggcggcggaacccgccgcttccccctggaaaaacatcccgttgggcgatgcggccaccctgtctttcgacggttcactgcgcgagcgctatgaatggacggatcaacgcgatctgagcggcggacgcgacgacaccttcatgcagcgcctgctgattggcgcgcgcctcgactatggcgacgactttggcgcctatgtccagttgggatcgtcactggccacgccgcgcgatcgcgggcgcaaaccgaccgacgaagatcatgcctatctcggccagggctatgtggacttaaaactgcccaccgcctatggcctcggcaccctgcgggtcggccgccaggagattgcgctgggttcgctgcacctgatgggcacccgcgacggccccaacgtgcgtcgttctttcgacgccatccgcgccagctgggccaaggataaaaaccgcctcgacgcctttatcggccaccccgtcaccctcaaaaccggcagtttcgacgacgataccgacaacagccaaaaggtgtgggggctgtacggcaccacgccgctggcagcgctggcgtcctcgctcgatctctacacctttggctttgaggataacgacgcccactacgcgcagctcagcgggcaagaacggcgctataccgtcggcgcgcgcattttcggcgcggcgcaggggttcgactgggataatgaagccgcctggcagttcggcagcgcagaacagcgcgacatccgcgcctggtcggcgtcggcgcacgccgggtataggatgagcgactggcgctggcagccgcgctttggcggcaagattggcatcgccagcggcgataaaaacggtcacgatgggcagctcaatacctttaacgccatgtaccccaagctgccctacctgaccgaaaacgggctggtggcgccggctaacctgatcgccattcatccttcggtcacgattacgccgtggcaaaccctggccatcgacttcagttgggacgcgttgtggcggcaacgccgcgaggatgccttctacctcgggccgatgcgcccggtgaagggcagcgcgcagggctcgcgctttatcggcaatcagtatcaggtcgaaaccatctggacgccgcgcagcgatctccagttcaaggtggcctatgtctacttcgacgtcggccacagcctgcagcaacatgccgggctgaaaaacatgaacttcgtcctggcgcagggcacctacagtttttaa

SEQ ID NO: 423176 - DNA, 900 bp, Serratia marcescens
atgcaacatattatcggtatttcttctcgtcggctgaggatatcagcccttgcgctgctgctccctgccgtatcatgggcggccgatacggcgtctctcgccgtggggccgcaatatgacaccacccatgtctacgtcgaacgcggaaaaatggatgcctttgtcgacagcatcctgaaaaccttcggcggcaccagcaccgaacgcgtgctggtcaacgtcacgcccacgccgagcgaaacctactcccagctgatactgacgccggccggcagcttctcggtgttcgatttcaaaacgccgatcccgcacccgttcggcgccgagcgcaacggttttctggtcagggatatggacgccgccatccgccaggccagggccgccggtgccgatgtgcaagttgcgcctttcgacgatccgattggccgcgacgcggtgatccagtggcccggcggcgtcaacatgcagctctattggcacaccaaggcgcccaactacaagccgctgctgagcgtgccggaaaaccgcctgtatctctccgcctaccgcgtcgacgatttcctgaaaagctaccaggcgttctcgcacgccacggtggtgagcgacgaacaggtcagcgatacgacgatcggccgcagcgacagcggcaagatccgccagatcgaactggactcgcgcttcggcaaaacgcgcattttcgtcaccgacgggcatctgccttatccgttcggccatgagcgcaccggctatggcgtcgacgatctgccggccacgctggccaaagcgacggccagcggcgcgcaggtgctgtggcgttcgacggcggcggagcgccgcgcctcggcgctggtgcgtttccccggcggctacatcgccgaaattcaccagacggctaaataa

SEQ ID NO: 423177 - DNA, 2196 bp, Serratia marcescens
atgacaactgaaagcaaatgcccgttttcgggcggcaagcagcccgcaccgcagaacggccccaccaatcaggattggtggcccaatcagctcagcctgaaaccgctgcatcagcactcccccctgtccgatccgatggataaagacttcaactacgccgacgccttcaacagtctcgatctggcggcggtcaaacaggatctgcacgccctgatgaccgactcgcaggaatggtggccggcggacttcggccactacggcggcctgttcatccgcatggcctggcacagcgccggcacctaccgcatcggcgacggccgcggcggcgcgggcgaaggccagcagcgcttcgccccgctcaacagctggccggacaacgtcagcctcgacaaggcgcgccgcctgctgtggccaatcaaacagaaatacggccgcaacatctcctgggccgacctgattatcctgaccggcaacgtggcgctggaatcgatgggcttcaaaaccttcggctacgccggcggccgtgccgacacctgggagccggacgacgtctactggggctcggagaagatctggctggagctgagcggcgggccaaacagccgctactcgggcgaccgcgacctggagaacccgctggcggcggtgcagatgggcctgatctacgtcaacccggaaggcccggacggcaaccccgatccggtggccgccgcgcgcgacatccgtgaaaccttcgcccgcatggcgatgaacgacgaagaaaccgtggcgttgatcgccggcggccacaccttcggcaagacccacggcgccggtccggcgtctaacgtcggcgccgatccggaagcggccgggctggagtcgcagggcctcggctggcacagcaccttcggcaccggcgtcggcaaagacgccatcaccagcggcctggaagtcacctggaccaccaccccaacccagtggaaccacgatttcttccgccacctgttcgaatacgaatgggaactgagccaaagcccggccggcgcgcaccagtgggtggcgaaagacatcggtgaaaccattcccgacgccttcgatccgaacaagaaacgccgcccgaccatgctgaccaccgacctgtcgctgcgcttcgatccggcctacgagaagatttcgcgccgcttctatgagcatccggaagagttggccgacgccttcgcccgcgcctggttcaagctgacccaccgcgatatggggccgcgccctcgctacctcggcccggaagtgccgcaggaagagctgatttggcaggatccgatcccggcggtcgatcatccgctgatcgacgagcaggacatcgccgcgctgaaaaacgccgtgctggcttccggtctgccggtatcggcactggtctccaccgcctgggcttccgcttcgagcttccgcggttccgacaaacgcggcggcgccaacggtgcgcgcattcgcctagcgccgcaaaaagactgggcggtcaaccagcctgcgcagctcgccgcgacgctggccacgctggagagcatccaacgcaccttcaatgatgcgcaggccggcggcaagcgcgtctcgctggcggatctgatcgtactggccggcgccgcaggcgtggaacaggcggcgaagaacgccggtttggccctgacggtgccgttcgcgccgggccgcatggacgcttcgcaggagcagaccgacgtggactctttcgaagcgatggagccgctcgccgacggattccgcaacttcctgaagggcaaataccgcgtgccggccgaaacgctgctggtcgacaaggcgcagctgctgaccctgaccgcgccggaaatgacggtgctggtcggcgggctgcgggtgctcggtgccaacgtcggcggcacgccgcacggcgtgttcacccagcggccgcaggcgctgaccaacgacttcttcgtcaacctgctcgacatgggcaccacctggcacccggtgggtgaggacggcctgttcgaagggcgcgatcgccgcagcggcgcggtcaaatggaccggcacccgcgtcgatctggtgttcggttcacacgcgcaactgcgcgcgctggccgaagtctacggcagcgccgacgcgcaggagaagttcgcccacgacttcgtcgccgcctggaacaaagtgatgaacctcgatcgtttcgatctggcgtaa

SEQ ID NO: 423178 - DNA, 1425 bp, Serratia marcescens
gtgcagggagatgacatcctcatgacgatggagcaacggcttgccgcccagcgccatgccttcctgcgcgacggcgcaccgacgatcgctcagcgcaaggccgccctgcgccgcctgcggagcgccattttggcccagcgcggcgcactgacggcagccgtcagcgcagacttcggccaccgttcgccttacgaaaccgacatcctggagatcctggtcaccgtgcaggcgatcgattacctgctgcgcaatctgaagcgcttcatgcagccggaacgccgccacgtcgccctgccgtatcaggccgggcgcgcctacgtgcagtatcaacccaagggcgtgattggcgtcattgcgccgtggaactacccgttttcgttgaccttcatcccgctggccaccgccctggccgccggcaaccgcgtgatgctgaaaccttcggagctcacgccgcacaccagccagcttatcgaaacgatgctggcggcgctgtttcccgccgatgaggtcgccgtggtgaccggcgggccggacgtcggggccgggttcagtgagctggcgttcgatcacctggtgttcaccggcagcacggcgatcggccgccagatcatgctggcggccggtaaaaatctggtgcccttgacgctcgagctgggcggcaaaagccccgccgtggtggcgcccggcgcggttaacgccagaaccgttaacagcctggcgttcggcaagctgtcgaacgcgggccaaacctgcatcgcgcccgatttcctgctgatccatcaggacgatgtggaaaacttcattgcgctctacgacgcggcggtcaaagcgttttaccccgacggaccgacgagccatgactacggcgccatcatcaacgacaggcactaccaccgtttgcaggatctgctcgccgacgcccaggcgcggggcgcgcggatcgttccggtgggccaccgcccggactcggcggcggaacggccgaaaaccctcgcccccacgctgatcgtcggcgcccccgacgacagccggatcatgcaagaggagatcttcgggccactgctgccggtgcgcacctacaccgcctttgatgaaacgatcgacgttatcaacgccgggccgcgcccgctggcgctgtactactttggcccaggcggcacgctgcaggacaggctgctggcgcgcaccacctccggcaacgtcagcgtcaacgccaccctgctgcactttgcccaggacgatctgccgttcggcggcatcggccccagcggcatgggggcctgtcacggcatcgaaggattccgggcgctgagccacgccaagggcgtctttatccaaagccgctggcgcttcaccgatttgctgcgcgcaccgttcggcaagctggcagacgcggtactcaaggtgatgctgcggcgccgatag

SEQ ID NO: 423179 - DNA, 831 bp, Serratia marcescens
atgggttacgtaacgaccagcgatggcgtcgagattttctacaaggattggggccccaaaaacggcaaggttatctattttcaccacggctggccgctgtccagcgatgactgggatgcccagatgctgttcttcgtgaacaaagggttccgcgtggttgcgcacgatcgccgcggccacggccgctccagccaggtgtcggaagggcacgacatggaccactacgccgatgacgtcgccgcggtggtaaaacacctgggcgtgcagggcgcgatgcacgtgggccactcgacgggcggcggcgaggtggtgcgctatatcgtgcgccacggcgaggacaaggtgtccaaagcggtgctgatcagcgcggtgccgccgctgatggtaaaaaccgacgccaatccgcagggcaccccaaaatcggtgttcgatgatttccaggcgcagctggccgccaaccgggcgcagttctattacgacgtgcccgccggcccgttctacggttataaccgcccgggcgccaaaccgtcggaggcgattatctggaactggtggcgccagggcatgatgggtggcgccaaggcacactacgacggcatcgtcgccttctcgcagaccgatttcaccgaagatctcaagaagattgccattccggtgctggtgatccacggcgacgacgatcaggtagtgccttatcaggattccggcgtgctgtcggccaagctggtgcagaacggcacgctcaatacctataagggcgcgccgcacggcatcccgaccacccatgccgatcaggtcaacgccgatctgctggcgttcgtgaacagctaa

SEQ ID NO: 423180 - DNA, 1053 bp, Serratia marcescens
atgataaaatgcaatccgcgttatttttcggcgggcatgcttttccccctgctggccctattaccacgcggcgccttcgccgtgtcgttgacggggtcgcagcaaaacagcctgaatttctacggcacgattatcgccagacgctacagcggccaaaacgcgcgcgacgacggcgaccgcagctacctctatttcggcctgataggcaaaaaaaagatcgcgccgcgctggcgggcctacgcccactgggaatataccgtcagcttcgccgacgcgactcgcaacagcacccgactcgcctatattggggtgcaaaacgcaaccttcggcagcctcgatatcggccgcaattggggcgtgctctatgatgtgaccgccctgaccgatcgctctccgctgtttagagagatggcctacaactacatcgacaattttatgcgcggccgggcgcgtaacctgctcacttaccgccgccccttcagcctgtttcagcggcgcgccgcactcgcgttgcaatatcagttcaaagacggcgacgaccggcaaacgccgggcaaacaaaacggcaacggattcggcctctccttccgttatgcgctgacgccgacgctcagcctcatcgccgccgcctcggcgtctcaaaccacgcagcggcagcaacgcgccgccggctatcgccggcgcatcgatacgctggccgaaggggttctctatgcgtcgaaaaaaatctaccttgcggccgtgttcacccaaagcgacaacgccatcagcccgcaacaaaccgctaaccgcggttcggcgtcaagttatgaagcgctcgccaaataccggctgacggaccacgtccaacccaacatcggctatacccgtttgatacagacccgggcaggccggaacatggacttattgaactatgaggagctgggggtcacctggttactcaacagcaatatgcaggtgtttattaactatgaattcaataacctttcgcagcacatgcccggcgtcgatgcctcggacaagctcgatatgggcatcagctatcattggtga

SEQ ID NO: 423181 - DNA, 846 bp, Serratia marcescens
atgctggttacccttatggctaagacggaccttttgaacacccggttatctcgccgcagaatgatgttggcagggctggcggccctggcgttgaacggcgccgcttccccgctggctcacgcccacggcctgccgcgccccaaatctcacggggcgcgaaaaagattcctggtcatgttggatcccggtcatggcggcatcgactccggcgccattggccacaccggttcgctggaaaaacatgtcgttctggagatcgccagaaatgtgcgtgcacagctcgaccgacacggcatcgatgcccgcctgacgcgcgacagcgacgtttttattccgctttacgatcgggtggagatcgcgcaccggcacggtgcggatcttttcatgtccatccacgccgacggttttacctgccccagcgcctgcggcgcttcggtctttgcgctttccaataaaggcgccagcagcgcgatggcgaaatacttatcgaacagtgaaaacgcggcggacgatctcgccggccctaacgtcatcaagaaagaccgctatttgcagaagatactgtttgatttggagcagacggaaacgatcaaagaaagcctgacgctgggctcgcacctgattcaacatattgcgcccattcatcatctgcatgccaaaaataccgaacaggcggccttcgtggtcttaaaatccccgtatattccttccgtgttggtggaaacctctttcatcaccaaccctgaggaagaaaggctgctcggcacccccgcattccgaaataaaattgccacggcgatcgctcaggggatcgtcagctactttaaacgcgaaacgcacgcttaa

SEQ ID NO: 423182 - DNA, 1371 bp, Serratia marcescens
atgacttttaaacaccaggaaaaagagacattaaatatattcgccgttctcgccgtctcgttaagcacggttatcgccatgctcgacagtaccatcgccaacgtggcgctgccggtgatcgccaaagatttcggcgtttccgaatcggcctccatcatgattattaatgcctaccagtttgccgtcgtcgcctctttgatgcccttcgcggcgctgggccgcgcggtgggcaataaaaagatctttatggccggggtggtgctgttcgctttttcatccttgggatgcgcgctttccgcgacgctgtcgatgctgacggcattccgggtgatacagggcttcggtgcggcggcggtgctcagcgtcaatgcggcgctgatcaaggagatatacccggaaaggctgctggggcgcggcctgggcataaacgtaatggtggtgtcggtttccgccgccgccgggccctccatcgcctcggcgatactttctcaaacgagctggaactggctgtttaccatcaatgttcccatcgcctgcctgtcgctgttgctgagcctgatcttcctggccccccgcgagcggcgcagcgttggattcgacagtgggggggccctgttggtgtttgtgctgttcatcgctttctcgctcagcaccatgagcatgaccactcaccatctgccggcggcggcgctgagctttgcggtattcgccgggctggccgggttgctgtatatcaatcaaaaaagaaaggctgacgccgcgctgatcccgatcgcgatgctgcataacccgacgctgtcattgtctttgctgatgtcgatgctgtcctacagcacccagcttttggcctatgtttcgctgcctttttattttcacaacgttctgcaaagaaacgtggtggaaatcggtctgttgctgaccgcctggccgctggccaccatggcgtcttcgctgatttccggcgatttggccaagaagtacgatcccaatcttgttgccctctcgggccttgcctgtctgctggcaggcatgctgctgatggccaatctgccgagcgatccgtcgaatggggcgatcgtatggcgcgtggcgctgtgcggcatcggtttcggcctgtttcaatcaccgaacaacctgttgatcatgacgtcggtctcccatgaaaacagcagcatcgccagcggcctgttgggcagttcccggctgattgggcaaatcgtcggttcggcgttggtggcgattttcttcaacatgcggggtgcgcaagcgacgaacatcagtttaatggcgggggcggcattctcgttcctttctctggtcgtgagctatatgcgcttcaagtccgccgttacgttaaaaaccagtaaatag

SEQ ID NO: 423183 - DNA, 399 bp, Serratia marcescens
atgcgatttatcccattagtgccgttggttatcggcatggcggcgttttcccttgccggctgcacgacctaccacgacgtggcgttgcaacaaaaagagacggggctcaatagccaatattacctgctgcagccgccggtctatgtcggcgaccggttgaaatatggtctgaaggacggcagcgggggcgagttgacggtggcgaaggttgaaccgaaagacctggtcgccgacagcggaaaaatcattcccctgtcgcagctctctttcctgcagcgaaaagacctttccacaggaaaaaccgccgcgttggtcggcggcggcgcggtcgccaccacggcaatcgtctttgtggccgggataaccatcatggccgccggcatcgccgcgtcggcctaa

SEQ ID NO: 423184 - DNA, 1077 bp, Serratia marcescens
atgtgcgtcacagtgaaatttatcgccaccgcgctgctggcaatattcgccttgccgacggcgccttgcgccagcggtagtcagccggcggcggccgaacggccgcagagcgcagcggtgcaaaagttgcctggccactatcagcggatcgtcatcaccggcaactgccccttcggcgtgatcctggcgaatgaggcggcctaccggcacgtcgtcggcgtggggccctgggcgttcatgcatgccgatatgcatgtgttgaaggacatgaagcctgacatcggcaggatcacctccgccttcatcaataaggactaccgggtcaacatggagtcgttaatgaatctacggcccgacattatttattactacggcaaaagccaggacgatcggctggaaagggcgggcgtgatgaccgtcgatctggatgccggcgggaagacaaagtaccaaccgatggtcacccagatgtattgggaaaataccttcgccgacacgctcggcctgccgcgcacgcacaaattcaaagacgcctgggaaaagaccctgaagcagatccgcccctatgccgcagccatccgcgcgcagcacgtcagggcgttgtatctcgaagaaagcgacggcaggcagctgaaggtgagcggcccgcatacctacggcgacacctacctgaaaatggccggcatggacaacgtcgccggggatttgccggtgaaaggggatgccggcaggtacatcaacgtttcgatggagcagatcatggcctgggacccggatgtgattttcgtggttttcggcagcgccaaagcgctgctgcacggggggatccccggccaggcctgggagacgctcagggcggtaaaaaacggcaaggttttctcgacgccggtgggcattcataactgggggggcctgtcggcggaaacgtcactgctgccgctgtttatgatcaaccgctatgcccctgaagacattagcgacaagacgctgcgggaggagacgcgccgctattatcagacgatgttctcctatgcgatcccggaccgtttgttggatgaggtgctggcacagcgctag

SEQ ID NO: 423185 - DNA, 1011 bp, Serratia marcescens
atgccgggcagaggaaaatatatggcgatcatggtagggctgtttttagccttgtgcgtggttgccgtcgcatcactgtttgccggccgttacgccttgtcggcccatgacgtgctgcagattttatggcaggggaacatgctgggggaaaaccaggcccactattcggtgatttttaacctgcgtgcgccgcgggtggtggcggtgatgctggtgggcggcgggttggcggtcgccggcgcgacctttcaggcggtgctgaaaaacgcgttagccagcccggacgtgctgggcacgtcttccgcctccgcctttggcgctgcgctgggcattttattgagtttgccttttgccctgagttccctactgtcgtttcttttcggcgtggtgagtttgttgctggtgcttggcatttgccgcctgaaacgccggcaggatgcgctgacgacgatcctgtccggcatgattatcgcgtcggtgtttatcgcgtttgtctcggccatcaaatatgtcgccgatccgcaggataccttgcccgccatcgtcttctggctgatgggcagcttcgcttcgctggcgaaagcgcaggtctattggctgatcccgctgtttgcggcgtgttacctgactatctaccggctcaggtggaacatgaacattctctcgctgggggacgacgaggcgcgcattgccggcctgaatccgccccggctgaagatcctgttgctgatcgccgcctctctgctggtttccgcctcggtgagtttggccggcgtggtggggtgggttggcttggtgatcccgcatttggtgcgaagcgtgttggggtataaccacggccgcctgatcccggcttcggcgctcggcggcgcgttgtttttgctggttatcgacaatattgcgagaggcgccacctatacggaaattccaatcggcatcctgaccgcgctgatcggcgcgccgcttttcgcggtgctttttattctggggaatcgatatgatcaccgctag

SEQ ID NO: 423186 - DNA, 768 bp, Serratia marcescens
atgatcaccgctagccggctagcctttggtttcaaggggcgggagcccattttcgacaacgtcagcttcgagcttaagcgcggcgagatcctcagcgtgctgggcccgaacggcgccggcaaaacgacgctgctgagaaatattgcgggcctgtgtcggcccagcgccggcaggtgcgagatcggccgcgtcgataatcgagaggcgcgcctggcctacgtgccgcaggcgaaggcgccacatttttcctatggcgtactcgattttgtcactttcggctgcgcccgccaggcgggatggttcgccgggccgcggcggcaagatttcaccagggcgcaggcggtgttgcacgcgttggagatcgcgccgctggcgcagaaaaatatcaaccagatcagcggcggtgaactgcagatgtgttatttcgccaaggcgctggtggcagatcccgacgtcatgatcctcgacgaaccggaatcgaatctggatttttacaatcaggccaaaatgatcgaaatgctgtggcgcctcgccaaagagcggcagatgacgatcgtgctgaatacgcatttcctcaattacgccgaacgcatctccgacaagtgtttactgatggcaaaacggcagtcgctgtttggcgttaaaagcgcagtgctgcaggaagatatcctggagcgctatttccgggtgccggtcagaaaatgccgctatgaacaccagggcgccagcgaagaaacctttattatcgctctacgcaatctcgcctga

SEQ ID NO: 423187 - DNA, 876 bp, Serratia marcescens
atgactgattcagtgtccaacgatcgtaatcccaccccggatgtggcggaagacaacgcgttcttcccatcaccttactccctcagccagtacacctcgtccaaaaccgacttcgcgggcgccagctacccgaacgcctatcgcggcggcaagtggaaggtgctgatgatcgcctcgcaggagcgctacctgctgatgcaaaacggcaagttcttctccaccggcaatcacccggtcgagatgctgttgccgatgcatcacctggatctggccggtttcgagatcgacatcgccacgccgtccggcgatccggtgaagctggagatgtgggcgttcccgcaggaagacgacgcggtcaaggccacctacgagaagtaccgcagccagctcaagcagccgaaaaagctgacggaagtggtgaaggatctggatggcggcaactacctcggcgttttcatccccggcggccacggcgtgctcaacggtatcccgttcagcgaagaggtgaaaaagaccctgcactgggcgcacgacaacgatcgctacgtgatttcgctgtgccacgggccggccggtttgctggcggcgggcatcgacgagagcaaagaggatttcctctatcgtggctatgaaatgtgcgtgttcccggactcgctcgataccggcgccaacatcgacatcggctacatccccggcccgatgccctggctggtgggcgaacgcctgcgcgagctgggcgtcaagatcgttaacgccgacatcaccggcaaggtgcataaagatcggcgcctgctgaccggcgacagcccgctggcctccaacaacctcggcaaactggcggcagagacgctgctggccgacgtcgccgcacgatga

SEQ ID NO: 423188 - DNA, 729 bp, Serratia marcescens
atgagcgacgagatcgcgcagcgcgctttccagacggcgctggcgatggaccacgagcgaaccctgtccgccattcaggggcgggttcgtgccttcgccgcgccgttcggcttcgatcgctttgtgctgttttccgcttccgctgcggcggaggcggggatcgagcatatctattgggtcgagggcgactggttcggcgacggcgaggccgtcgatgcgctgacctacgtgcggcactgcccggtgacccggcatatgctgcgggtcagcgagccgtttttctggaccaagaaccgggcgcagcagggcgagcgctaccggattgtacgcacgccgcgtggcgccggcctgcacggcgtgcagatcccggtgttcggcccggccggtttggagggcgccgtcagcctagggggcgatcgcatcgacgcctcgccgccggtgcggctggcgctggcgctggtgggcacggcggcctttcaggcggcgcggcggctgttcgcaccggcggccggcgaggggaagagcaggctgtcggcgcgtgagcgcgaggtgctgagctggaccgccatcggccggcggcaggcggatatcgccgcgatgctcggcctgtctgaacgcacggtggaaaaccacctgcggcgcattcgccaacgccttggtgccgccaccaccgcgcaggccatcagcgtggcgatccgcctgggggaaatcgcccccgagcgccgttag

SEQ ID NO: 423189 - DNA, 891 bp, Serratia marcescens
atgagaaaaccccgtttgccgccgctgggcgcgctgcgcgccttccacgccgtggccggctgccgcagtttcaaactggccgccgaggcgctgggcgtcagcgcgacggcggtcagccaccagatcaagctgttggagtcggtgcttgcatgccgggtgtgcgagcgcagcgcgcagggcgtcagcctgaccgagaccggcgagatcctgtatgccggcacccagcgcgcctttgcggcgctggagcagtccgtcgcccaaatcacccgcgcccaacagccgccggcgctgaccgtcaccaccacctccaattttctcacccactggctggtgccgcgcctggcggatttcaaggcggagtttcccgccatcgatctgcgcctgcacaccagcgtcgagcgcgtcgatctcaaccagcgcaccgtggacgtcgccatccgctaccgcgaaacgccggaaaccgatctgcactgcaccctgctgcatgaggatcgctttatcgtggtggccagcccggcgctggcgctgaagcgcagcgaggatttgcggcgggtaacgctgtttcacgtggaacatcggcaggtgcctgccgacgcgccgacctgggaaaactggcggcggcgctacgggccggaagggttgaacgtggaagccgggctgaccttcagcgacgagacgcatgcgctgcaggcggcggtggcgggccagggggtggtgatcgccagccggctgctggcgcgcgatttgttgcagcgcggcgtgctggccgcgccgttcgagatgtcgttacccggcgccaactattacctggtgaccaccgaagaaaccgcgcagcgccccgatatcattgcgctgcgcgagtggctgctgcggcaaatggcggcgggctaa

SEQ ID NO: 423190 - DNA, 570 bp, Serratia marcescens
atgagcatatatgtcaacaacggcgccctgggcgccatggaacacacgggaacggcggcgagcggtctggcgctcagcgtgccggtcgcggcgggcgccttgctgctgaagaccgaaagcctgctgggcatcggcgcaacgctgatgctgctaacggcattggcgctggcgtttctcggcggcgccgcgctggcccgctggcagccgctgaggaagcggcctgcgctggctatgctccgctacggttttttgctggcggcggcggggtggctattgacgctgctgatgctgttcggcggccatgattggccggccctgctggcgggcatcgccctcggcggcctggggcagggcgtggcctaccgcacggcggtaggggaaggggcgttcgctgtggcgtgcaggctggcgacggtggtgaccatcgtggccgtgttggttgccgcgttgctgattcaaacctacgccgcgccgggcgcgagaggaggctgtttcgcgctggcgttgctggtcgatctggcgctgttgggggcgttgatggcgcgggttgcggagcgggatggcgcctga

SEQ ID NO: 423191 - DNA, 921 bp, Serratia marcescens
atgtccgacatgattgccctgatgaatagacttgcggtgcaagagggatacaacctcactgccctgcctgatgtgcgaattttgcgttccgatcgcccgcttgccagaacgccggtactttacgatccggggatcgtgatcgtctgccagggcagcaaacgcggctatttcggtcaacagacctatttatatgatgagcagcactacctggcggtttcggtgccggtgccgtttgtgatggaaaccgacgcgtcggcagcacatccgctgctggcgatttatatgcatctggattttcagcttgccgcggaactgatgctgcagattgaacagcatggcgccccgcatcctcccgtcgcgccgcaaagcatgatgtcgagccccatggacggcgcggtaaaaatggccgtacttcgcttacttgacgtcctgaccaacccgcttgaggcggtaatcctcggcccggcgcgggtgcgtgagctttatttccgcgtgctgacaggcgcacaaggcaacgcaatgcgtgccgcgctggccttgcaggggcagtttggcaaaatcggtaaagcgttgcagcacatccatgccgcttacgcggagccgttaacgctgacgcagctggcgatgatggccggcatgagcgtgccgacctttcatagccatttcaaggcgataacgcagatgccgccaatgcagtatgtgaaatcggtacgcctgcaccaggcacggatgctgatggtacgccaacaaatcaccgccgccgccacgagttacgccgttggctatgaaagcccatcgcaatttaaccgcgaattcaagcgtctgtttggcctgccaccggcagaggagataaagcgtatgcagcatcacttcgccattccgcccgcgcagcctgcctcggtatttgtttcatcgcactga

SEQ ID NO: 423192 - DNA, 834 bp, Serratia marcescens
atggcatctgcaaaaacgattttaatcaccggcgtcagcagtggctttggccaggcgctggcgcgggaagccctcgccgtagggcatcgggttgtaggaacggtgcgcaacagcgaagcactgcaggctttcgccgcgctcgatacgcagcacgcttttggctatctgcttgatgtcacggacgttgagcgtattgatgaggtggttggagagattgagtccgccgtcggcccgatagatgtgctggtgaacaatgccggttacggccacgaaggcattctggaagaatccccgcttgcagagctgcgccgccagtttgacgtcaatgtgtttggcgcggtggcgatgatcaaagccgtgctgccgggcatgcgccagcgccgttgcggccacattatcaatatcacctcaatgggcagcttcattaccttgcccggcatcagctattactgcggcagcaaatttgcactggaagggatatcagaaaccttaagcaaggagcttgccccgttcaaactacacgtgaccgccgtggcgccgggctcgtttcgaacgaactgggccgggcgttcaatggtacgcagccctcgctgtctcccggactatgacgcgttatttgaacctgttcgtcaggcgcgtcaggaaaaaagcggcaagcaactcggcgatcccgtgaaggcggctcacgccatgctggcagtgatcgagagccggaacccacccacgcatctgttgttaggcagtgacgcattaagtttggtgcggcaaaagctcgaggcgttaggtcaggaaattgaacaatgggagaaacttacccgttcaacggatggctga

SEQ ID NO: 423193 - DNA, 3090 bp, Serratia marcescens
atgcccgctgcgccccttgtttccctgaccgagatcctcgcccgccgtgactggcaaaacccggcctgcacccactcccgccggctggacgcccacccgccgttcgccagctggcgcacggtggaagacgcgcgcgacgatgcccccagcgccagccgcaggtcgctgaacggcgagtggcgcttcagctatttcccgcgcccagaggcggcgccggaaggctggctgcagcaggacctgccggacgccgccccgctggcggtgccgggcaactggcagctcgccggctacgatgcgccgatctataccaacgtgcgctacccgttcccggtcgatccgccgcgcgtgccggaagacaacccaaccggctgctactcgcgcaccttcagcgtcgatccggcctggctggccgccggccagacgcgcgtcatcttcgacggcgtcaactcggcgttctatttgtggtgcaacggccactgggtcggctattcgcaggacagccgcctgccggcggagttcgatctcagcccgtggctacaggcgggagaaaaccggctggcggtgatggtgctgcgctggtgcgacggcagctatctcgaagatcaggacatgtggcgcatgagcggcatcttccgcgacgtcagcctgctgcacaaacccgccgcgcacctgagcgatgtgcgcatcaccacgccgctgcatgaccgctttacccgcggcgaactggtggtgacggcgcacgccagccggcccggcccgctgcaagtgcaggttcagctgtggcgcgatggcgcacgggtggtcgaacgcacccagccgctcggcagcgagatcgtggacgagcgcggcgcctataacgatcgcgtcacgctgcgcctgccggtagaacgcccggcgctgtggagcgccgaaacgcccgcgctgtatcgcgccaccgtcgccctgctctcacccgagggggaggtcatcgaggtggaggcctatgacgtcggcttccgccaggtagaaatcagcggcgggttgctgaagctcaacgggcagccgctgctgatccgcggcgttaaccgccacgagcatcatccgcgccacggccaggtgatggacgaggcgacgatgcgccacgacatcctgctgatgaaacagcacaacttcaacgcggtgcgctgttcccattaccccaaccatccgctgtggtaccggctgtgtgaccgctatgggctttacgtggtggacgaagccaatatcgagacccacggcatgcagccgatgaaccgcctggctgacgatccgctgtggctgccggcgatgagcgagcgcgtcacccgcatggtacagcgcgatcgcaaccacccctgcatcattatctggtcgctgggcaacgagtccggccacggcgtgaaccacgatgcgctgtaccgctgggtgaaaagccaggatccaacccgcccggtgcaatatgaaggcggcggcgccgacaccgccgctaccgacatcatctgcccgatgtatgcgcgggtggatcaggatcagccgttcccggcggtgcccaaatgggcgctcggcaagtggattggcctgccggaggaacagcggccgctgatcctgtgcgaatacgcccatgcgatgggcaacagcttcggcggctttgagcgctactggcgcgcgttccaccactatccgcgcctgcagggcggctttgtctgggactgggtcgatcaggcgctgatcaagcgcgacgcacagggcgaagagttctgggcctacggcggcgacttcggcgatacccccaacgatcgccagttctgcctgaacgggctggtgttcgcggatcgcaccccgcacccggcactgttcgaagcgcagcgggcgcagcagctgttccgcttcgccttcgacgccgcctcgctgacgctgaccgtcaccagcgattacctgttccgccagaccgacaacgagcagctcaactggcggctggagctggacggcgtggagcgcgccagcggcagcttcgatctggcgctgccgccgcagggcagcgctggcttcaccctgctcgaccgcctgccgatgctgcatcagcccggcgagctgtggctgaacgtggaggtggtgcagccgcaggccaccgactggtccgaagcgcatcaccgctgcgcctgggatcaatggcgggtgccgcgcgcgctgcatcccgcgccgccgccggcgcagggcgtgccgcccacgctgattgaagacgatcaggggctgaccctcacccacggcgaccagcgctggcgcttcgagcgcagcagcggccatctgacgcagtggtggcagaatgagcagccgcagctgctgacgccgctgcgcgacggctttgcgcgcgcgccgatcgataacgacatcggcgtcagcgaggcggaccatatcgatcccaacgcctgggtcgaacgctggaagctggcgggcctgtaccggctggaggaacgctgcacgcggctgcaggccgatgcgctgcaaaacggcgtgcaggtggtgagcgaacaccagttcggcgtggacgggcagattttgctgattagccgcaagcagtggctattcgacgcgctgggcgcggtgagcgtgaacgtggaagtcgaggtggccgatactctgccgccgccggcgcgcatcggcctgcactgccaactggcaacggtgcaaccgcaggcggaatggctgggcctgggcccgcacgagaactacccggatcgccgcctggccgcgcagcacgggcgctggcgcctgccgctggcggatctgcacacgccgtatattttccccggcgagaacggcctgcgctgcgacacccgcagcctgcgctacggcggctggcgcatcgacggccgcttccacttctcgctcagccgcttcggcctgcaacagctgatggcctgcagccaccagcatttgctgcaaccggaagcgggcacctggctgcatctggacggcttccacatgggggtgggcggcgacgattcctggagcccgagcgtgcatcgggattacctgctcaccgccggcatttaccgttatcagctgcgcctgcagcgggcgccagagagctaa

SEQ ID NO: 423194 - DNA, 687 bp, Serratia marcescens
atggaatggctgaacatcctgatcgttgaagacgaaacgccgctggcggaaatgcacgcggagtttatccgccagaacggcggctgccgccagatttggctggccggcaccctggcgcaggcgcgcgccatgaccgagcgcttcaagccggacctgatcctgctggacaactttctgcccgacggccagggcatcaccctgctgcgcgaactgacgttgagcgggtatcgcggcggcatcgtgttcatcactgccgccagcgacatggccaccgtggccgaggcgttgcgttacggcgtgttcgactacctgatcaaaccgctggcctatgaccggctgagccagaccctgcagcgcttcagccagcgccgcgaagcgctgaaggacaaagcgcgcctcaaccagcgccgcatcgacgagatgttcaacacctacgcccgcggcgaacagcaggcggcgctgcccgccggcatcgacgagctgacgctgggcaaggtccgcgcgctgtttgccgaacccgccgcgcgccacaccgctgaaagcgttgcgcaaaaaatggggctcagccgcaccaccgcgcgccgttatctggagttttgcaccgccgcgcagcagctgcgcgccgagatcatttacggcaaggtcggccgcccgcagcggatctaccgcgccggcgaaccgcattaa

SEQ ID NO: 423195 - DNA, 1071 bp, Serratia marcescens
atgttaggcgatgccgtatttaatcgggtaaagcgatcggatcataaagcgatttcggaaataagcgccttcttgcgcagtaacgatctgaatatcgacaccacggttgaaatatttattaccgttacccagcacgacaaattggtcgcctgcggcggcatcgccgacaatattatcaaatgcgtcgccatcagcccgctgatgcgcggtgaagggttggcgctggcgctggcgaccgagctggtgaacctggcctacgagcgccaccacactcagctgtttatctacaccaaggtgcagaacgagccgctgttccgccagtgcggtttctacccgatcgccaccgtgccgggcatcgtggtgctgatggaaaacagcccgtgccgcctgaagcgctacgccgcccagctggcgagccagcgccggccgggcgacaccatcggcagcatcgtgatgaacgccaatcccttcacccgcgggcatcagtatctggtgcgtcaggctgccaaacgctgcgactggctgcacctgtttctggtgaaggaaaacacctcgcgcttcagctatgaagaccgccgccggctggtgctggccggcaccgccgatatccccaacctcacggtacacgaaggctcgcagtacgtgatctcgcgcgccaccttcccctgttacttcatcaaggatcagggcgtggccgatgactgttacaccgaaatcgatctgaagatcttccgccagtatctggcgcccgcgctgggcattacccaccgcttcgtcggcaacgagccgttctgcgcggtgaccgcgaaatacaaccgcgacatgcgctactggctggaaacgccggcgctgcccagcccgccgatcgcgctggtggaaatcgagcgtttgcaatatcagggcacggcgatctccgcctcctgggtgcgcaagctgctggcggcgggggacttccacgccgccgcgccgctggtgccgccggacaccctgtactacctgcaggatctgcaaacgcagcgccgggccaaggcggccccgcatccttttgagtccgcacaatcaggtgaatga

SEQ ID NO: 423196 - DNA, 288 bp, Serratia marcescens
atggccggcacgctggaatccagcgatgtcatggtgcgcatcgcgcccgccgaggggccgcagcacgatctgttgatcgccagcagcgtggaaaaacagttcggcgcggcgatccgccacaccctgctggaggtgctgcagcgctatgaggtggagccggtgcaggtgatcgtcgacgacaagggggcgctggactgcgtgctgcgcgcccggttggaaaccgcgctgatgcgggcctgcgagggcggccaactgccgtgggaggcgaaagatgaaaacgctgaataa

SEQ ID NO: 423197 - DNA, 921 bp, Serratia marcescens
atgaaaacgctgaataaaacccggctgcgccgcagcatgttgttcgtccccggcgccaacgcggcgatggtcagcaacgcctttatctaccaggccgatgcgctgatgttcgatctggaagactcggtgatcctgcgtgaaaaagacgcggcgcgccggctggtgtaccacgcgctgcagcacccgctgtaccaggaggtggaaaccatcgtgcgcgtcaatgcgctcgactccgcctacggcctggcggacctgcaggcggtggtgcgcggcggcgcggacatcgtgcgcctgccgaagaccgacagcgcgcaggacgttgtcgacatggaacgcgagattgccgccatcgaagcggcctgcggccggccggtcggcagcaccgggctgttggcggcgatcgaatcggcgcagggcatcaccaatgcggtggcgatcgcgcatgcttcgccgcggcttatcggcatcgcgctgggggcggaagactacgtgcgcaacctgcgcaccgaacgctcgccggagggcatcgagctgctgttcgctcgttgttcgctgctgcaggcggcgcgcgccgccggcattcaggcgttcgacaccgtctattccgacgccaacaacgaagccggcttcctgcaggaagcggcgctgatcaaacagctcggcttcgacggcaaatcgctgatcaacccgcgccagattgagctgctgcacaacctgtacgcgccgaccgccaaagaggtggcgcacgcgcagcgggtggtggacgccgccgaagcggcggagcgggaagggcgcggcgtggtgtcgctcaacggaaaaatggtcgacagcccggtgattgaacgcgcccggctggtgctggagcgcgccgcgctgtccggcttacgggaagaaccggcgcagcacggggaggaagcatga

SEQ ID NO: 423198 - DNA, 1509 bp, Serratia marcescens
atgatgaaccgccaacaacgattgatgaccttcgccaacccggcggatctgccgggctatcaggacgtctccaaagccaacctgcaggcgcgcaaaccgcgcgatctcaagctgtgcgactccttgcaggaagcggtgcgccgcagcgggctgcaggacggcatgaccatctccttccaccatgcgtttcgcggcggcgatctggcgctcaatcaggtgatggagacgctggcggcgatggggttccgcaacctgacgctggcgtccagctcgctgaccgactgccatgcgccgctggttgagcatatccgccacggcgtggtgagccgcatttacacctccgggctgcgcggcccgctggcggacgcggtttcgcgcggcctgctggcggagccggtgcaaattcactcgcacggcggccgggtcaacctgatcgaatccggcgagctgaagatagacgtggccttccttggcgtgccggcctgcgatgagttcggcaacgccaacggttacagcggtgaagcctgctgcggctcgctcggctatgcgcgggtggacgccgaggcggcgggcaccgtggtgctgctgaccgagcagctggtgccgtatccgcatcatcccgccagcctggcgcaggatcgggtggatctgatcgtgcagctggagcgggtgggcgacgccgacaagatcggcgccgacgccacgcgcatgacctcgaacccgcgcgagctgctgatcgcccgccgcgccgccgaggtgatcgccggttccggctacttcaccgaaggcttttcgctgcaaaccggcaccggcggcgcctcgctggcggtgacccggttcctggaggacaagatgcgcgcccgcggcattcgcgccgcgttcgccctcggcggcatcacctcgaccatggtgggtctgcacgagaaagggctgatcggcaaactgctggacgtgcagagcttcgatcgggcggcggcgacctcgctggcgcgcaacccgcgccatatcgaaatcagcgccaaccagtacgccaacttcagctccaagggcgcgtcggtcgatcggctcgacgtggtggtgctgagcgcgctggaaatcgacaccggcttcaacgttaacgtgctgaccggctccgacggcgtgctgcgcggcgcgtccggcggccactgcgacaccgccgccgccgcgcggctggcgatcatcgttgcgccgttggtgcgcgggcgcatcccgacgctggtagagcaggtgactacctgcgtcacgccgggctccagcatcgacattctggtgaccgaccacggcatcgccgtcaatccggcgcggccggagctggcgcagcgcctgcgggaggccggcctcgaggtggtgagcatcgactggctgcgcgcccgtgcgctgcagctgaccggcgaaccgcagccgatcgcctttaccgacaaggtggtggcggtggtgcgctaccgcgacggctcggtgatcgacgtggtgcatcaggtggcggagtag

SEQ ID NO: 423199 - DNA, 549 bp, Serratia marcescens
atggccgccgtcgatccccaactggccgccgaacgcgcggtcagcctgccggagttgctcaccagccgcgaatgccgccaggcgcggcagcaggcgtggctggcgcagcacgagtgcacgctgctggtgctgacgctggtggtgcccggcccggtgaaggacagcgcgctgacgcgcggcatcttcaacctggggtgggcggcgttgctgcgactgtgcgccgaacagggttggcccagcccgcaggccgaggcgctggcgctcgccaccggttgcgaagggtttgtcgcgctgcgcgccgatgctcagcgggtgaaggactgcgccatgcagctggaggtgagccgcccgatcggccggctgtgggatatcgacgtgctggatacgcaggggcgcattttgtcgcgccgcgacatcggcctgccggaacggcgctgcctgctgtgcggccaaccggccaagatctgcgcccgccagcggcggcacagcagcgagcagctgctgcatgaaatggaaaggatgttcaacgatgcgatctctgccgattaa

SEQ ID NO: 423200 - DNA, 885 bp, Serratia marcescens
atgcgatctctgccgattaacctgcccgcccaccgtgccgaaccggcctgcgacttcgcccgcgccgctttccgcgcgctgctggtggaggtcaacctcacacccaagccggggctggtggatcgccataataccggcgcccaccgcgacatggatctcgggcacttctatcgcagcgcccgcgccatcggcgtgtggctgccgcgctttatccaacgcgggcgcgaggatgccgctttgccggcagagcagcagctggcgcggctgcggccgctcggcctggcctgcgaaaaccagatgttccgcgccaccggcggcattaacacccacaagggcagtgtgttctcgctcgggttgctgtgcaccgccttcggccgcctgcagcagcagggccgcgccatcggcgccgaagcgctgtgcgccgaggtggcggcgatgtgccgggggctggtggatcgcgagctgcggcgcaacaacgccgggcagaccgccggccagcggctgttcgccgcgcacggactgagcggcgcgcgcggcgaggcggaggccggtttccggctggtgcttgacggcgcgctgccgctgtatcggcaacggctggccgccggcggcgatgaacagcgggcgctgctggacagcctgctgtggctgatggcccacaacgacgacaccaacgtcgcctcgcgcggcggcctgcacgggctgcgctggttgcggcgcagggcggcattgctgctggcgcagggcggcttggcgggggaggcgggtctggcgcgcctgcggcgcttcgatgccgactgcatcgcccgcaacctcagccccggcggcagcgccgacctgttgatagtgacctggctgctggcgcagctgggtgcccaagaataa

SEQ ID NO: 423201 - DNA, 1464 bp, Serratia marcescens
atgtcccaaacccaggaaaagatctggaaagcgatagcgccgctggcggtgctcgcgatcctgttattgataccggtgcccgacggcatgccgccacaggcgtggcactacttcgccatctttgtggcgatgatcgtcggcatgattctggagccgatcccggccaccgccatcagctttatcgcggtgaccgtcagcgtgctcagcgccaactgggtgcttttcggcgcgcaggaactggcggagccgggcttcaaggccggtaaagaggcgctgaaatgggggctggcgggcttctccagcaccaccgtctggctggtgttcggcgcctttatcttcgcgctgggctacgaggccaccgggttggggcggcgcatcgcgctgttcctggtgaagttcatgggcaagcgcacgctgacgctgggctatgcggtggtgatcatcgatatcctgctggcgccgttcacgccgtccaacaccgcgcgcaccggcggcacggtgttcccggtggtgaaaaacctgccgccgctgttcgattccttccccaacgatccctcctcgcgccgcatcggcggttacctgatgtggatgatggtggtcggcaccagcatcagctcctcgatgttcgtcaccggcgccgcgccgaacgtgctgggcatcgagttcgtcggcaagatcgccggggtgcacatcagctggatgcagtggttcctggcgttcctgccggtcggcctgctgctgctgatcgttgcgccgctgatctcctactacctgtacaaaccgggcgtgacccacagcagcgaagtggccgcctgggcggataccgcgctgggggaaatgggcaagctgacgcgcaaggaatacaccctgatcggcctggtgctgctcagcctgtgcctgtgggtgttcggcggcaaaatgctggatgccaccgcggtgtgcctgctggcggtgtcgctgatgctggcgctgcacgtggtgtcgtggaaagagatcaccaaatattccagcgcctggaatacgctggttaacctggcgacgctggtggtgatggccaacggcctgacgcgttccggctttatcgactggttcgcccagaccatgagcacccacctggacggcttctcgccgaacatgacggtggtggcgctggtgctggtgttctacttcgcccactacctgttcgccagcctctcggcgcacaccgccaccatgctgccggtgatcctggcggtcggcaaagggctgccgggcgtgccgatggagcagctgtcgatgttgctggtgctgtcgatcggtatcatgggcgtgctgacgccgtacgccaccggcccgggggtgatcatctacggctgtggctacgtgaagtcgaaagactactggcgcctgggcggtattctcggcgtggtgtacatcgccgcgctgctgctgatcggctggccgatcatgagcctgtggtactga

SEQ ID NO: 423202 - DNA, 1230 bp, Serratia marcescens
atgagaaaaaaaaccttattgctgtgcctgcctttgttattcaccgggaacgcgctggcggaagccggcggttatcagctggaacaggtgctggtcatgagccgccataacctgcgcgcgccgctggccaacaacggcagcgtgctggcgcagtctacgccgaaggcctggccggcctgggaaacgccgggcggccagctgaccaccaagggcggggtgctggaagtgtatatggggcactacttcaacgcctggctgaagcagaccggcctgttgccgaaagagggttgcccgaccgccggcagcgtgtacgtctacgccaacagcctgcagcgcacggtcgccaccgcgcagttcttcagcaacggcgcgttccccggctgcgacgtcagcgtgcaccatcaggacaagatgggcgagatggatccgaccttcaacccgatcatcaccgacaccagcgaggccttcaaccagcaggcgctggcggcgatgaacgccgcgctgggctcgctgaagctggacgcctcttaccaacagctggcgaagatcatcgactacaaggattccgccgcctgcaagaccgacaaacactgtgacctgaccaaagaagccagcgtgatgagcgcggtgccgggcaaagagccgggcgtctccggcccgctgcgggtgggcaactcgctggtggacgcctttatgctgcagtattacgaaggtttcccgatgaaagaggtggcctggggcaaaatcgccaccccgcaccagtggcagcagctggcgcagctgaaagacggctatcaggactcgctgttcacctcgccggtggtggcgcagaacgtcgccaagccgctgctgacctacatcaacaacgcgctgctcggcgagcgcaaaccggacgcgccgaagctgacggtgctggtcggccacgattccaatattgcctcgctgctgtcggccatgcagttccagccgtatcagctgccgcagcaatacgagaaaacgccgatcggcggcaaactggtgttccagcgctggcgcgacgcgcagaacgaccgtgaactgctgaagatcgagtacgtctatcagtccaccgaacagctgcgcaaggcgacgccgctgacgctgcaaaccccgccgcagcgggtaacgctggcgctgaaaggctgcccgatcgacaaagacggcttctgcgcctggagcgatttcgaaaagaccatgaaaggcatcttgtaa

SEQ ID NO: 423203 - DNA, 693 bp, Serratia marcescens
ttgcccacttttatccgcaatatcgaatttttcacgccggacggctatccgggccaggtggcgcgctgccattttgcgctggcggagtatcgtgacgagcgttttcccgaggcgggctttgcgctgccggatcatctggcacgtgcggtgccgaagcgccgcgcggagtatctggccgggcgtgttctggcgcggcaactgttggcgccgctcggttttgccgacttcaccctggcgcgcggcgaagatcgcgcgccgcagtggccaccgggcatcgccggggcgctgagccataattcggataccgcgctgtgcgccgtgcaccgcgagagcgggctgggcggcgtggggctggatgtggagacgctgctctccgacgtgcgggcgggggagctgtggggggcgatcgtttccccggcggagcgcgaggcgttgctgcgtgaggcgttgccgttcaatgaactgctgacgctgacgttttccgccaaagaaagcctgttcaaggcgctttatccgcaggtgcgctgttacttcgattttctcgatgcgcgcatggtcgccgtggatatgcagcggcagacgtttgtattagcgctgcttaagacgctgacgccaaattgccccgccggccgccggtttaacgggcgtttttggcgtgaaggtgacgatgtcacgacttttattttctgctaa

SEQ ID NO: 423204 - DNA, 1191 bp, Serratia marcescens
gtggcgacactgacgacagaaaaccaaaccttccccgggtttgtgtacgccgaacaatcgacctttttgtaccggtccgaattccgttccctctccgccgatggcgtgttcgagcgtatcgagacgccggcgttcggcggtgagcaggaaggcagcgcgctggcgcagcatatccgccaggcgttggcgcgcgccaaagccgccggccaggagacgccggtggtggtgggcgccattccgttcgatacgcgccggccttccagcctgtacgtgcctgaaaactgccagtttgtcgccaacgacagctttacccgcgccgcgcgcccgatgctgcaacagccgcatcgcctggccgcctgcaccagcattccggacgagccgcgcttcaagcacgcggtggcggaagcggtcagccgctttaaacagggcaagctggacaaggcggtgctgtcgcgcatcctcgacatcgagctggagcagccggtggcgggccaccagatcctcaataacctgatggtgcagaacccgaccggttaccacttttccttgccgctggccgatggcggcgtgctgatcggcgccagcccggaactgctgatccgcaagcagggcggcgagatccacaccaatccgctggcgggctccgcgcgccgtcaggacgatccgcagcaggatcgcctcggcagcgagcgcctgatgcgctcgaccaaagacaaatacgaacacaagctggtgatcgacgacattcgccgccacctggcgccattgtgcgccagcctgagcgtgcccagcggcccgtcgctgctcagcaccggcaccatgtggcacctgtccacccgcattcgcggcgagctgctgaacccgaatctcaacgtgatgcagctggcctgcctgctgcatccgacgccggcgctttgcggcttcccgaccgagagcgcccgccaactgatcgccgatctggaaccgcacgatcgcggcctgttcagcggcatcgtcggctggtgtgacgccaacggcgacggcgagtgggcgatcgtcatccgcagcggcctgctgcgcggcaaccgggtgaggctgttcgccggcgcgggcatcgtcgccgcctcgacaccgcagtccgagtggatggaaaccgccgccaaactgggcaccatgctcaacgctttcggcctgaacagcggcgcgctgtag

SEQ ID NO: 423205 - DNA, 759 bp, Serratia marcescens
atgagcattcaaatggatttcaccggcaaacgcgtgtgggtgaccggcgcggcgcgcggcatcggcgagcagatcgcccggcattttttgacgcagggcgccgaggtggtgggatttgaccgcgagttcgccaacccggatctgccttacccttgcgtgacgctggacatcagccggccggagcaggtggaggcggtgtgccgccaacagctggcggagaacccgcgactggacgtgttggtcaacgccgccggcattctgcgcatgggcaataccgaagatctgagcgtggatgactggcatcagtgcatcaacgtcaacgcctcgggagcgttttacctgttccgcgccgtgctgccgcacttcaaggcgcagcgcagcggggcgatcgtcagcatcggctccaacgccgcgcacgtgccgcgcgcgcagatggcggcctactgcgcctccaaggcggcgctgaccagcctgaaccactgtgtggggttggagatggcgccgttcggcgtgcgctgcaatctggtgtcgccgggctcgaccgacacgccgatgcagcgcggcatgtggcagaccgacgacgcgcagcaacgcaccatcgccggcttccccgagatgttcaagctggggatcccgctgggcaaaatcgcccgcccggatgagatcgccaacgcggtgttgttcctggcctccgatttggccagccacatcaccatgcaggacatcgttatcgacggcggcgccacgctggccgcctga

SEQ ID NO: 423206 - DNA, 879 bp, Serratia marcescens
gtgattaagggcatcactctttcggtcgtcgcctccatcttgttcggcgcgatgtattacttcacctctaccctcaccccgctgaacggcgagcaggtctacggctggcgcacgctgctgacgctgccgttcctgacgctgtttatggcgctgtccggcgattggcgcaaagtgggcgacacgctggcctggatcggccaacggccgcagcgcctgctgggcctgctgctcacctcggcgctgttgggggtgcagctgtggctgttcctgtgggcgccgctgcacggcaaggccctcgacgtgtcgctcggctattttttgctgccgctgaccatggtgctggcgggccgtttgatctaccgcgatcggctgtcgctgctgcaaaagctggcggtggcgtgcgccatggtaggggtgggcaatgagctgtatcaggcgggcggcgtctcgtggccgacgctggtggtggcgctgggctatccgctctactttattttgcggcggcgtttcggcaccgacaatctcggcgggctgtggtgcgagctggcgctgatgctgccggcggcggcctggttcgccttcggcgacggcggcgcagcggcgctgcagatcaatgccgagctgtattggcgcattccgctgctcggcgtcatcagcgccgtggcgctggtgtgttacatcctcgccagccgcctgctgccgttcagcctgttcggcctgctgagctatgtggaaccggtgctgctggtgatcgtcgcgctgctgctcggcgaaagcatcggccaaagcgaatggccgacctatctggcgatctggctggcggtgctgctgctggcggcggaaggcgcgcagcacctgctgcgccgccagcgggtctga

SEQ ID NO: 423207 - DNA, 648 bp, Serratia marcescens
atgacaatcgatctttttgaagacgcgctgccgccgccgtggcgcgaagagatcgcccccggcgcggtggtgatgcacggcttcgtgcgcgatcacgggctggaactgctggcggcggtgcagggcgtcgtcgcccaggtgccgtggcggcatttgaccacccccggcgggcacgtgatgtcggtggcgatgagctggtgcggcaacggctggaccagcgacagccgcggttaccgctattcggaacgcgacgcgcgcagcggcaaacgctggccggccattccccccatcctgatggcgctggcggacgaagccgcgcagcaggcgggattcggccccttcgtgccggattcttgcctgatgaaccgttacgatccaggcagcaagctgtcgctgcatcaggataaagatgagcacgacttcggtgcgccgatcgtctcggtgtcgctcgggctgccggcggtgtttcagttcggcgggctgcaacgcagcgaccgggcgcggcgcatccccttggcgcacggcgacgtggtggtgtggggcggcccggcgcggctctgttttcacggcatcctgccggtcaaggaaggctaccactcgctggtggggccgcaccgcatcaacatcacgctacgcaaggcgctttag

SEQ ID NO: 423208 - DNA, 936 bp, Serratia marcescens
atgagcacaaatctttcttacgccctgttgcccgaaatggccgttttcgttcaggtggtagagagcggcagcttttccgccgccgcccgtaaactgggcacctcgccttccgccgtcagccgcagcgtggcgaagctcgagcaggcgctggcgctgcagctgctgcatcgcaccacccgcaaactgcggctgagcgaaagcggcgaagaggcgtttgcgcactgccgcaccctgctggcggcggccgacgcggtcatggcgatcggcgggcgcggcgccgtggagcccgaggggctggtcagcgtcagcgtgcccaaggcggtgggccgctttgtgctgcatccgcacatgccggagttcctgcgccgctacccgaaggtggacgtgaggctgcggctggaagatcgctacatggatttgatcgacgatcgggtcgatctggcgctgcgcatcaccgatcgcccgtcgcccgggttgatcggccgccagttgatgagaatagaccatctgctgtgcgccacgcagcactacctggtgcagcacggcacgccgcagcacccgcacgatctggcggcgcacagctgcatctatctgggcgaaacgccgagcgacgcgcaatggaagttccgccgcagcggcaaaacggtgacggtcaacgtgcgcggccgctacgccgccaaccacaccggcgtgcgactggacgcggtgaaacagcatatcggcatcggcagcctgccgtattttaccgcccgccaggcgctcgacgacggcgagatcgtgcaggtgttgccggagtgggatttcctcagcagctatcacggcggcctgtggttgctttacgcgcctaaccagtatctgccgcccaaactgcgggtatttatcgactatctcgtcgcctgcctggcgcaggagccgcagctaaagcgccttgcgtag

SEQ ID NO: 423209 - DNA, 630 bp, Serratia marcescens
atgaccgaacgacgttattactacagcgacgatgtacagggccaggcgcaggtgttgagctgcgcgccggccgaggcgggcgcttacgccgtggtgctcgacgccacgctgttccacccgcagggtggcggccagccgtccgacgtggggacgttaggcggcgtcgccgtgctgcgggtgcagcagcgaggggataccgtgctgcactttaccgccgcgccgctgccgctcgggccggttacgatgcaaatcgatgaagcgcagcgccgcctgcacgcccgctggcactccggcgggcatctgatcggctggctgggagaaacccgaggctggcggccggtcaaggcacatcattggccgggggaagggcgcatcacgtttacgccagggccggatgcgcagacggtagaagcggactttttgcaggcggagctggcgcgtttgatcgccaccgatttaccccgccgccaacaggcggtggaaggtatgcgccaggtcggtttcggcgaactgcccgcctacggctgcggcggcacccatgtcgccacgctggcggaggtgggggcaattgcgatcaccggcgtaaagatgaagaaagggcagctgatcgtgcagtatgagctggggtga

SEQ ID NO: 423210 - DNA, 324 bp, Serratia marcescens
atggactatctggagtttatcgaaacgaccgttttcagccgaaagcgggctgaattgatgaaggatgatgactttcaggctttccaaagctatttgctgttgaaccatcatgaaggggatacgatcagccacacgggcggatgcaaaaagatacgctgggggctggacggaaagggaaaacgcggcggcgtaagagtgatttattatctgacggcgcccagcggccgagtctatttattgttgatataccgtaaaaatgaaaaggatgatttatccggacaggaaaaggcgatattgagatccatcgttcaacaacttgattaa

SEQ ID NO: 423211 - DNA, 297 bp, Serratia marcescens
atgaaaaaagaacttttcgacgatttggtcagtagtatgaacgaaatggtggcgatcgaaaagggtaagatgacgccaaaatccgagcatgttcaccgtcatgctattccagacgtcaagctgctgcgcaaatcccgtgggatgaagcaggcggagtttgccaaggctgtgggggccagcgtgggactggtgcaaagctgggagcaggaacgccgcataccctcggggtcggcactgaaacttctgctgctgattgagcgtaacccggcattgctcgatgagttgctggtgatttaa

SEQ ID NO: 423212 - DNA, 243 bp, Serratia marcescens
atgaaaatccagctgtcgctgctgtttctcagcctgctggccggcaaggccgcggcgtttcagtcaaaagtgcccgaaccgcgcccggaacaggcgcgcgcggcggaacaaaacatcgaaaatctgttttacggctttcacgccatggatgcccagccggtgaacatcggcagctgcgcggcggtgccggtagcgggatgccaatgcgcgttctgcacccagctgcggcaggccgggcgctga

SEQ ID NO: 423213 - DNA, 909 bp, Serratia marcescens
atgggctctttttttaagcagatctaccgctattcccacgcgcgcccttatcggcataacgaaaacctctggccctacgtgaagattgcgcgcggcgagggcggtgaaatcgccgccttatggtacaagcaccggccggtgccgatcgtcccgctgagcgaactgcgcaacagttgccgggggccggcgttgttgacggctaccggcccgtcggtgaaggcgctgcgtttcgaaaatattcccgccatgcccgcgatcggggtcaacggcgcctattgcctgcatcggcaggtggattttcacttctacgtcatcgtggacatggggtttatcgataaccgcccggagatcgtgcgcgatgtcattcaacggccggcgctgacgctgttcaccaccgtgcacggcgtggcgcgcattctcgatcgttttggacaggcggcgatcggctgccgattggcgattgtcgaagacgcggcctgcaagatttaccgtccccggatcgacagcggcgcgctgtgggatcactactgccgggaaaacggggtggagttttgcatcgcgaaccgcacgctcggcttcagccaggatatccgctgtggcattttcgatgccggcaccgtggcctattgggcgctgcaaatcatcgcctatctcggcttcaagcagctgtttatcgccggactggacatgaacaacttccaccagccgcgcttttacgaaaccgagcaggatcgcttgccgacgttcctggcggacaaggtggcgtcgctggtgatccccgcttttcgacacgccggcgcgatcatgaaaaagcagcagatcgcgattaaaaacctctccctgcacagcgctatcggcagcgatatcttcgagaaggtggacggcaatgtttactttcagcaagcctga

SEQ ID NO: 423214 - DNA, 1218 bp, Serratia marcescens
atgtttactttcagcaagcctgagcggtgttatcgctttggtagcgcgctgtttttagccttcgcgtttttcagcgcgatcttttgcgggcagacccgcgtcaataacctgtttcatctggcggcgctgctgtggctggccgccgtgttcacctggccgccgctgcggcggcagctgtgggacaatcgtcaggcgcgcaggggcggcgggctggcgctgatatttttgctttattattccctcagcgagctgtggggcgagacgccgggcgacatgccgtcggccctgacccacagcgcttatatcctgctctatctcgcctggctggtgacgctgctcgacggtgagcggcgtcatcaactgcagtgggcgatgctggccggcatgacggcgctgtgcttgtatctgacgctggtcgacgccccgtcgatttatcatctgcgggaaaccaccgcccgcaatccggggccgagcaacgtgatcgatctggccggttacgccgccatcgccattttgttgagcctgatgattttccgcgataccgggcaaaaagcggcgctgtgctttatcccgccgctgctggcattcatggtgctgacgcaaagccgcggcccgctgatcgcgctggcgctcgcggtggtggtggcgatgccttatcgacaccggccgggacggtggctgtggtttctgttgcccggcgcgctggctgtggttctcgccgtcgtttacagtgcgatcggcgaaatgttgctgacgcgctttggcgagctgtatcaacagagctttgttcgcatcagcatctggcgccacagcctggcgctgatagaacaggcgccgttcttcggctacggctttgacaagcagcttaactttctcaattacaccggcgagttgaaccacaccacgcacagtctgtacctcggcgcgttgctgaagggcggctgcgtgggtttcctgttgctgctggcgctgctgggatacggcgcgcggctcgccatcgcacactggcgcgcagggcggcgctgggaggcgggcctgtttctgtttatgctggtgttctacagttcgcagggcatgtttgtgatcgccaatccggcggagttttggtacctgttttggctgccgctggcgttgctgctgtcgcagcctaaacggatcgggactgtgcggacggcagcgccgctagcgtcttctccagcacctgttccgccgcgatga

SEQ ID NO: 423215 - DNA, 1110 bp, Serratia marcescens
atgtctaaacagtggaaaatagcggcggccaacgcctgtttatgtctctatacccgcatcgcgggcaatttccggcccgcagcgagcttcgatccgcagcaatcctttgaacgcatcgtgattttctccaccagcgccctcggcgatctgatgttcaatacgcccgccatccgcgcactgtgcgaacgctatcccggcgcgcaaatcacgctggtctccagccataaaaaccggcagctggtcgaaggcagcccctgctttcatgacgtgatttactgggaccacaaggccaaagacatgttgggcgttatccggcgcctgcgaagaaaccggcctcagctggcggtcatcctgcactcgaaggcgccttacgatgtgctggtcgccatcgccgccggttgccaatacctgttcaaagacgtttacggcaacaaaccgagcggcatggagcgctggctgaccggcgtcagccacagcagcgacggccatttgattcagcgcaagctggatatggtggggcaattgggatgccgtaccgacaatcctgacatgttcatcccggtcgcttttcccgcgctggcgaaaccggcgggcaagatcctgatcggctttcagatgggcgcctccgaaacgctgcgccgctggccggtcgaccgctttattgagctggcgcaacggctgctggcgcactcccccgactgtcagatcgcgttgattggcagcaaggcggagcacagcctcgagcgggagtttatggcgggtttgagcgaggcgcagcaacagcgggtagtaagccatatcggcgcgaccacgctaccgcaactgctggcgacgatcgccaatctgcaggtactggtgaccggcgataccggcccgctccacctcgccgtggcgttgaaaaccgccaccgtcagcctgttcgtcaccgctaacccgcggcataccggcccctatcaggacagcgaacggcatcaggtgatgcacgtgccggttgacagcgtcgcgctgagtgccgctgagcgacgccaaccgctcagcatcatcgcggcggaacaggtgctggagaagacgctagcggcgctgccgtccgcacagtcccgatccgtttag

SEQ ID NO: 423216 - DNA, 636 bp, Serratia marcescens
atgaatacaactcatcaatccaaacgtctggtggtgctggtcggcagcccgcgccgcgacggcaacagcgccacgttggcgcaggcgatcctggcgggcgccgccgaagccggcacgtccgccagcctgcattttctcgatgattacctgagcggttttctgagcgatgaacgccacacgccgccgccggccgatcgctactccgagctgttcctggagcacttcctgccggccgatggcgcggtattctgcacgccgatttactggtacggcatgtcggcgcaaaccaaagcctttttcgatcgctcgttcagcttctattccaacgcctaccctcaggcggaacaggtgcaccagcgcatgagcggcaagcgtatcgggctggcggtagcgtcggaagagacctaccccggcgcggcgctgggcatcgtgcatcagatccaggagttcagccgctacacccattccgcgttcgtcggcgtggtgcacggcgccggcaaccaacgcggcgagatcgcccgcgatccgcgcaatccgctgcaggccgcccgcgaactggggcgcgagttcttcactcgcccctactcggattatcagatggacagcccgcgcagtacgcaggtctgggaggagtaa

SEQ ID NO: 423217 - DNA, 897 bp, Serratia marcescens
atgtttgccacgctgcccgtcaacgcattacgcacctttgaatccgccgctcgcctgcgcagcttcaagctggcggcggccgagctggcggtgacgccgacggcgatttcgcaccagatcaaagcgctggaacagcagttggggtttgcgctgttcgagcgggtgccgcgcggcgtgcggctgacgccgaaaggcgaaacgctgtttgccggggtgcacggcgcgctgctggacatcgccgccacgctcgagggcctgcggccgcagcccagcaccgggtcgctgtgcgtctcggtcacgcactctttcgcggcgctgtggctggtgccgcgcctggggcgtttctaccaggcgtacccgcactatctggtgcgcctggaggcctgcgccgaggtgatcgatctgcagcaggacgccagcgtggacgtggcggtgcgttacagccgcgcgcagtatcctgcgctgcatcagacggcgcggctggaggaaagctttggcgtctacgccgcaccggggctggccgccgccgagccggaaaatccggtgctgatcaccgtcaagtggggggattcggcgctgtacgacagcggctggcgcgactggtgccgggctgccggcgtagactggtggcagcgccatgcggcgatgcgcagctatcacgaggagcattacgccctgcaggcggcggtggccgggcaggggctggtgctcgccagttcggtgatggtgtccgatatggtggacaacggtctgttggtggcgtaccggccggaggtgcgcgtaccgggcgccgcctacagcgtgctgtgcgcgccggggcgcgagcggcatccgccggtcagggcgtttctcgcctggctgcagcaggagctgccgcagggcaatggcacgaaataa

SEQ ID NO: 423218 - DNA, 588 bp, Serratia marcescens
atgagccagccaagaacctccgattacccgattgatgcgcaatttatcgaacgctggtcgccgcgcgcgatggccaacgacgccatcgacgatcaaacgctgctgagcttttttgaagcggcgcgctggtcgccttcggcctacaacattcagccgtggcgctttgcctatagcaagcacggttccgacagctgggagaactacctggaattcctgatcgacttcaaccgcggctgggcgcagcatgcctcggcgctggtggtgatcgtctccaaaaccaccagcctgaacggccaacggctggtggacaacccgacccacgcgttcgataccggcgccgcctgggccagcctggcgcatcaggcgcacctgaaaggctggctgacccactgcatgagcggcattcaccacgacaagatcaaagcggcgctgcagctgccggacgactatgcggtgcacgccatggtggcgatcggcaaaccgggtgacaaagcccgcctgccagatttcctgcaggaaaaagaggcgccgtcgggccgcctgccgctgggcaagaccgtcagcgaagggctgaatttcacgctgtga

SEQ ID NO: 423219 - DNA, 294 bp, Serratia marcescens
gtgggtgaccattttggcaaagggctgttggcggggttaaaggcggagagtctgaagccggagacggagctgtcgcgcttttgctccgactacaagcgcggctttgtgctcggctatgcgcaccatttggcgcagcgctgcggcgacgagaatcgggcggcgttcgaagccgggcagctgagccgcgcctatggcctcggcagcgagccgatgagcgagtttttttccggcggcgacagccggctggcggagaagtttttccgcgccggctataaccggccgacgcagggctag

SEQ ID NO: 423220 - DNA, 570 bp, Serratia marcescens
atgaatattaaattagacaatctaaatcagctgatcggcgcacgcattcgccttgagcgcgaggcgcgccactggtcgctgtccgatctggccgagcaggcgggcgtctcacgggcgatggttcataagatcgagcgcggcgagagcagcccgacggcgatgctgctggccaggctggcgggggcgttcggcctcagcatgtccaagctcatcgcccgggcggaaacgcaggaaggccggctgctgcgccgggaagatcagccggtctgggtcgatccgcagagcggctacgtgcggcgccacgtgtcgccgcgcaccgatctgccgctcgatctggtgcgtatcgaactgccggccggcgcgacgatcccgatgccggcttcggtgtatgccttcaagcgtcagctgatctgggttttatccggcgagttggtctttgtggaaggtgacgcgcgccatgacatggccgagggagactgcctggagctcggcccaccggcggactgccgctttgaaaaccagagcgatcaaccgtgcgtgtatatggtggcggtgctgagcgccgcctga

SEQ ID NO: 423221 - DNA, 519 bp, Serratia marcescens
atgattatacgaaatgcgacgctcaacgatagcgcggcgattgccgccatctataacgacgcggtgttgaacagcaccgccatctggaatgaacaaaccgtggatgcggccaaccgcgcggcgtggatcggcgaacggcaggcggcgggctacccggtgctggtggcggtgaacggcgcggacgaggcgatcggctacgcgtcgttcggcgactggcgtgcctgggacggctatcgccataccgtagaacactcggtgtatgtccatcaggcgcatcgcggtgaagggattggcaaagcgctgttgatcgccctgatcgcacgggcgcgggagatcggcaagcacgtgatggtggccggtatcgaatccggcaatcaggcctcgattaagctgcacctggcgctcgggttccgcgaggtggggcgcatggagcaggtgggcgccaaatttggtcaatggctggatctgactttcctgcagctgacgctcgacgagcgggccacgccgccggcgcgctga

SEQ ID NO: 423222 - DNA, 441 bp, Serratia marcescens
atgaatatgctattgctgctgatcgcggcgggaatggggctggtggtgcagaatctgctgatggtgcgcattaccgaaagcgtctcgaccatccttatcacgctggtgatcaactccagcgtcggtttgctgctgctggtggggttgttgctggccaaaaacggcctcggcgcggtggcggaagtgaccggcgccgccaggtggtggatgctgctgccggggctgttgggatcgctgttcgtgttcgccggcatcctgggttaccaaaaactgggcgcggcggccaccatctcgatcctggtcgccagccagctgtgcatggggctgctggtggacgtctaccgcgccggcccggcggcgctgcgcgacaatctgccggcgctgttcggcgccctgctgctggtggcgggcgcctatctggtggcgaaacgcagcttttga

SEQ ID NO: 423223 - DNA, 924 bp, Serratia marcescens
atgaatttcagacgtctgaagtacttcgtgaaaatcgtcgatatcggcagcctgacccaggcggcggaggtgttgcacatcgcccagccggcgctcagccagcagctggcgacgctggagggggagctgaagcaacagctgctgatccgcaccaagcgcggcgtgcagccgaccgaggccggcaacattctgtatgcccacgcgcagaccattctgcgccagtgcgagcaggcgcagagtgcggtcaacagcgccgggcaggcgatgagcggccaggtgtctctcgggctggcgtcgggcagcacagcggcgcagctggcgttgccgctgctgcaaagcctgcgcgatcagcagccgggtatcctgctcagcctgcatgaaaacggcggcgcgacgctggccgggcaggtggctaaccagacgctggacatggcgatggtctacggcgccaaaatgcccgccgggctgcacgccatcgcactgatgcgagaagatctttatctggtggcgacgcgcgcggtgccgcatcccggcaacagcgtcgagctgctggacgtggcgcggctaaacctgttcctgccgcgcgagggcgatgcggtgcgcaatcagctggaagaggcgatggcgctgcgcaagctggctgtcaacgtggtgggagagatcgaatcctcgggcgcgctgagcgccgcgatcgccagcgggctgggggcgaccgtgctgccggaatcggtggcgcgcgcgatgatcggcccggccaaggcctggatggcgcgcatcaatgcgccgacgatgtcggtgccgctgtcgctgtgcatgtcgggccaacaggcgctgtccgccccggcgctgctggtgaaagacctgctgctgtcgatcgccggcggccgcagccaggagaaacgcgcgctggcgctggtgcgttga

SEQ ID NO: 423224 - DNA, 1464 bp, Serratia marcescens
atgagctatgccccacctcgcagcggcctcagcgccgatcaggcactcgatcaactggaagccctgtatgacgccgcggtagacgcgctgcgtcaggcggtcagcgactttatcagccacggcacgctgccggatgcgcaggcgcgcgccgccgggctgttcgtgtatcccgagctgcgcgtcagctgggacgggcagcaatccggcccgaacaaaacccgcgccttcggccgctttacccatcccggcagctacagcaccaccgtgacccggccgcagctgttccgccactatctggccgaacagctggcgatgctggagcacgattacgccgcccatatcgaagtggcgccgtcgcagcaggagatcccgttcccttacgtgatcgacggctccagcctggcgctcgatcgctcgatgagcgccggcatcgcgcagcatttccccaccaccgagctggcgcagatcggtgacgaaaccgccgacggcctgtaccacaccaccgacaaccatttcccgctgtcgcatttcgatgcgctgcgcgcggatttctcgctggcgcggctgcggcactacaccggcacgccggtggaacacttccagccgttcgtgctgttcaccaactacacccgctatgtggatgagttcgtgcgctgggcctgcgcccagatcgccgatccggccagcccctacatcgccctctccagcgccggcggcacctacatcacgccggaaacccgcgccccggagcaggcagtgtccgatctggcgtggaaaaaccaccagatgccggcctatcacctgatctcacgcaccggccagggcatcacgctgatcaacatcggcgtcggcccgtccaacgccaaaaccatctgcgatcacctggcggtgctgcgcccgagcgcctggctgatgatcggccactgcggcggcctgcgcgaaagccagaagatcggcgattatgtgctggcccacgcctatctgcgcgacgatcacgtgctagatgcggtgctgccgccggatatcccgatcccgagcatcgccgaggtgcagcgtgccctgtacgacgccaccaagatggtcagcggcatgcccggcgaagaggtcaaacagcgtttgcgcaccggcaccgtggtcaccaccgacgaccgcaactgggagctgcgctattccgcttcggcgcggcgcttcaacctcagccgcgcggtggcggtcgacatggagagcgccaccatcgccgctcagggttaccgcttccgggtgccgtacggcacgctgctgtgcgtctccgacaaaccgctgcacggcgaaataaaactgccgggccaggccaaccgcttctatgaaggggcgatctccgagcacctgcagatcggaatctgcgccatcgatctgctgcgcgccgagggcgatcgtctgcactcacgcaagctgcgcaccttcaacgaaccgccgttccgataa

SEQ ID NO: 423225 - DNA, 2304 bp, Serratia marcescens
atggttttagcagtcgtttcgtttgttctctttttggcgtcgattttgatttatcgcacccgggccgccgccaaccgctggtggttcgccattctgctgacgctgctcggcagctatctggtgctgaacgtcatcctgatcgccagcaactacttcaccggcgacggcatcaccgacgcggtgatctacaccgtcaccagcagcctcaaaggcgcgggcatcagcaaatacgtgctgccgttcatcggcctgctggcggcgttggggcttatcttcgcggtgctggctcgcagcctgctgcgccgcaaggccaaaggcagcagcgtggcctacagcatcgtcgccgtgctgctggcgctgttttcggtcggcaccaccccggcgtttcaggacatctcgctgctggtcaagagccagatcgtcggcgataccgccgatttcaccacctattacaaggcgccgaaaaagaccgtgcagggcaagcggccgaacctggtgtacatctatgccgagagcctggagcgcacctacttcgacgccgagctgttccccggcctggccgacgagctgaacgccctgcgcacggacagcatcgatttcagcaacacccagcagctgccgggcaccggctataccatcgccggcatggtcgcctcgcagtgcggcattccgctgttcgcgcccttcgacggcaacgcctccagcgcggtctccaccttctacccggagaacgtctgcctgggcgacgtgctgaaggccgccggctacagcaactatttctatcagggcgccgagctggcgtttgccggtaaagacaccttcctgaaatcccacggcttcgaccacgtttatggcttcaaagagctgcgcgaacaggtcgccgatccgagctacaaaaacgactggggctggtacgacgacagcgtgctggacgtggtgtacggcaaattcgtcgagctgtccaaacagcgccaacccttctcgctatttaccctgaccgtcgatacccatcacccggacggctttatctccgccggctgcagcaagaaaagttacgcctggcagaacaaggaaaaccgctcgctgagcgcggtggcctgcagccagcaacacatcgccgcgctgatcgacaagatcaaacgctcgccctatttcagcaacaccgtgatcgtggtgtcctccgatcatctggcgatgaacaacaccgcctacgatatcctgaccaaacagaagcgccgcaacctgttcttcatcatcgacggcacccggccgctggcggaacagcgcaacgagaagcgcagcacgctggacaacggcgccacggtgctggacgtgatgggcggcgacaactacatcggcctcggccgcagcagcctgtcggcgccgtcgctgtctacggtgttcctgaatatcgaagagaaaatcaacggctggaaaccggcggtgatcaatcagtggggcctgccaaaccgcatcagcgactacagcgtggatacgcgccagcgcagcttcagcttctccggcgtcacctacaaggtgccgttcattctgcgggtgggcgataaccgcatcgaaccgatgttcaacgtctacctttccaccccgctgcgcaagcagctggccgggctgggcgcgggggagaaattcgtctgggtcgataaatgctacgagatcggccgggtctgggcgccgaaactggcgttgagcaccgacatctgcgtggcctccggcaccctggcctcgccgccgcagatcgtgcaggccagcggcgatcgcttccgcggcaaggtgagctttaccgccccggcggcggacagcgtcgccgattaccaaaacgccgtcgctcgcctgcaggtggacgacgcggcgatgaagtaccaagcggacagcatcgagttcatgctgcccggcctgccggagcaggtgaaagccatcaccggcgtttccggcgtcgaggagtggggccgctggtccgacgccaacctggcgccggcggtcgacatcgattacgtcgatccgctgccgaagaccttcgatctggtgctgcgcgcccgcgcctacggcaataacgtcggcgaaccgatttcggtgcgcgtcggcgacgaagagcgtttcgtgtcgctcggcgaacaggacagcaccgtcaccctgcgcttcgacaacccgcgcggcgcgcagaagatcagcattaccccgccggcgccgaccgagccgaaagagagcgccagcggcggcttcacgccgaaaaagctgggcatcggcctggtgtcgctgaaggtcgaggcggccgccccctcctcctaa

SEQ ID NO: 423226 - DNA, 741 bp, Serratia marcescens
atgcagacgattcccgccgcggtactcgacgatctggccccgcaaggcgtgttgcgcgcggcgatcaactacggcaatccggtgctggcgcaggccggagccggcggcaaaccgcaaggcgcttcggtggagctggccgccgcgctggcccaggagctgggcgtggcgctcgaactggtcacctatgacgcggcgggcaaggtgttcgccgacctggacagcggcgcctggaacctggcgtttatggccatcgagccggtgcgcgcggcgcagatcgccttcagcgagccgtacgtgatcatcgaggggacttacctggtggcgaacgacgcgccttactttgaggtggcgcagctcgacaggccggaggtgcgcatcgcggtcggccagggggcggcgtacgatctgtttttatcgcgcacgctgcagcaggcgcaactggtgcgggcggcaacctctgccgaggcgatcgcgctgtttttcgaccgggggctggaggcggcggccggcgtgcgccaaccgctgctggccgctgcggccgtccatcccggctaccgggtgctggacgggcatttcaccgctatccgccaggcaatggcggtgccgcggcaaaaaacgcagggcgccgcctacgtgaacgattttatcgagcgctgcaaggccaacgggctggtgaaggcggccttgcagcgcagcggccagggtgaggtgacggtggcgccgccggccgcctcggcgtga

SEQ ID NO: 423227 - DNA, 936 bp, Serratia marcescens
atgatcaaacaaaccgtttgcgggctactgctcggcgccgccatcaccggccaggccggcgcggccgaaaagctgacgctggtgctcgactggtatatcaaccccgatcacgcgccgattatggtggccgagcagatcggtgccttcaaggccgaagggctggacgtcaagatcgtgccgccgtccgatccggcgctgccgccgcggctggtggccgccaaacaggccgacctcgccatcacttaccaaccgcagctgcatttcttcgccgatcagggcctgccgctgatgcgcgtcggcacgctgatcaacacgccgctgaatacggtgatcgcgctggataaaaacatcacgtcgccggcggatctcaagggcaaaacggtgggttactcggtcagcggcatcgaacaggcgacgctggccaccatggtcgaacacgagcacctcaagccgcaggacatcaagctcatcaacgtcaacttccagctaaccagcgccctgctggcgggccaggtcgatgcggtgatcggcggctaccgcaacatcgaagcgctggagctgaagctgcagggcaagacgccggtggtgttcaacgtcgaagattacggcgtgccggcctacgacgagctgatcatcgtcgcccaccgcgatgcggtgaacgagccgaaaatccgcaagttcctcgccgcgttgaagcaaggcagcgactacctgcatgcgcacccgcaggacacctggctggcgttcgccaaggcgcacccggagctgaataccgagctgaacaaacaggcgtggcaagccagcctgccgctgttcgcgcgcgatccggccaagctggatcgggcacgctaccaggcttacgaacagttcctgttcgacaacaagctgatcaagaaaatcacgccggtggaacagtacgcggtggagctggactga

SEQ ID NO: 423228 - DNA, 768 bp, Serratia marcescens
atgaatattgccaaagagcgtgggcttacccgcctgcggcgtgggctgacggtgtttgccggcctgctgctgctgtggtggctggcggcgcaaagcggcattccggcctttctgctgcccacgccgagcgcggtggcgcaggcgctgtgggacgggcgcggctatctcgcctggcacacgctggtcaccgcttcggagatcgtcagcgggctggcgctgggcgtgctgctcggcgcggcgctagcgctgtgcatgatcttctcgccgcgcctgcagcgctggctgatgccgctggtgctcaccagccaggcgataccggtgttcgccctggcgccgctgctggtgctgtggttcggcttcggcatgagcgccaaggtggcgatggcggtgctggtaattttcttcccggtggtgtcggcctttttcgacgggctgcgtcgggtcaacaacgactatctcgatctggcacgcacgatgcgcgcttcgcgctgggcgcagctgcggcacgtgcggctgatggcggcgctgccggccttcggctccggcctgcgcatggccgccgccgtcgcgccgatcggcgccatcatcggcgaatgggtcggctcggccgaagggctgggctacgtgatgctgaacgccaacgcgcgcatgcagaccgacgtctgcttcgccgcgctgtttattttggtgctgatgaccgtgctgctgtgggctgcggtggatgcgctgctgcggcgcctgatcgcctgggcgccggaaaacgactga

SEQ ID NO: 423229 - DNA, 741 bp, Serratia marcescens
atgaccaccccgcgtctcccgcccggcatccaggtgcgggatctcagcctgcgtttcggtcagcaaatcgtcttcgaccggctgagcttcgacatcgccggcggcagcttcgtcgccctgctcggagccagcggcgccggcaaaaccagcctgctgaagatcatcgccggcctggcgcaggccacctcaggcacggtgaccggcagcgacggtttgccgatcgccgggcgcatcgcctacatggggcaaaaagacctgctctacccgtggctaaccgtcgaggagaacgtcgccctcggctcgcggctgcgcggcgaagtgacggatcgggcgtgggcggcgcacctgctggagcgcgtgggcctggccgcgcatggccgcagcctgcccgccgcgctgtccggcggcatgcgccagcgcgccgccatcgcccgcacgctctacgaacgccagccgatcgtgctgatggacgaacccttttccgcgctggacgccattacccgcgccgagatccagagcctggccgccgaactgctggcgcaaaacaccgtgctgctgatcacccacgatccgatggaggcctgccgcctgagccaccgcctgctggtgctgtcgccctggccgctgggcctcgacgatagccaccgcatcagcgggcaaccgccgcgcgcgccggatgacgccgacctgctgaaaagccaggccgaactgctgcaacagctggtgagggccgcgcaatga

SEQ ID NO: 423230 - DNA, 684 bp, Serratia marcescens
atgtccatcaccaccctgttcgaaagcggtctttacggccggctgcgccaacatgccggcagccactggcaagattacgttgatcacccgtttctgcagcagctggccgccggcaccttgcccgaacgcgcgtttcgccgctacctgacccaggactatctgttcctgctgcacttcgcccgcgcctacgcgctgctggtcagcaagctgcgcaccctgccggagatgcgcgccgctaccgcctcgctcaacggcatcgtcgccgaactgccgctgcacgtggcctactgcgccgaatgggggctgagcgaagcgcagatcgccgcccagccggaagcggcggaaaccatgaactatacccgctacgtgctggatatcggccatgccggcgacgccctcgatctgctggctggcctgctgccctgcgtggccggctatgccgaaatcggcctgcggctgctgcacgatcccgccacccaaatggagggcaatccttacgcctcctggatccgcaactacggcgacgagggctatctggccggcgtgcgcgccgccatcgagctgctggaaaccgtcggccaccagcgcggcgcacaaggccgcttcaccgagctggcgcagattttcaccaccgccacccagctggaatcggcattttggcaaatggggctgaacgcctcatga

SEQ ID NO: 423231 - DNA, 1023 bp, Serratia marcescens
atgaaaaagattggttttctctcgtttggccactggtcgccttccgcccagtccggcacccgttccgcggcggatgcgctgctgcagtccatcgatctggcggtcgccgccgaagatctgggggcggacggcgcctattttcgcgtacaccactttgcacgccagctggggtcgccgttcccgctgctggccgccatcggcgccaaaacccaacgcatcgagatcggcaccggcgtgatcgacatgcgttatgaaaatccgctgtacatggtggaagacgccggcgcggcggatctgatcgccggcgggcggctgcagctcggcatcagccgcggctcgccggagcaggtgatcgacggctggcgctatttcggctatgccccggccgacagcgagagcgacgcggacatggcccgtcgccataccgaagtgttcctggaagcgctgcgcggcgaagggttcgccgagcccaatccacagccgatgttcccgaatccgcccgggctgctgcggccggagccgttttccgccgggctgcgcgaccgcatctggtggggcgccggttcgaacgccaccgccgtctgggcggcgaagctgggcatgaacctgcaaagctcgacgctcaagaacgacgaaaccggcgaacccttccatatccagcaggccaagcagatccgcgcctaccgcgccgcctggcaagaggcgggccatgcgcgcgagccgcgggtttccgtcagccgcagcatcttcgcgctggtggatcagcgggatcgcaactacttcggcggcggcggcaaggagggcgatcaactggggtatatcgacgcgcagacccgggcgatcttcggccgcagctatgccgccgagccggacgagctgatcaagcagctggcgcaggacgaggccatcgccgaagcggatacgctgctgctgaccgtgcctaaccagctgggcgtggattacaacgcccacgtcatcgaatcgattttaacccatatcgcgccggcgctcggctggcgctaa

SEQ ID NO: 423232 - DNA, 735 bp, Serratia marcescens
atgtcacgcattttcattaccggttcggtagacgggctgggccgcgccgccgcgcaaacgctgttggacgaagggcatcaggtaattctgcatgcgcgtgagcccggccgtttggacgcggtgcgcgatctgctggatcgcggcgcacaggcgacgatcggcgatctgtccgatgtgcagcagatccggcagcttgccgagcaggtcaaccgcctcggccgcccggacgcggtgatccacaacgccggtatgtttaccgggccgcaggtgatgccggtgaacgtcgttgcgccctacctgctgacggccctgatcgaacgccccaagcgtatcgtctatctgagcagcagcatgcactttgacggcgtggcggaactgagcggcgtggactggctcggcggcgcagccggctcctattcggacagcaaactgttcgtcaccgcgctggccgccgccgtggcgcgcctgtggcctgacgtgatcagcagcgcggtcgatcccggctgggtgccgaccaaaatgggcggcgcggatgcgccagacgatctggcgctggggcatgtgacgcaggcgtggctggtgagcagcgatgagccgcaggctctggcgtccggcggctattggcaccatcaacagcgcttcgaacctcacgcggcggtatacgacgaggcgtttcaaacggcgctgctggcgcaattggcgcgcgccggcggggtgagcctgccgcaggcttga

SEQ ID NO: 423233 - DNA, 975 bp, Serratia marcescens
atgcatacattcctgattatcgtccctgaagggggcatgctgttcgaagcggcgggcatcgccgatatcctgatgcaggctaaccgtctgagtcctgccgaggcgccgctgtatcagatcgcggtcgccaccacgcaatcccatcgggtggtacacggcctgtccgggctgagcctgttggccgaccaccgcctggcggatctcgatccggccctgccgcgcgataccgtcattgttgccggcaagggggcgaccgaagaagagggcgccctggtggcggattggctgcgccgcgcggccccgcaggcgcgccgtatcgcttccgtttgcggcggggctctgctgctggccgaagccgggttgctggacgggcggcgggcgactacccactggcggctggcggaaacgctgcaggcgcgcttcccgcgggtgcaggtcgagaacggcccgatctacgtgcaggacgggccgatctggacctccggcggcgtcagctccggcttcgatctgacgctggcgctggtggaggacgactacggcttcgtgcaggcgcgcgaagtggcgcaggatctggtgatgtttctgcgacgccccggcgggcaggcgcagttcagccgctacccgctcaaccaggccaaatcgccgggcccgatccgcgacctgcagtcctggatcctggaaaacctcgccgacgatctcagcgtcgatcggttggccgaccgcgtggcgatgagcccgcgcaactttacccgcgtattcacccgcgagacgggcatttctcccgccaaattcgtcgaagaagggcggttgcataccgccaggcagcgcctcgagcagagtgcggagggcatcgaacagatcgcgctggccaccggcttcggcaacggccttaacctgcggcgggtgtttgagcgcaaactgcaactgaccccgagcgaataccgcgaacgcttccatgcgcgcaatttggcgtaa

SEQ ID NO: 423234 - DNA, 1011 bp, Serratia marcescens
atggtgaaagttggcattaacggcttcggcaggatcgggcgcaacgtgctgcgcgcggcgctggggcgcagcgattttgaagtggtggcgatcaacgatctgacggacagcaaaacgctggcgcatctgctgaaatacgacacgctttccggcacgctggcggccagggtggaagccggcgacaaccagctgctgctggacggccggccgattcaggtgttttcgcagcgcgatcccgccgagatcccctggagcagcgtgggcgtggacgtggtgatcgaagcgacgggcttctttaccgataaagccaaggcggaagtgcacatcacgcacggcggcgccaagcgggtgattatctcggcgccggccaagaacgacgacatcaccatcgtcatgggggttaacgaccaactctacgatccggcgcggcataaagtggtcagcaacggcagctgtaccaccaacgggctggcgcccgccgcgcaggtgttgcatcaggcgttcggcatcgaatacgggctgatgaacaccacccacgcctataccaacagccaggcgctgcacgatcagccggaaaaagatctgcgcggcgcgcgggcggcggcggagtcgatcgtgccttactccagcggcgcggccaaggcgctcggcaaggtgatcccggatctcgacggcaggttgaccggttattcgctgcgggtgccggtgccggtcgtctcgatcgtcgatctgacggtgacgctgaaacgcccggcgacggtggaggagattaacgccgctttccgtgcggcggcggcgtccggcccgctgaaagggatcctggggtacagcgatgaaccgctggtgtcgagcgactatcggggcgacgcgcgctcgtcgatcatcgacggcctgtccacgctggtcatcggcggcaatctggtgaaggtgctcgcctggtatgacaacgagtggggcttctccaaccgcttggtcgatctggcgctgctgatggaaaaacgcgggttgtaa

SEQ ID NO: 423235 - DNA, 801 bp, Serratia marcescens
atgattaaatggccgtggaaagcgactcaaccctctcaatcccaggcagacatcgaggcccagtggcaggacgcgctggcgatcccgctgctctcgccgctgaatgagcaggagcggcagcggctggtggccgtcgccgggcaaatcttgcagcaaaagcgcatcgtgccgctgcaggggctgcagctcacctcacaaatgcaggcgcgcatcgccctgctgttcgccctgccggtgctggagctcggcgcggagtgcctcgacggcttcaacgaaatcctgctctaccccaccccgttcgtggtggaagacgaatggcaggacgaaatcggcctggtgcactcggggccggtggtgcagtccggccagagctgggaacaggggccgatcgtgctcaattggcaagacgtgcaggactctttcgatctctccggtttcaatctggtgatccacgaagcggtgcacaagctggatatgcgcaacggcggcgtcgccaccggcgtgccgccgatcccgctgcgcgaagtggccgcctgggagcacgatctgcacgccgcgatggaaagtctgcaggacgagatcgacatggtcggcgaagaggccgccagcatggacgcctacgccgccaccgatgcagccgagtgcttcgccgtgctgtcggagtattttttcagcgcccccgagctgctggcagaacgctttccggcgctgtatcagcacttttgccgcttctaccgccaggatccgctggcgcgcctgctgcgcggccaggcggaaaacgacgcgcaatgggctgattga

SEQ ID NO: 423236 - DNA, 2370 bp, Serratia marcescens
atgcaaaaagcgcacaggaagcgggacgggaagaaatacctcctgtggtttcttgccggattgatgttcattatcggcctggcaatctgccttctcggcgccagattggccttcgtcggcggaacgttttatttcgtggtgatgggtctggcgatgattatcgccgccgtactgattgcccggcgccgtcgcagcggcattatcctgtacgcgatcgccttcgtcgcctccctgttttgggccgtcgccgatgccggctggcattactggccgctgttctcgcgccttttcaccctcggcgttttagcgtttctttgtgctatcgcctggccattgatgcccggtcattcggccaaaaaaggcccggctttcggcttagcggcgatcctggccatcgggctgggggtcagcttcgggtggatgttcagatcccaaccgctggtcagcgcgacgaaaaccatccccgtatttccagtagccgccggcgagcaacaaaagaattgggagcactggggaaataccccgcacggcgatcgcttcgccgcacttgatcaaataaacaagcagaacgtttcccgcttgcaggtggcctggactgcccataccggcgatcttcccgtgagcaaaggttcgggcgcggaagatcagaatacgcctttgcaggtcggcgacacgctttatgtctgcaccccgtacagtaaagtgctggctttagatgtggatagcgggaaagaaaaatggcgtttcgatccgcaggccgcctcgccgaactggcagcgctgccggggcctgggttactacgaggatcacgccgctcctgcagcaacaggctcgagtcgcccacccgcgatctgttcgcgtcgtttgttcctgcccacgattgacgccagactcatcgcccttgatgccgacacggggaaattgtgcgacgcctttggcgatcgcggtaccgtcgatctcggcagcggcatgggcgaaatcaaaccgggctattatcaacaaacctccacgccgctggtggccggagaaatcgtcgtcgttgggggacgcgtagcggacaacttttccaccgatgagcctcccggcgttgttcgagcttatgatgttcactccggcaacctcgtgtgggcctgggatccgggcaacccagaactgagcggcctgccgccggaggggcaaacctatactcgcggcacgccgaatgtctggtcagccatgtcctatgacaagcggttgaacctcatctatttacccacaggcaacgcgacgccagactttttcggcggcactcgcagcgcgctggacgacaaatacagctccgccgtcgtcgccatagacgccgctaccggcaaagttcgctggcactatcagacgacccaccacgatttgtgggacttcgatctgccctcacagccactgttgttcgatttgcccgacggcaaaggcggcattacgccggttctggtgcaaaccagcaagcaaggcatgattttcatgctcaaccgcgtgaccggcgagcccgtcgcgcaagttgaagaacgcccggtgccaacgggagctatcaggggtgaacgctattcccccactcagccgtactcagtggggatgccgatgattggcaatgaacaactgaaagagtcggatatgtggggcgcaacgccgattgacctgctgttatgccgcattcagtttaaagaaatgcgctatcaaggcattttcaccccgccgggtgaagaccgcgccctgcaatacccaggctccctgggaggaatgaactggggcagcgtcgccgtggatccacacaataacctgatgttcgttaacgacatgcgtctgggattggcgcattatctggtgccgcgggataaggtgccaaccaacgccagcggtattgaaatggggatagtcccgatggagggcaccccgttcggggccctgcgagaacggttcctctccccgcttgggatcccctgccagaaaccgccgttcggcacgatgtccgccgtggacctgactaccggcaaattggtgtggcaggtccctgtcgggacagtcgaggataccgggccgctcggcatcagcatgcatatgccgatccctatcggcatgccaacgctgggcgcgccgctgtcgacgcagtcgggtcttctgtttttcgccggcacgcaggacttctatttacgcgcctttgacaccgccaacggtaaagagatttggaaatcgcgcttgccggtcgggagccaatccggcccgatgacttacctttcgccgaaaaccggcaaacagtacattgtcatcaatgcggggggcgcacgccaatcaccgatgcgcggcgactacattatcgcctatgcgctgccggacaagtaa

SEQ ID NO: 423237 - DNA, 1377 bp, Serratia marcescens
atgtcgggaaacaacgcaatcaatgttcgggcgctgatcgacagccgccccttagggaaatggcaaaagatggtcgtgctgctcggcttttgcatcattgctctggatggattcgatatcgttatcatgggatttattgcgccagagcttaaggccgattggcaaatcactaatcgcgagctggggctggtgatcagcgcggcgctgattggcctgtcgctgggcgcgatgctttccgggccattgtcagacagattcggccgcaaagtggtcatcatcaacagcgtattcttttttggcgtttggacgctggtgacggcgttttctcaaaatatggagcagatgatgttatttcgcctgctcaccggcttggggctgggcgccgccatgccgaatgtcggcaccctggtggcggaattcgcgcctgcccggcgccgcgctttcttgattaccgtggtcttctgcggcttcacctttggcgccgccttgggcggattcgccgcctcctggctgatgccacgcttcggctggcattccgtgctgctgctcggcgggatcttgcccctgctgttcgcgcccgtgctgatggcggcgttacccgaatcggtgtgtttcctggtggagaaacgggcgaaaaacgacggaattcagcggattttggcgaaactggtgcccgacctcgatcttcggcacagcaccatcatattgcccccgccaaaccaggcctgcgcgcaccccatcaaattagtggtgagctcgcagtaccgtttcggcagtttaatgctgtggggatcgtatttttccgcgctgtttctgttctatacgttgggcagctggctgccgttgctgattaaagacggcggcttcaacgtcacgcaagcggcgatcatcaccgccctgtttcaggcgggcggcacgctgggctcactgttttccggctggctgatggacaggtccgaaccgcatcgcgctttggcgtccatttatgggatgggagcgctgttcaccctgcttatggggcctgcgatgggctaccccgtcctgatgggaggctgcgcgatggcgatcggattctgcatcggaggagccaacaccggcatgaacgccctgtcggccagtttttatcccaccgaagcccgggctaccggctccagctggatgcacggcatcggtcgtttgggcgccatattgagcgcgctggccggcgctgaaatgctggcgctcggttggagcttaagcaccattttcaccgtgctggcgctgccggcgctattgacggtggcgatgatcgtcgccaaagggcgccatcaagttcgccaagcggcagggcatgggtatacggcttaccttgacgcacgttcaaatgacatgcgctga

SEQ ID NO: 423238 - DNA, 1896 bp, Serratia marcescens
atgaaacgttctatcgcgacggtctcggtatcgggctcgctgccggaaaaactgcgggctatcgccgccgcaggctttgatggcgtcgaaattttcgataacgatctggtctattaccccggttcaccggcgcaaatccgtgatctgtgcgccgaactgggcctggaaattttgctgttccagccgtttcgggacttcgaaggcggcccgcgcgaaagcctggcgcagaacctttcacgcgcagcgcgcaagttcgacgtcatgcagcaattgggctgctcgcgcatgctgctctgcagtaatgtctcgcccgacagcagcgaagacatggccacgcaagtgagcgatttgcgcgcgttggcggagttggccgccgagtatgatattactgtcggttatgaagcgctggcatggggacgtcacgtgaacctgtggcgcgacgcctgggcgcgggttaaggccgtagaccatccggcgctggggatcattctcgatagttttcatatcctgtcgcgcggcgataatcttgacggccttgatgaagtcccgcccgaaaaaattgtgtttgtacaactggcggacgccccgctgctgaagatggacgtgctcgcctggagccgccatttccgctgtttccccggccaaggggagctgaacctggctcagttcatgactcaactttccgcgcatggctatcgcggcgcctggtcgctggagatatttaacgatggtttccgcgcctcgccggtgcttcccacggctcaggacggtttccgatcgttgttgtggctggaggaacaaacctatgactggttggccaaacagcctctgctgcccaacgccatggcctcgctcatagaacattcattatttcattcagaagcgcatccccccttgctggcgctggagtttatcgaatttgccgtctcgcacagcgatgggctggcgatgggccaatggctgacgcagttgggattggttcacgccggcgaacaccgctccaaaagcgtcgccctctatcgcaacggcaaagtgaatgtcattctgaatgctcaaccggaaagtcaggccagcggctattatcacttgcacggcatttctctttgcgccgtggcgtggcgagttcgcggcgtagcgcgtttactgcaacgggcgcaagactacggttacgccctctggcaaggagaaaccggccccaacgaacggcaaattcccgccctgtgcgcaccggacggcagcctgatttatctggtcgaggcggacgaagatcccaagaacgatatttatcacaccgattttcatctgactcatcgcagcgcgccgccgcctgcactgcagagcatcgatcacctcgcgatagcgctgacggacgaatcttgcggcaactggatcatgttcctgcgcagcgtgccgggttttgtgcaggacaacgagtgggaattgcccgatccgttgggtttggttcgcagccgcgtgttgcgcagccccaacgacgccatccggctgccgctgaatatgtcggtgagccgggaaacccaaatcgcccaggcattaaccacctatcagggtgcgggattacagcatgtcgcctttggctgtaatgatttgttcagcgtagtgaaagcggctcagcagcgtggattaaaaacgctgagcatccccgataactactatcaagacctcagagcgcgtttcgatcttgatcccgttttcctttcgcagctgcaagcgttcaatgtgctctacgatcgagacgagcaaggtggagaattactgcacgtctataccgtcgcctacgagaaagggcgcttcttcttcgagttattggaacgtcggggcggctaccgcggcttcggggccgccaacgccccggttcggctcaccgccatgcgttaa

SEQ ID NO: 423239 - DNA, 738 bp, Serratia marcescens
atgaaaagtgattggatggcgcgagaactggtgcatcgcgattacagccatcacccgcctgcgctggcgccgctgtataaaaccagcgtgctgcgatcgccgcgcaatgcattaatttcattgcaaaactcgctgtctgaactgaccgcacccgtgttcacgccaacggatatcggcccgattgatcacgatctgattctgaactacgccaaagacggcttaccgatcggcgagcggatcatcgtgcatggatatgtgcgcgatgccttcggggcgccggtgcgcaacgccctggtcgaggtatggcaggccaatgcgggagggcgctatcgtcacaagaaggatcagtatctggcgcctatcgatcccaattttggcggctgcggcaggatgctgaccgacgacaacgggtattactgttttcgcaccatcaagccgggcccgtacccctggcgcaatcaggtcagcgactggcgtccggcgcatattcacttctcgctctccggcgaggcgttcgcgcagcggttgatcacgcagatgtatttcgaaggcgatccgttgctcgttcgttgccccatcttgcagtcggtaggcagcgacgatgcgatgcgcacgctgattgccgagctggatatgcacgccgccgtgccgctggacagcctggcctaccgcttcgatctggtgctgcgcggccatcgggccacgtggtttgagaaccgtacacagggagccgcgtga

SEQ ID NO: 423240 - DNA, 621 bp, Serratia marcescens
atgaaaaagtatttgtctgaaacggcctcgcaaaccgccggcccttatgtgcacatcggtttggcgccgcatgccgccggttttgacatttttgagcgtaatttcacccatgtgttgacgcaaccggaaacgcgcggggaacgcatcgtggtggaagggcatgtttatgacggtaccggcacgccggtgcgagacgcgctggttgaagtctggcaggccaacgccgccgggcgatatcagcatcccgccgacggccaacgagataaacccgacgaccccgcttttcgcggctgggggcgaacctgttcggatttcaccagcggcctgtggcaatttgagacgattaaaccgggcagagtgatggggcgcgacggccggctgatggcgcctcatctcaatttatggatcgtggcccgcggcatcaacatcgggttgaacacgcgtctttacttcgccgacgagcaggcggcgaacgctgaagatccggtgttgaacctcattgaatgggagaaacggcgcggcacgttattggcgcaaaggcggcagcgcggtgatcagacggtataccatttcgatatctggctacagggcgagaacgagaccgttttttttgatatttga

SEQ ID NO: 423241 - DNA, 933 bp, Serratia marcescens
atgaacatgacttctcgctttagccaacgcatccgcctgcgtcatctgcacgcctttgtcgctaccgcgcagcaggggacgctggtgcgcgccgcacagcaattgggcatcacgcagcccgccctctccaaaacgctcaatgaactggaaagcctggccggcgagcgcctgttttcgcgcagccggcagggggcagagctgaccgccgccggggcgcgtttcctgcaggatgcggggcgcgttttggatgcgctgaatgtgttggggcgtacggtcgcatcggacagcgaggcgctgccggcgccgctgcatatcggggcgctgcccaccacgctggtgagtttggtcgcgccggtcgtggtggggttgcagcagcaatcgccaggttggcgcatgcaggtttcgacgctggccaacgatgcgctgatgatggcggtgagatccgggcaattaaccttagggatagggcgtatgtcagacccctctcgcatggaggggctcaatttcgagctgctgtatcatgaaacgctgcggctggtggtttccccccatcatccgctgctgcattcggatgtctcgctggcggaggccctgagttggccattggtgctctcaccgcgtgggaccgtaccgcgccagaatgcggaggcgctcattgtcagccacgggctggccgtgccggaaggctgcgtcgagaccttgtcggtcacgctggcgcgttgcctgacgttgcagtatggctatgtttggctggtgccttacggcgcggtgcgcgacgatctgttcggcaatcacctgcgtgcgctgccgttgcctactcagggaatggcagaaccgttgggcatcattacccggcaagaggcgttcacgccccctgagcagcagcgcctggtcgcagcgctgcgtcagagagtactggatgtgccggtataa

SEQ ID NO: 423242 - DNA, 1152 bp, Serratia marcescens
atgttgaattatgtcctggaagggcccgaaaacgccccggtcattctgttcagcaactcgctggggacgtcattggcaatgtggcaaccgcagcgcgacgcgctcatctcccactatcgcattctgcgctacgacgttgccggccacggcgcatcgccgcccggtgaacaacccggatcgctggcgctgctgggcagacaggtgctgtcattgctggacgctctggcgattgagcgcgtccatttttgcggtatctccatgggggggttaacgggattatggctggcgcgttttcatcccgagcgcttgctgacgttgaccatcgccaatagcgcagcaaaaattggaacggcggcgaattggcgacaacgcgccgcgcaagtgcgtcagtcggggatgtccgccgtcagcgatggcgcagcatcacgctggttcacgccggcattttgccaatccgcccccgccagggtgcaagcattattgaatcagctgacggcctgcgatcccaacagctatgccgcttgctgcgaagcattggcaaacgccgatttacgcgccgagctggaagggatcctcgtgccgacgctgattatcgccggacatgacgacgcggtaaccaccgtcgatgatgccaaagcgttagtggcgggcattcccggcgctcaatgcgtcatcttgcccgcctctcacctttccagcgtcgaggcctggcgggcattcaatcgcactttccgggcctttttggatgaacagctcacgcagcggcaacgctatcagcaaggcatgacggtgcgcagagccgtattgggcgatgagcatgtcgataataccctcgcggcgctgtcgccgttcaacgaggaatttcaacatttcatcactcgctacgcctggggggaaatatggacgcgtccgggtctgtcgcgccatacccgcagcctgatcaccatcgcgatgttgatcgccttgaatcgcgaagctgaactgaaaatgcatatacgagccgccttcaacaacggcgtcacgcgcgaagagctcaaagaagtcctgatgcatgcggcgctttactgcggcctgcccgcctcgaacgccgcctttcatttggcgcaatccgtctttgccgaacacgatgccgggcagccgccggccgaatag

SEQ ID NO: 423243 - DNA, 1344 bp, Serratia marcescens
atgtcactctatagcgcaatgtttatgacgtcgccattaacgccctgcttcagcgatacggccctgctacagggcatgctcgatttcgaagccggcctggcgcaagccctggcatctgcagggattatcgatgacgagtcggctcgaatcatacgcagccactgccgggcggaaaaactcgacgccgccgcgctggcgcagtccgccggattggcgggcaacttagcgattccgctcgtcaaacagttgacggcgctggtggctcaacgctcgccggacgcggcgcgcttcgttcactggggggcaaccagtcaggatgcgattgacagcgggctggtgctgcaactgcgcagcgcgctcaaccaaaccgacacgctgctcaatcagctgattgcggcgctgacggcgcaatgtcggcgccatagcgcaacgttaatggtcggccgcacctggctgcaacacgcgttacccacgacgctggggctgaaattggccggcacgctggacgccctgctgcgctttcgggttcgtctggctgagatccggccacgcgtgctggcgctgcaattcggcggtgccgccggcacgctcgcctcgttcggcgagcagggagaacgcgtcgagcaggcgctggcggaagcgctggcgctgccgcgcagcgccacgccgtggcatacccaacgcgaccggttgctggaactggccggctggtatgccggactcacgggcacgctcggcaagctggcgcgtgacatgtcgctgttaatgcaaaccgaggtcgctgaaatcagcgaaccttcggccccgggtcgcggcggctcctccaccatgccgcataagcgtaatccggtactctgcgccgccatcctcagcgcggctaaccgcttgcctgcgctgatggcgggattgtatgccggccaggtgcaagagcacgaacgcgcgctgggaggctggcaggccgagtggcaaagcctgccgcagctcctggtgctgagcggagcggcaatggcgcaaagccttgacctcgttaacggcctggaggtgcatgaagcggcgatgcggcgcaatctggcgctgacgcaggggcagatcatggctgaatcggtttccctggccttagccccgcttctcggccgccagcaggcgcaccagcatatcgcgcaatgttgccgtcaggctcaggcaacgcagcaatccctgttaaccctgctgtgcgccgatgcggaagtctcttcccgactcagccgggaagctctggagacgttgctcgatccggccaatgccacaggcagcgcacagcgtttcattcaacaagttctggcatcggccgaaaaggagcaatga

SEQ ID NO: 423244 - DNA, 1203 bp, Serratia marcescens
atgcaacaggctttaatctgcgatgccgttcgtacgccctttggccgttacggcggcgcattatccgcgctgcgcgccgacgatttggccgctctgcccctgaaggcgctgcttgccaggctgccgcagctggatccccaggccattgatgacgttattctggggtgcgccaaccaggccggtgaagacaaccgcaacgtggcgcgaatggcgctgctgctggccggattgccgcactccgtgccgggcaccaccctcaatcgcctgtgcggttcgggattggacgcggtagggatggcggcgcgcgccattaaatgcggcgaagcggaggtcatcatcgcgggcggcgtggaaagcatgtcgcgcgcgccctttgtcaccggcaaagcggacagcgccttcagccgatcgctgaaaatggaagatacgacgatgggatggcgctttatcaatccgcaaatgcgcgctcagttcggtgtcgaaaccatgcctgaaaccgccgaaaatgtggctcgcgaattcgccgtcagccgcgccgatcaagacgcctttgcattgcgcagccaacaacgcaccgcccgcgctcaggaactgggcctgtttgatgaggaactgatcgccgtcagcattccgcaacgcaaaggcgaaccgctcaacttggttcgcgacgaacatccccgcagcacctctttggccgcgctgtccgcactgaagggcgtcgtacacgccgaggggagcgtcaccgccggcaacgcctcgggcatcaacgacggggccagcgccctgctcattgccagcgaacgcgcggcggtgcagtatggactcgccccgctggcgcgggtggtcgccatgtccgcctgcggcgtagagccgcgcatcatgggttacgggccggttcccgcggtccgcaaggtactggcgcaaaccggtttgagcctggcgcaaatggacgtcatcgagttgaatgaagcctttgccgcccaggcgctggccgtgacgcgtgccctggggttaccggatgatgcggaacaggtcaaccctaacggcggcgccatcgcgctgggccatcctctgggcgcatccggcggcaggctggccatgaccgccgcttatcagctgcgtcgcaccggcgggcgctttgccctgtgcaccatgtgcgtaggtgttgggcagggcgtcgccttgattctggaacggatataa

SEQ ID NO: 423245 - DNA, 654 bp, Serratia marcescens
atgcaaaaattaacccgcgaccaattagcccaacgggtggcgcgcgatattccggaaggcgcctacgtcaacctcggaatcgggctgccgacccgcatcgctaactacctgcccgccgacaaagaagtgattctgcacagcgaaaacggcctgctcggcatggggccgtcacccgcgccgggcgaagaagatccggaactcatcaacgccggcaaagagctggtgaccttgctgcccggcggcagttatttccatcacgccgactcttttaccatgatgcgcggcggccatctcgatatctgcgtgatgggggcgtatcaggtttcggctgccggcgatctggccaactggagcaccggcgccgaagacgcgatcccggcggtgggcggcgccatggatctggccatcggcgcgcgcaaagtctatgtgatgatggactacctgaccaagaccggcgaatgcaagctggtggaacagtgcagctacccgttgaccgggttggcctgcgtcagccgcatctattcggatatggcaatcattgatatcaccccggacggcccgcaggtgctggagctgtgtccggggctcacctttgacgcgctgcaagcgttaaccccgatacgtttactgcaatctgacctgatccccgcttga

SEQ ID NO: 423246 - DNA, 690 bp, Serratia marcescens
atgatcgataaaagtgtggccaccctggaagatgccgtgtccatcattccggacggcgcgagcatcatgattggcggctttggccccgcgggacagccgctggaactgatcgatgcgctgattgaacgcggtgcccgcgagctgacggtaatcagcaataacgccggcaacggcgacagcggcctcgcggcgctgctcaagaccggctgtgtgcgaaagatgatttgctccttcccgcgccaggccgattcgtgggtcttcgacgatctttatcgccgcggcgcgatcgaactggaactggtgcctcagggcaacctggcggcccgcatgcaggccgccggcagcgggttgggcggcattttcaccccaaccgcctttggcacgccgctggcgcaaggcaaagaaacgcgtgaaatcgacgggcgtcattacgtgtttgaaacgcccttgaaggcggatttcgccttgataaaggcccatcggggtgaccgctggggcaatctggtttaccgcaaagcggcgcgtaattttggcccggtgatggcgatggccgccgccacgacgatagcgcaggtggctgaattggtgccgttgggcgcactggatccggaaaacgtgataacgccgggcatcttcgtccagcgcctggtggcggtggcgcgccccgcgaccttttccctctctgcgtga

SEQ ID NO: 423247 - DNA, 855 bp, Serratia marcescens
gtgatcgtcggcacaccgaaatttcaggcagacagcggggtaacgagaatggaaaaaggacaggaaattacgcgcagcagcaccgatccctggaagggggatcccgactttatggcctctttggcgcgaggattggaagtcctgcaggcttttacgccgcagcggcggctgatgtcggtatcgcagattagccagcgtaccggcattccgcgcgcggcggtgcgccgctgcctttacaccctgagtaagctgggctttgtgtatgcggaagacggcaagaattatgagctgcgcccgcgcgtcttgtcgctgggccataactggctggcggcttcgccgttggccaacgccgcgcagccggtgttgaggcaactcagccagacgctcaatgagtcctgttccatggccatattggacggtgatgacattctttatatcgcccgcgcatcgacttcgcggatcatgaccatcgatttgcacgtcggcagtcgcttacctgccagcacgacgtcgatggggcgggttctgctgagcgggctcgccaatgagccgttgaatgactatttggcgcggctgacgcaactgcgttacaccagccataccctggtgagcgtaagcgcattgcgggaagagctggcgcgcgtgcgtcagcagggatatgccatcaacgatcaggaactggagattggcctgcgttcactggcggtgccgctcaccacgccggacggccgtatcgccgcggcgttgaacgtcggtgtgcatgccagccaggtttccgcagagcgtttgtatcagcaccacttgcctttattgcgctcggccgccgaagagatatcgctgctgttgcacgactaa

SEQ ID NO: 423248 - DNA, 633 bp, Serratia marcescens
atgaacgagaaaatcgactatcacatcgagaaataccatttcgcgccgctggatgaggccccgcggcttgcgcaccagtggcgtgaggtgctgaacgagtgccgcgagacgcaggccggggcggaagagcgtctgcgcattgcgctgctcaacgtggactatgtgaccagtttcgaattgccgtttcgcttattgctggtgcgggcgccgcagctgatcgccggcctgcgcgatgagctgtcgataagtcaaaaaaatgtggtgttcaacggcaagcgtttcggctgtgtctacagcctgaaaagcgatttgagcggcgtgccggaggcctttcagtacagcctgtcgacccgtattcatcgaacctcggcgtcgggcgtggacgcgctgccttaccgggaaatcgccaaggcgctcaaagcgccgcgtgagcggctcaagctggcgctggagcaggggctgccggtaacggcgctggatggattgttctggttcggcatccagcgcattgccgccgaggtgcgcaggctaagaaaaaccggcatggcgatcgtgacggcggaaaccgagatcttcgacaccctgaccggcacgacgcgcaaggtcccggtgtaccgcctggccgagagttaa

SEQ ID NO: 423249 - DNA, 963 bp, Serratia marcescens
atgctgaaacgttttgcactgctgtgctggtgcctgatcggcgccaacgctctggcggcgggccccaacgccaatatcaagtattacggctatgactggctggacttttatgaaactgccacgccgtctttcagcgccacagaggcgcttaaggcgattaccggcaccggcttcagtatgaccaatctgaacgtggtgcacacgttggcaagcctcaatctgcccgtttgcgccggtggcacctgcgccgtgaacattcaggctggttcgggtgcggtctcgggatcgccgtttatcgatatctgccctggcgcagactcgaacggcagttgtcaggccgcgggttcctggaacgccatttggacggcggtgaaaaagatcgccgaagccaaacataagcccggtgccatttattttatcgatgagccgttcgacgttcccgcgttacagaccgcggggaaatacgacgcttaccaatattcaagctatgtttgcaccctgcggcaggccatgcagcagtatggcgtcgcgatccccatctacaccatcttgtcctaccggcatgccaacaacgccgaatggatccgtgaaatacagcagggcgcgcctgcgaccgcgtgtccggccaacgtaaaaagcacgcccgattgggttggggtggataactacaactggtcggtggcggatatgtggagtacctacaaccgcctggcgccgataagcgcagccggacaaaagtgggtgttggtaccgccttccacggcatcgttaggaatgaacgaccagcaactgcatgcgcaaattcaactgtattgggattttattaaccaatatcccaatgcgcctgtggtttacatcatgaactggcggtttgatcgcgaggtcaccgagaaccgtgcagcctaccctcaatcgaccgccttactgtctttcatggcgaacacgctgcttgccaaaccttag

SEQ ID NO: 423250 - DNA, 435 bp, Serratia marcescens
atggttaagtcactgaatgcggcattcacgcgcctttttgatcgcccggacgccggtaagttggcgctcagactgaccttcggcgggttgatgctgtttcacggcgtggcgaaaattcagcatggcatcggctggatcgccgatgcgttacaacaacaggggctgcccgccttcattgcctatggcgtgtatgttggggagatcctggcgccgatactgatcgttttggggctgttcacccgccccgccgcgctggtttacgccctcacgctggtggtggcgtttctgatggtgggcaccggcaaggtgtttaccgtcaccgacgtcggcgcctggggcattgaaaacgaactggtgttctttatgggtggggtcgtcatcctgctgctgggcagcgggaaatacgcgatcgcgcgcaatgaagcctatcggtaa

SEQ ID NO: 423251 - DNA, 201 bp, Serratia marcescens
atgaaaacgcgcaaaccgcgccgtccgcccgggcggtggatctattacatcctgcatgaagacatgctgtggccctgcccggtcaaatgggagtgggagagcggctataacgcctggctgccgttttactattcccccacgctggagttcgtcgccggcaaccccgcccgcgccaccaaggtcagcagcggccggcgctaa

SEQ ID NO: 423252 - DNA, 399 bp, Serratia marcescens
atgtctactctgtttcgcacttctctttgcggcgcggtggcgttgctgctgcttgcgggttgtcagcagacggcgcataaaccggcgccgccgctgcaggcgcagttggatcacatcgctctgatgctggccggcgggcatttcctgcgcgtggcgtgcgggcgcagcgaagtgccggacgatgtgaaattgcagcgcaccgcgatgcgtacggcgcagcaccgcggctgggacacgcatgcggcaggatatcggcagctgccggcgctcacccaggcgcgctatctggctctgcaacaggataatcagctgctgacggataaatgcgccacgctcagccgcagcaccgcgcgctttatcgccgcggcgcaggccgatcaggaagactacatggagtag

SEQ ID NO: 423253 - DNA, 1434 bp, Serratia marcescens
ttgaacctgtatgccgccctgcgtcagcgcgtggaaaatacgccctggtacgccaaacggaaaagctaccgcgtgctgttctggcgcgagatcacgccgctggcggtgccgatcttcctggagaacgcctgcgtgctgctgatgggggtgctgagcacctttctggtgagctggctcggcaaagaggcgatggccggggtggggctggcggacagcttcaacatggtgatcatcgcctttttcgccgcggtggatctcggcaccaccgtggtggtggccttcagcctcggcaagcgggatcgcaggcgcgcgcgggcggcggcgcgtcagtcgctggtcttgatgaccggcgtggcgctgctgttggcggcgggcattcatctggcgggcgaaccgatcatcgatgtgatcgccggcgcggcctcgccggaagtgaaagcgctggcgctctcttacctgcagaccacggtgtggagctacccggcggcggcgattgcgctgatcggcagcggcgccctgcgcggcgcgggcaacaccaagatcccgctgctgatcaatggcggcatgaatatcctcaatatcatcatcagcagcatcctgatttacggcatgctgggttggcacgggctgggcttcgtcggcgcggggctggggctgacgatttcccgctatatcggcgccatcgccattctctatgtgctggcgatcggttttaacccggcgctgcacatcacgctgaaaagctatttcacgccgctgaagatgagcatcctgtgggaagtgctggggatcggcattcccgccagcgttgaatcggtattgttcaacggcggcaagctgttgacgcagatgttcgtcgccggcatgggcaccaacgtgatcgccggtaacttcatcgccttctccatcgcttcgttgatcaacttgccgggcaacgcgttgggatcggcctcgaccatcatcgtcggccggcggctcggcaaaggcgagatcggccaggcggagcggcagctgcgtcatattttctggctgtctacccttgggctaaccgccatcgcctggggcacggcgccgctggccggggtattcgccgcgttttatacctcgcaggatgacgtgaaatcggtggtgaaaaccctgatttggctcaacgccgcctttatgccgatctgggccgcttcctgggtgttgcctgccgggctgaaaggcgcgcgcgatgcccgctttgccatgtgggtgacgatgctgggcatgtggggctgccgcgtggtggcgggctacgcgctgggcattgaactgggcatgggcgtggtgggcgtctggttggggatgtttctcgattgggcggtgcgcggcgccttgttctattggcgcatggtcagcgggcgctggctgtggaaatatccgcggatgaggcgagagaggaaaggttaa

SEQ ID NO: 423254 - DNA, 273 bp, Serratia marcescens
atggcaaaacgcatctcaaaacaacaagaattgcagaacctgcagcaacatttactcacgacgctacacaacctgtgcccttcagccatggaaacgccgccgccgccgcccggcgaatggcccaccacacgccaattggccgagtccaacgacttgacgatttatcaggcgcgcaatttgctgctgagcctggcgggcaagggaaaagtgctggtcacccaaggccctgtcaataactcactgcgctggtatccttcgactcaccactcctga

SEQ ID NO: 423255 - DNA, 525 bp, Serratia marcescens
atgaaactgaacaaaatcatgctggcaactgttctggcgtttggcgtgtcttctctggcgaatgccgccgatcagggtcatggcaaagtgacttttaccggttctattattgatgctccttgctccattgcgcctgaatcggtcgatcaaactgtggaaatggggcagatttccaatgtcgcgctgaaaaatggcggcaaatcagcgccgcgtcagttcgatattaaactggaacagtgcgacacctccacgctgaaaaccgtcaccaccacttttgacggcaaggcttctgccgcgaatcctgatctgctgggcatcatcggtaccgccagcggcgccagcatcgccattaccgacatggcgagcaatccgatcaaactgggcaccgcaacggctcctcagacgttgaacgacggcaacaacacgctgcgcttcgccgcttacctgcagggtgacggcgcttccgccaccgtggttccaggtgatttcaccgccgtagccgatttcaaactggcttaccaataa

SEQ ID NO: 423256 - DNA, 546 bp, Serratia marcescens
atgaaccggtttatttaccatttagtgtctccttgcatattgatgaccatgctagttattccggccactcaggctgctcccaaggttcagggatgggggcgagtgaatatgcaaggagccattatcgataccgcttgcgccattgccgccggcagtcgcgatcagactatcgatatggatgtgttgccgctgggaaatattgcgcgcgatggacagggcaatacgcgcccattcaccatcgaattaatcaactgcacgtttgaacggccaaagcccaatttgccgaactggaagcaattccaggttgtttttgacggcgatgccgatggcgagttattcggcgtgcgcggagacgcgaagggtgtggcgctgcaaatatccgatggccaagggaatatcgcggcgcccggtgtgcctttgccgcgtggcgatatttcaccaggaagcatgtcgctcaactattccatcaagctggttgccaataagcaaccgctgcatgccggaagctatttttctgcggtgcgcttcaagctggattattactga

SEQ ID NO: 423257 - DNA, 2322 bp, Serratia marcescens
atggtggttcatatcaataaaaacgaactgccggagcaaaaaatatcgttttatccgccggacagcgatccggacggcagccgggcctgcatcaccaaagcgttggtcgaacaattggggctgaagcaagagatgatgcgatcgctcagctggtggcatcagggtgagtgtctggacgaatccagcctgaagggcatggcgtcgcgcggcgatcttgcgacggctgcgctctatctgagcgtgccgcaggcttatatggagtacagctcggaagactgggatccgccgtcgcgctgggatgagggcattccggggttgttgttcgactataacctcaatgctcaaagccggcatcagcaaaaggagggcactcgcgagtatagcgtcagcggcaacggtaccgccggcgccaatctcggcgcctggcgtctgcgcgccgactggcaggggcagcttaaccatcaaaccggtgtcgggcagcctaccgataagaagttggagtggagccgctattacgcctaccgcgccatccccgcgctgcgttcgcgcctgacgctgggtgaagactatttggattcgggcattttcgagagcttccgtttttcaggcgcgagtctggtctccgacgacaatatgctgccgcccaacctgcgcggctatgcgccagaggtggtcggcgtggccaaaaccaacgccaaggtgaccatcagtcagcaggggcgggtcatttatgaaacccaggtggcggcggggccgttccgtattcaggacatcaatgacgccatctccggcgagttggatgtgcgggtggaagaacaggacggcagcgtacaggcgttcaagatgaacaccgccagcattccgtatctgacccgcccgggctcgtggcgtttcaaactggcggcgggcaagccgtccgactggcaacaccacgctcgcgggccgctgtttggcaccggcgaattctcatggggcatcagcaacggctggtcgttgtatggcggcgcgttggcgggcggcgattataacgccctttcgctgggcgtggggcgcgatctgatgatgttcggcgcgctgtcgttcgacgccacccaatcgcgggcgcgcctgccgcagcaggaaaaaacgctgagcggcggttcttaccgggtgagctattcgaaaaccttcgatgagttggacagccaggtcaccttcgccggctaccgtttctcggaagaagactacatgagcatgagcgaatacctcgacgcgcgttattacggtaatcgggtcggcaacaacaaggagatgtacaccatcacctttaacaagcagttccgcgactgggggttgagcacctacctcaactacaaccatcagacttattgggatcgtccggccaatgaccgttacagcctgacggcgtcgcgctatttcgacatcggcgacttcaaaaacctgagcctgtcgttgtcggcttatcgcaaccgttacaacgagaccaacgacgacggcatgtatctgtcgctgtcaatgccgtggggcaatggtgccactctcagctacaacaccacggtgaatcgcaacgacaacactcatcgcgtggggtactacaaccgcgtcgacgaacacaacaactatcaggtgagcgccggcagcgcgcgtagcggcgccaatttgaacggctactacaaccacgagggcgacgtggcgcgtctgagcgccaacgccagctatcaggccgggcgctacagcgccgttggcctgtccgcgcagggagggatgaccgtcacgcaggaaggcggcgcgctgcatcgctctaccgttatgggcggtacgcgcctgttgctggacaccaacggcgtagcaggggtaccggtgcgcggctacggcagcaccgtgagcaccaaccgcttcggcaaggcggtggtggcggacgtcaacagctattaccgcaacaaggccagcatcgatctgaacaagctgggagacaacgccgaggccacccgatcggtggtgcaggccaccctgacggaaggggcgattggctaccgcaagttcgatgtgatcgccggtgagaaggcaatggcgatcgtcaaactggcggacggcagtacgccgccgttcggcgctacggtgttgaacgcccgcaaacaggaaaccggcatcgtcaacgacggcggcagcgtctacctgagcggcatcaacgccggtgaaaccatgacggtccactggaatggtgccgcacagtgccaaatacagctgccgtcttcgctgccggccgacatgctgatgcgcacattgttgctgccttgccggccgctcgccccggctgaataa

SEQ ID NO: 423258 - DNA, 759 bp, Serratia marcescens
atgcagaacatttccctgaagaccgcggcggcgatcgccctgttgagcacagcgatgtcgcagcaggcatcggcggcgatcgcgctcgatcgcacccgggtgatctttgacggcggccagagctcggtcagcctgaacctcagcaaccagaacaaacagctgccgtatctggcgcagggttggctggaggacgagcagggcaacaagattcagagcccgctggtggtgctgccaccggtgcagcgcatcgagccgggcaaaccgagccagataaagattcaggcgctgccggcggccaaacagctgccgcaggatcgcgagagcctgtactacttcaatttgcgcgagatcccgccgaagagcgacaaaccgaacacgctgcagatcgcgctgcaaacgcgcatcaagctgttttaccggccgacggcgatcgtgccgagccgcgccgacatggcgacgccgtggcaagagcaactgacactgacgcggcagggagacggctatcaggtcaataacccgaccccttattacatcaccattgtcgatgccgggagcaaaaagcacggcgaaggcgcgcagggtttcgagcccttcatgatcgcgcccaagagtaatgcgcggctgaccgtgagcgcggcggccctgggcggcagcccggtgctgacctatatcaacgactacggcggccggccgcagctcagtttcagctgcagcggcggcagttgcaaagtggtgccggaaaagaaaccggcttcataa

SEQ ID NO: 423259 - DNA, 630 bp, Serratia marcescens
atgaaacgaaaactgaaaaaggacagcctgccgcagcgctgcgaatggcgctattacgccgcgatgggcggcctggcgctgatgttgccgctgctattgccgaaagccgtcgcggccgacaactggcaggtggaaggtgccaacggcgtgttgcaggtgcgcggcgcgctgacggagagtgcctgtcggttggagatgaccagcgcgcggcaggatatttggctgggggaaaccggcaccgcacgcttgcggcaggccggcgatcgcgggctgccggtggcgttcgagctgcgtctgcaagattgtctgcgcgcctcgaccagccagcgcgatgcgcgcaccggcgcgctgacctgggcgccgaaccaaccggcggtcaccgtcagcttcggtgcgccggcggatatggacaatccacagttggtgaaagcgcagggcgtgtctggtctggggctgcgcctgctggacggccgcggccgcgacgttcgcctgggcagccgcggtgagccgctgatgctgacgccggggcagaataccttgagctacaccgtcgcgccggagcgaaccgcggcgccgttgatggccggcgcttatcgggcggcggtggattttaggctgagttatgactga

SEQ ID NO: 423260 - DNA, 495 bp, Serratia marcescens
atggcgcagatgatgaaacgaagccgaacggcgctctggctggcggggctgttggcgctggttcaaccgtcggctgaggcgaacaccctggtgaacgtgcgggtcaccgtgctttcccctccctgcgttatcaacggtgggcagcctatcgaggtgaatttcggcgatgaagtgatgaccacccggatcgacggcaacaactatcggcggccggtgaactatacgctgacgtgcaacgggcagagcagcaacgctctcaaattgcaggttcagggggcggcggccggtttcgacggtcaattgttgcgcaccagccaggacggactgggcatcgcgctgcttcacgggggaggccgctggccaatcaatcagtggttgagttttacctatcccgtcacgccgacgcttgaggcggtgccggtgaaatcggccactgccaaactgacagcgggcgaattcaccgccggcgcgacgatgaaagtggactatcagtaa

SEQ ID NO: 423261 - DNA, 492 bp, Serratia marcescens
atgaaacagcgtttaacggcgagcgtgctgctgtgcgccggcgtggtgtgccacttcgcctgggcggaaaaaacggtcgatatgcagttccgcggcacgctgatcgagccgccgccctgcaccatcaacgatgatggtgtgatcgatgtggatttcggcgatcgcgtcggtatcaataaggtcgacggcgtgaattaccggcaaaccatcggctatcgcattacctgcgagccggggatcggcaagtgggacatgatgttgcgcctgaacggcacggcgacctctttcgatgaggcggcggtgcaaaccaaccaccgttatctgggcattcgcatttaccaaaatgccgcgccattcaaagtgggcagttcgctgcccatcgatccgctcaagccaccggtgctggaagcggtgccggtcggcaaggcgggggaaaccttgacggaaggggcgttcgacgccacggcgaccctgcaggctgactaccagtga

SEQ ID NO: 423262 - DNA, 543 bp, Serratia marcescens
atgaaaatgacgccaagacgccgttgggcgacggcggggctgttgctgttttcactgggcgcgagcggcatggtgcgagcggcggacaatctctatatgcacggcgcgctggtggcggagccctgtgtcattcagccgggcgacgaagatatccaactggatttcggcaccgtggtcgacaaatacctgtacctgaatcagcgcacgttgagccaaccgttcgagctgcggctgtccgaatgcgatctgagcctgggaaaaacggtgtcgatcactttcaagggcgaggaaaacccgcagttgccggggttgttggcgctggcggcgagcagcgaggccagcgggatcgccatcggcatggaaaccgcgcaagggcggccattgccgctcaacagcgccggcggcaaatacccgttgcagaacggcagtacggtgatcgccgtgcaggcttatgtgcggggcgaaccggaggcgctggcgaagaagaccatcggtcgcggcgcgttcaacgccattgcgactttcaacctggactatcaataa

SEQ ID NO: 423263 - DNA, 846 bp, Serratia marcescens
atgcagcgtgctcacttcagatggatgtctctactgcttggcctggcgccggggctgtgctcggcacaaatctattcgtacgtcacccaaagcaccggctctccctccaacgctagctataagttcgtgcttgaaagctgggatatggacgacctgtcgcccaatccctgctatcagcaggcaaattgcgccatcggcattaaccaccggcataccagcaccaacaccgggggcacatcttcggtgtcaccgtctgcctacgttgttggctcgacgcgttatccgcaaattactcagttggcgacgatgggcgagctcagccgtttttatcaaagcatctatccgttgccgatacaggggagcacttcgcacgtaggggagtcgatcactcaggagtgcgtcgggttgttttacaacacgcgctccggttccgcggtaacggggagcaatgcgcgcctgatgcccagcagcgtctgcggcatcgcgccgccgccggtcggggtgtgcggcattgatgagcagcagctcgatttgaaccatggcgtgctgcaggacactgaactggcgggtaataccgcgcgcggcagtctgcgggtggtgtgttcgcagaagatgaatattgtcatgtatatccgcaccggcagcagcggccgtttggatctgggcaacaactcgggcgtctacagcacgctgcgcatcaatggcgtgttgggcaatcaggggtatccgttcactgccgacacgagcggcatcacgttgccggtcacttcaacgctcggcgtgaccggaacggtcaaagctggtgattactctgggcagtcggtcgccattctggcgctgccgtag

SEQ ID NO: 423264 - DNA, 702 bp, Serratia marcescens
atggagaaggtaccgatggggaatagtctgtccctggcgttcatcgataacgaccgcttttttattgaagggctgcagcgggtgctgctgccttattttgcccgcagggcgattccggttcgattgctggatcccgccgcggcggcgcaggcggacatggtgttccagtccgtggaaagggattggcaggcgcgattctgcctgcgtgccgcggagggcggtaaacagattaatttttctctgcgtgcgccggatgacacccgttggcgcgacaagccgcgctgcatcagcgaatcgggtgtgatctttcgcaacgatacgatcggcctcgtgctgagccgggtggaacaggcgctggcgttgcagacgtctgatagcgaagcgcgccgctgttattggtgcgagcggcagcgcattacccgccgcgaacaggatgtgatgcgctatctggcctgggaaatgccgccgacggcgatagcgcgttatttggcgttgagcgtgaagaccgtcagtaaccacaaacaggcagcgatgagaaaactggggttcaaacgcaacgtcgatttataccactggctgcggcaagggggcctgaaaaccgtagagcggtcgcgaggagaggggtgcggttcaggtgcgcggcttggcgccggaaccgctgcggcgtcaatacagcagcgtcatcgcgctgaagaacagtag

SEQ ID NO: 423265 - DNA, 180 bp, Serratia marcescens
atgaacctgcagccctttaccgccatgctgatgttcgcctacgtgctgttgatggtgccgctgctctacatcatcgacagccggctgagcgccagcaaactggtgcgcaaagccacacaaaacgtcatcatcatcgtgttgacgctactgttcttcagcgcgatgacgctgctgtattga

SEQ ID NO: 423266 - DNA, 306 bp, Serratia marcescens
atgctcctcttgtgcgtcatcatggccgaccaagtgcaccagcacggcctccgtctgatggggcaaaccaataaaatgcgcagtggcgggggagttcgccgcgagcggcagagcggcgcgccgcgtcttcaccgccgcttgcagaattttctttcgatgcttccgagtatggtcgaccatgcgcctccgaataaagccgcccgcaggcggccgatcgttgtattgcccattaagctggagaaggatttcgggccgctgccggggccacgcacccataatattgcgaatgataaccattatcaataa

SEQ ID NO: 423267 - DNA, 2373 bp, Serratia marcescens
atgcaaaataaagcgtcactatcgccgcttatcgtcataacggcgctatttgccgcgctgagcgggctttatctgctcggcggcggcatttggctggccaagttgggcggttcgctgtattacatcatcgccgggctggtgctgctggcgacctcctggctgctgttccgccgccgcgccaccgcgctgctgctgtacgcggtattcctgctgggcaccactatttgggccctgtgggaagtcggcccggacttctgggcgctgacgccgcgcctggacgtcaccttcttcttcggcctgtggctggtgctgccgtttatctaccgtaagctggtcgccaacggcaagttcgcctacggtgcgctgagcgcggcgctggcaatcaccgtcatcgcgctggcctatgccgtattcaacgatccgcaagagatcaacggcactctcgacgccgcgcaggtgcagccgaaagacgccaacggcgccgactggccggcctatggccgcacccaggaaggcacccgttactcgccgctgagccagatcaacgacaaaaacgttggccagctgcaagaggtttggcgtttccagaccggcgatctgaagaccgccaacgatccgggtgagatcaccaacgaagtcacgccgatcaagatccgcgataccctttacatgtgtacgccgcaccagaagctgttcgcgctggatgccgccaccggtaaagaaaagtggaaatttgatccgcagctgaagtacaacccgaccttccagcacatcacctgccgcggcgtgtcttaccacgaaaccgctgcagccgcgggcgccgccggcgatgccgcaccggcgatgtgcgcgcgccgcatcattctgccggtcaacgacggccgcctgttcgcgctggacgccgacaccggcaaaccgtgcccggacttcgccaacaacggcgagttgaacctgcagagcaacatgccgtatgcgacgccgggccactacgagccgacttcgccgccggtgatcaccgataaagtgatcgtcatcgccggcgccgtgaccgacaactactccaaccgcgagccttccggcgtcattcgcggcttcgacgtcaacagcggcaagctgctgtgggccttcgatccgggcgcgaaagatccgaacgccatcccggcggacgagcatcacttcgtgccgaactcgccgaactcctgggcgccggccgcctatgacgccaagctggatatcgtctatctgccgatgggcgtttccacgccggacatctggggcggcgatcgcaccccggaaatggagcgctacgccagcggcctgctggcgctgaacgcctcaaccggcaagctggcctggttctatcagacggtacaccacgacctgtgggatatggacgtgccggcgcagccgaccctggcggacattaccgacaagagcggtaaaaaagtgccggtcatctacgtgccgaccaaaaccggcaacatcttcgtgctgaaccgcaccaacggcgagttggtggtgccggcgccggagaaaccggtaccgcagggcccggccaaaggcgaccgcctgtcgccgacccagccgttctccgagctgaccttccgtcctgagaagaaactgacgggtgcggacatgtggggcgcgaccatctatgaccagctggtctgccgcgtgatgttccacagcctgcgttacgaaggcaccttcaccccgccgtccgagcagggcacgctggtgttcccgggtaacctcggcatgttcgagtggggcggcctggccgtcgataccgatcgcgaaatcgccatcgccaacccgatcgcgctgccgttcgtgtccaagctgatcccacgcggcccaggcaacccgattgagccgccggaaggcgacaagggcggcagcggcaccgagtccggcgtgcagccgcagtatggcgtaccgttcggcgtgaccctgaacccgttcctgtcaccgttcggtctgccgtgcaaacagccggcctggggttacatttccgccgtggatctgaaaaccaacgacatcgtgtggaaaaaacgcatcggcaccgtgcgcgacagctccccgctgccgctgccgttcaaaatgggcatgccgatgctgggcggcccggtgaccaccgccggtaacgtgttcttcatcggcgccaccgcagacaactacctgcgcgccttcagcgtgaccaacggtgaaaaactgtgggaagcacgcttgccggccggcggccaggcgacgccgatgacctatgaggtcaacggcaagcagtacgtgctgatcttcgccggcggccacggttccttcggcaccaagctgggtgactatctggtcgcttacgccctgcccgaccagaagtaa

SEQ ID NO: 423268 - DNA, 2130 bp, Serratia marcescens
atgaataaaaaacgtcccgccttgaccccggcaaccctgttattgctgcagccgatctgtatcggctcggccctggcggcggagcaaaaagacagcgacaccctggtggtgatggcgcaacccaccggattgacggagctggggtcgccggtctccgtcagcgtgatcgacggcgaagacctgcgcaacgccgcgccgcagattaacctgtcggaaaacctcggcagcgtgccgggcctgcagatccaaaaccggcaaaactatgcgcaggatctgcagctgtcgatacgcgggttcggtagccgctcgatgttcggcgtgcgcggggtgcgcatgtacgtcgacggcattcccgccaccatgcccgacggccaggggcaaacctccaatatcgacatcaattccgtcgaacgcatcgaggtgctgcgcggcccctattccgcgctgtacggcaacgcctcgggcggggtcatcaatgttgacactattaccggcacccagccgccgacgctggaagccggcggctatttcggcagcgacaacacctggcgctacggggtgaaagcgaccggcgccaccggcgacggcacccaggccggcgacgtcaactacaccatctccggcacccgctttaccacccagggctaccgcgatcacagcgccgcgcggaaaaacctcggcaacggcaagctcggcgtgcggctggacgacgtcagcaccctgacgctgatgttcaacagcgtctcgattgacgccggcgatccgggcggcctgaccgaagcggaatggaaggaaaacccgcgccaggcgccgcgcgcggatcaatacaacacccgcaaatcgctcgaccagacccaggccggcctgcgctatcaacgccagatgagcgaacgcgacgaactgaccctgaccgcctaccacggcgagcgccacaccacgcagtaccaatcgatcccgatggggccgcagctcaaccccacccacgccggcggggtgatcgtgctggaaagaaaatatcagggcattgacactcgctggaagcatgaggatactctcgcatcgttaccggtaacactgatcggcggtctggattatgaaaccatgaccgaacgccggcaggggttcgaaaactttattctgcgagacggcacagtggactacggcgagaaaggcgaccagcggcgcaacgagaagaaccgcatctggaacctggatccttacctgcaaacctcctggcaactgacgccgcactggacgctggatgccggcctgcgctacagcacggtcagcttcgactcgaccgactattacatcacgccgcgcaacggcgacgacagcggcagcaagcgctaccaccagtggctgccgatgggctcgctcaactacaagatcaatccggcgtggaacctttatctctccgccggccgcggctttgaaacccccaccatcaacgagctctcataccgccccgacggccaggcgggcctcaacattggcctgcagccgtctaccagcgacaccgtcgagctgggcagcaagctgcgcctcggcaacggcctggtgagcgccgccctgttccagaccgagaccgacaacgaactggtggtggcggaaagcagcggcgggcgcaccagctatgccaacgccggtaaaacccggcggcgcggcctcgagctggcgctggatcaggagtttgcgctggactggcgcctgaatatggcctggacgctgctggacgccacctaccgcagcgatatgtgcggtaaatccggctgtacccccgccggcaatcgcctgccgggcatcgcacgcaatatgggctacgcctcgctggcctgggcaccgccggaaggctggcacgccggcgcggagctgcgctacatgagcgacattcaggccaacgacgccaacagcgcgcaggcgccctcttacaccgtggccggcgtaaacgccggttatcgctttacctggaaccgctgggcgctggacgtcttcagccgggtagacaatgtgttcgatcgccgttacgtcggttcggtgatcgtcaacgaaggcaacggccgctatttcgagcctgcgccgggtcgcaactggggtggcggcgccaccttgtcttaccgctttgaataa

SEQ ID NO: 423269 - DNA, 10017 bp, Serratia marcescens
atggacgcgctcatcgcttcaccctatacccacacattttggaatgagtacatgctcaatccacactcctgcgagtacaacctggtgctggatcagacgattgagggagaattggacgtcggccgactgcgcgcggcgatcgacggggtttgccgtgactatattctgtttcaccacgttctggatgacagcgcctcgcaattacgctgggtaaggtcggcgaaaaaaattgcgctggaaacgctcgatgccgattgcgatgtcggtaagttaatcaatgcgccgttcgatctccgggaagggccgctgtgccgcttctatctgattgagctggctccgcagcgctataacctgatcattgtcgttcatcacatcctgatcgacggcctgtccggacaggagttctacagcgccgtttccgcctattacaatcgcggcacggcggtgacgccgccgcaggcggatgaaacggacatcagcacattgtaccggcgctatgaggcggatatcgcggcgttgaaacacgagttcggttccgcgtcattctggggcgacatgctggccgaatgcgccccgcgcgtggcgttgccttatctccccggcgcagcggccgaagcgcccggcgccggcgaagtgcgctttgcgttgccgttcgctgagtggcaagcgctgaaatccggcgtcaggtatgccaatcctttcctgatcttcaaaacgctgtgggcgctgctgatcgcccgacaatctgcgcaggaaacggtgcatatcggttatcccatcgcgccggagggtggcgaggcgctgttcttcggcgcacaggtcaacactgcggtgtttcccttgaccctcgccccaggagccacgttcaatcagctgtaccgcgcgacgctggcctacagcaaagcgctcaaggtggctggcaagctgcggcacagccaattaccggtttatgacatgctgagcctcagtccggtgcgtcagctgaacgtcaactttacccaggcttacctgaaagatgcgccgctggcgctcgaggggtgtcgcattggcgtcaatcaccggttcaatgtcgatctggccggttcggaactgctgctggagtatcagcccaccgagcaggcctttgagtttcgcctgcgctaccgccccgatctgttcgacgcgacccagatggcggagatggcggagcagtatctttggctattgcagcgcgcgttaaccgaaccggatgcgccgattgccgcttggccgcagctgacggcgcaacaggttttgcgctgccgcgacgcctgggagagcgggcctgcaacggccgatgcggaagcgacgctgctcgacggcttggcccgccaggcgcgccgtcacccggaacgcatcgccgtgaccgacgccaaaggatcgctcagctaccgccagttggcgcagcgcagcgatcgtctggcgctgcggctgcgggcggagtatcaacggctgcgcggcgtggccatgccgccggagacgctgatcccgctgtatctgcagcgcagcgtggaggcggtggtggcgatgctggccatcatgaaggcgggcggcgcctatgtgccgctggatcccgccgcgccggcgcagcggctggattatatcctgcaagaggtgaacagcccgatcgttctgaccgaaagcgcgttgcaggccgcggcgcagcgattggcgccgggcgatctttgcctgtcggcggatgaaccgctcgccgacgcggacgccgcgagcttgccgcgtgtggacgcccggcagttggcctacgtgatttacacctccggcaccagcgggcggccgaagggcacgctgtgcgaacaccggggtgcggccaatatggtgcgtggccatacgcagcgcttgttgcgtaatgagccggatgcgctcaactgcctgcagttcgcctcgctggcctttgacgcgcacgtctttgaggtgttcatggccctgggcaacggccaccggctgttcatcgcgagcgaagcgcagcgacgagatccggcgttgttgtgcgaacagatggcggcctggtgcatcgaggcctgcttcctgccgccggcgctgcttggcaccttccctgaattgccggcttcggtgcgctatctcgcgaccggcggcgaggcgagcgcgcaggaagcgctcgaccattacctggcccgcggcatgcaggtcgccaacatgtatggcccgaccgaagcttcggtcagcgccagcctgaatatttatcgccgcaacggcgcgcgcaatatcggccacgccatcgccaacatgcgttgctatgtggttgacgagcacgataacttgctgccgctgggggcggaaggcgagctgtgcctggccggtgtcggcctggcgcgcggatacctgaacctgccgacgttgacggaggccgcgttcaccgccaatccttttgaactgcgtgaaccgtaccggcgcctgtaccgcaccggcgacagagtgcggcgcttggccgacggcagtctggagtacctcggacggcacgatcagcaaatcaagatcaacggctatcgcatcgaattgggcgagatagaaatgcagctgcgcgcgctgcctggggtggccgaggcggtggtgagtctgcgtcccggcactacggaccagctggcggcctggtatgtgccgcaacctggcgcggagccggaggccggcgacatcttgcaacggctggcggcgcagctgccgcactacatgttgccctcggcgatgcgggcgctggcggcgctgccgctgacggtgagccgcaaggtcgattaccgggcattgccggaaccgttgccgatcgagccgcaaacggcgtttcgccggccgtgttcgccgctggagattcgcctgtcggcactgttcaatcggctgctggggggcgatgtcggcgtggatgacaacttcttccgcctcggcggcaactccatgatggcgatcaggctgtgccacgaagtgaataaactgccgggggcgaagatctcggtgctgacgttgaatcagcacccgacggtggccgcgctgagcgagcacatcgctgcccagcgtcaggcgccgccggacgagctgccgatcttccccggcgggctgcgggaggcgccgctgtcgcttcagcagtcgcggctgtggtttgttcagcaactgtcggtgaacgccacgcattatctgtcgccggtgctgctgcggctgtcgccggatatcgatgacgaacgttttgcggagtgcctgcaggcgatcgtcgagcgccaccagatcttgcgcagcctgattcgccagaatgatcggggcgaagccagccagtgggtcagcgacaccgcgttgccggtgcctgtgctaacgctgagcgccgatgaatttgacgccgcgctgacgcaagcctgcagccagccgatggatttgacgcgcgagctgccgctgcgcgccacgcgctaccgttaccgcgatgcggcggagcgggaaacgaccgtttgcctgttggtgttccatcacatcgtctttgacggctggtcgcttgaggtgctgctgcaggaattggacgcgcgctatcggggaacgtggcgtgaggcgacagagccggcgttgcaatacctcgactatgcgtgctggcaacaagcgccggaaaatgtgcagcgccgggcggaagaattggccttttggcggcaagcgctggcgggctgccagcaactctcgctgccgttggactttttgcggccggcggtcttcgacgagcgcggcgacaacagcgaagtgccgttgccggcggcgctggtgaaggcgctggatgcgctggcgcgcagagagggggtgacgctgcatgcggtgatgctggcggggttcatgttgctgctgtcccgctacagcggccagaacgatgtcatggtcggcacgccgttggccaaccgcagccgccctgaactggagaatctgatcgggttcttcgtcaatacgctgcctttgcgccggcagatcgacccgcgccatcgcgtcgtggagtttgtgcggcaggtcgcggccacgacgctgcaggcgcagcagcatcagacgctgtcgctggaagcgctggtggacgacctggcgctgccgcgcgatttttcgcgccatccgctgttccaggtcatgttcgcgttggagagcgagggcggcgcgcaggcgcgcccggactggctgtcggtggtcgatctgagcgcttatgaacgcaccgccaagtttgatcttacgctcacgctgacgccgcagggggagcagatgcgcgcgcgcttcaactttgcttcggcgctgttcagcaaagcgtcgatggatcggctggccggctactatctcgccgtgttgcagcagatggcgcaccacgacgactggccgctggaaaatatccgtctgcaaccgcagggccaggcgctgccggcgtcgcccgccttcggctatgcgtttgaacgcagcctgcaacaggacttcgtgcagcatgcgcggcgcaatccgcaggccgtggcggttgtcgacgagcagggcgaaatgacttacggcgagctgcacgcggcggcgctgacgcttgccactcagctgcgcgtgcaagggcggatgaccggtgacgccatcgccgtcattgccgacaaggggcgccggcaaccggtagccctgctggcggcgctgatgtgcggcaaggcgtttttgccgatggaggcggcatggccgccgcagcggcggctgaacgtgatggcgcaggccggcatcaatacgctgctcagcgatacgccctgggcctgcgacgagatcaatctgatcgaactgaatgccgcagggctggcggcgcagctgccgctgccggaacagcgcctgccggcgctggatgctgggcccgacagcctggcctatatcattttcacctcgggatcgaccggcacaccgaaaggcgtggcgatcgaacatcgcagcgcggtgaatatgctggaaggcgtgcggcggtatttcggcctcaacgagcgggatcgcagcctggccctcagcgcgttgagcttcgatctggcgatcttcgacattttcagcccgttgagcgccggcggcgcggtcgtaatgccggccgagcgggatcggaccaatccgcaggcctggtatcagctgatgatgacccatcgggtgacgcaatggctgagcgcaccggcgctgatggagctgttgctggattatgtgaacggggcggggttgacggccgggccggcaccggcgctgcgggcggtgatggtggggggcgactggatcgccacctcactgccggaacgctgcctggcctgggcgccgcacggccgtttttgcagcgccggcggcgctacggaggcggcgatcttcaccatgctgtacgaggtgccgcgcggtcagaaaattcggtcggtcagcattccttacggcaaaccgttgccgcaccagcgttgctatatcctggacgccgggcggcggcccgccgcgccgggtgtccgaggcgaaatctatctggcgggggaaggcctggcgcgcgggtattacggcgatccgcaacgcaccgccgagagtttcttctggcatgacgagctgcaggagcgggtgtatcgcaccggcgatgcgggccgatggctggaggatggcaacgtggagtttatggggcgcctcgatcagcagatcaaactgaacggctatcgcatcgaactgggggagatagaacatgccgcgctcgcctatccgggcgtgaccgcctgttgctgcgtgctcgtcacgcaaccgcagccctgcctggccgcgtattacgttgccgatgaggcgatcgcccctcaggcgctggctcagcatttgagccgccaactgcctccttacatggtgccgcaggcgctgatgcagctggcgcagctgccgctgaccgaaaacggcaagatagcgcgacaggcgttgccgcagccggaaagggcggcgcgtgagttcgtcgcggcgcagagcgaatgggagaacgcttgtctggcggtgtggcgcgatctgctgcagcggcaggatatcggcgtggaggacaatttcttctcgctggggggcaactctcttctggctatccaggcctgctatcagatcggccggcggctggcgcgcgaggtcacgctgagcgagctggggcgcttcccgacgatccgctcgctgtgccgcgcgttgccgcaacaggagcagggcgccgcgccggtgtcgatcccgccgctgcggcagcgcgagtatccgctctcttcttcacagctgcagctgtggtttatcgagaatttgaacggcggcggcaatctctaccacgtgccgatgctgttccgtctcggcgacggggtgtgcctggcggcttacgagcgcagtttgcaggcggtggtcgcccggcatcaggtcttgcacagcctgattgtccagatgccatcccaaagcgccgtcgcccgtgcctgtgaactgacgctttcgctggagcgcgtgacgctggcggcggcgcactggccggacaggctgcggcaggatatcgaccggccgtttgcgctgggggtggagttgccgatccgggcagccgtttaccgggtggcgcagccggatggcgggtgggtgacttacagcctgattctggtgcatcacctggcgtttgacggctggtcgcagccggtgctgttgcaggagctggacgtgctgtatcaggcgcagcggcaagggcaagagtccgggctggcggcgttgccgttgcactatggcgactatgccgtctggcagcggcgctggctggaatccgctcaggcggatgaggcgaaggcatattggcgacaagcgctggatggatggcaggcgctggaaatgccgctcgatttcgtgcggccggcccgcttcgatcatcgcggtgccaaccacgtcatcgcgctgccggagaccctgacgatgcaggcgacgcagttcgcccggcgccagggcgtcacgccgtttgcgctgtatctcgcggcctttaacctgctgctcggttacttcagcggccagcaagatattctggtcggcacgccggtcgccaaccggccggtggcggagacccgctcggcgatcgggttcttcgtcaacacgctgccgctgcgttcgcagatcgacgatgcggcgtcgctgaacgactatgtaaaccgggtctttgacggcgtgctgcaggcgcaacggcatcagaatttgccgttggatcagctgatcgagctgctgcaggtgccgcgcgatctgtcgcgccatccgctgttccaggcgctgttcgcgctggaggaagtgggggatgcgccggcctggctggcgccacaggatctgctggcgcactaccaggcggccaaattcgatttgacgctgagcatacagccggcgccgcagggcggcagggcgatcttcaactatgccaccgcattgttctcaccggccacgctggcgctgttgggcgagtattatctgaccatcctcacgcagatcgtcaatcacggggagcagcgcgtcagccagttggcgctggtctcggagagtgaaatggcgcggcaacgcgccttccatcaatcctgtccgtcggcctacgattttgagcgtgccatccatcatgatttcatccgtcaggccgagcgccatccgcaacggctggcgatcgtcgatgaatggggcgaactgagctacggtgagctgtatcggcgcgcgctgacgctgtcgctgcagctgcgtcagcacgcggacatgcgcgccgataccatcgcggtgatggtggacaaagggcgggcgcaaatcattgcggtgctggcgattctgatggccggcaaggcctatttgccgctggacggcgcctggccggaacgccgccgcctggatatcgtcgcgcagtcgcagacccgaattatcctcagcagccgggaatgggcgaccagcggcgaggccaggctgttgaccatcgatccgcagggggccgtcacggcgttaccgccggcggtgccgggagagcctgtcttgccggcgccttccgcgctggcctatgtgattttcacctccggctctaccggcgcgccgaaaggggtggcgatagaacatcgcggcgcggtgaacagcatcatcgataccttgcgccagctggaactcggcgcggacgatcgcgggttggcgctcagcgcgctgagtttcgacatttcggtgttcgatattttcggcctgctgtcggtgggcggcgctatcgtgatgccgtccgaaaccgaacgctatcagcctgaggcctggcatcggctgttgatgactcagggcgtgaccttctggaactccgcgccttcggtgatgacgctgctggtggagcagttggaatccgccgcgtcgcaggcgcagtggccgcagctgcgcaacgtggtgctggtgggcgaggtgatctcccgccaactgccggcacgcattcgtcaatggcggccggggtgccgagtcgtcagcgccgggggcgcgaccgagagctctatttggtcgatcctgtacgatatcccggagacgccgatcttggcgcccagcgtgccttacggtcaggcgatggcccatcagcgtttttacgtgctggatcgtcatctgcgcgtgctgccgccttgcttgccgggggagcaatacatcggtgggatcggcgtggcgcgcggctattaccgcaatccgtcgctgaccgaagagaaattcatctaccatccggagctgggtgagcggctttatcgcaccggcgatgccggccgctatttgccggacggcaacctggagttcctcggccgtatggattttcaggtgaaaatcaacggctaccgcgttgagctgggcgaggtcgagcaatgtgcgctggcgttcggcgcgatcaaatcctgctgcgccgtcgtgctgtcggaggcgcatcggcagcgcctggcgctgtattacgtcagcgaggcgccgctggatgaatcggcgctgttggcctttatgagcgggcaattgccgttgtacatgctgcctgcggcgctgatgcggctggaagcgttgccgcacaactccagcggcaagctggatcgcaaggcgttgcctacgcctgcggcgagcgaaccgcaggtttatgtcgctcccgcgaacgagctggaacagcagctgtgtgcgctgtggcaggcggcgctgcagtgtgggcaggtcggcatgacggacgatttcttcctgctgggcggcacctcgatcaaggccatttccctgtgtgtcggcatgggcgaattgatggccgcgccggtgccggtggtgcagctgttgcagagtcgcacgctgaaaaacctgttggccgccaacgaacgccgcctggtcttgccgcttaaccgctgggcagagggcgcgcccgtcgtatggatgatccatccggcgctggtaggggcggaggcattccacgctttcgcccagccgctgcaggggcgattcaactgctatggcgtcgataaccataacctttaccatcaacccgccatcgactcgctcggcgatctggccgaacggtatctgaacgagatgatcgccgccggtctgctgcaaggtgccgggccggtgcgcattctcggttggtcgctggggggcattatcgcgttggagattgccgcccgcctggaagcgcgtggttgtcgtaacgtgcaactgtatctgctggacagcttctaccggcaggctacggcggagttgcccttggatcagctgctgccggtgctgggcatcgaaggcgaggcggcgacacgcgccatggccgcggggcaggcggagcggcggctgtcagaagggcggctgagccgcaggctgcagaccaccaaggtgacgctgtttaaggcgacggagaggaacccgcagttgccggaggcggttacggtgccgctgctggcggtggcggataatgggctaggcgcggtctgtgagcggctgagggtcatcccgctggcttgtcatcaccataacatcctgctgtgtgaggaggcgatcggccaagcgctcaacgatgacgtttga

SEQ ID NO: 423270 - DNA, 990 bp, Serratia marcescens
atgcaaacacgcaaattggggcgcgaagggctggaagtctcggcgttggggttgggctgcatggggctgagttttggctatggcccggccaccgacaaacgacaggcgatcgagctgatccgtgccgcggtcgacgaaggcgtgacgttcttcgataccgccgagatttatggtcctttcacgaacgaggaattgttgggcgaagcgctggcgccggtgcgcgatcgggtcgttatcgccaccaagtttggtttcgatctgtcgcagccggcggggcaacaggtgttgaacagccgtccggagcatattcgccgggcggtggagggttcgctgaagcgcctgcgggtagaggccatcgatctgctgtatcaacatcgcgtcgatcccgaggtgcctatcgaggaggtggccggggcggtgcagcaactgattcgcgaagggaaagtgaagtacttcggcctgtcggaagccggagcgcaaaccattcggcgtgcccacgcagtgcagccggtcacggcgctgcaaagcgaatattcgctgtggtggcgcgagccggagcgtgaaatcttgccgacgctggcggaactgggcatcggtctggtgccgttcagcccgctcggcaagggctttctcaccggcgccatcaccgaggacaccacctttgacagcggcgattttcgcaaccaggtgccacgcttcagcgccgaggcgcgccgagccaaccaggcgctggtggatgtgctggggcagatagcggagcgcaagggcgcgacgccggcgcagatcgctctggcctggctgctggcgcagcagccgtggatcgtgccgatcccgggaaccaccaagcgccatcgtctgcaagaaaacctcgcggcagcggcggtcgcgttggcggcggacgagctgggcgagattgagcgcgcgctttccgctatcgacgtgatcggcgatcgctacccggcgcatctgcagaaaaacgtcgggcgttaa

SEQ ID NO: 423271 - DNA, 894 bp, Serratia marcescens
atgttgaaagaaaactttaacgatctgatcgctttcctgatggtggccagggagcgcagcttcaccaaagcggcggcgcagcttggggtttcccaatcggcgctcagccacgctattcgcgggctggaagaacgcctggcgctgcgcttgctcacccgcaccacccgcagcgtcgcccccaccgaggccggtgaacggctgctcaacagcatcggcccgcgctttgcggagattgaaagcgagctgaacgcgctgggtgaaatgcgcgatcggcccgccggcaacatccgcatcaccgccggcgaacacgcggtggatgcggtgctgtggccggtgttgcgcacttttctcgtcgattacccggatatcaacgtggaaatcaccgtcgacaacagcctgaccgacatcgtcgccgggcgattcgacgccggcattcggctgggggaacaggtggcgaaggatatggtggcggtgcgcgtcgggccggacatgcgcatggtgcccgtcgcctcccccgcctatttcgcccgttacggccgccccgccacgccgcaagcgctgcaaaaccatcgctgcatcaacatgcgccttcccaccctcggcgggctgtacgcctgggaatttgcccgcgatggccgggagatcaaagtgcgggtggaggggcaactgaccttcaacagcctgcgccagcggatcgacgccgcgcagctcggcctcggcatcgcctttgtgccggaagataccgtcgccgagccgctggccgacggccggctgcagatggcgctggacgactggtgcccgccgtttcccggctattacctctattatccgagccgcaggcagcacaccaccgcctttgcgctgctgattgaggcgctgcggcgcggggcttaa

SEQ ID NO: 423272 - DNA, 396 bp, Serratia marcescens
atgaaaatacaacgcagcggttcgatcccatcacagcgcggttcagcggattattttaccgggcaggtacgcatcgacgcgccgttcgccggtgacgcgccggccagggtgggcggcgcgaccgtcaccttcgaacccggcgcccgcacggcctggcatacgcatccgctcggccagacgctgatcgtgactcaggggcgcggttggatccagatgtggggcgaggccacgcaggaaatgcaccccggcgatatcgtctggatcccggcaggcgtcaaacactggcacggcgcgacgccggacaccgccatgacccatatcgccatcgccgaagcggtggacggcagcccggtgacctggctggagccggtcaacgaggcggagtaccgccaataa

SEQ ID NO: 423273 - DNA, 240 bp, Serratia marcescens
atgcaggtgagccgcgccggattgacgctgcacctgagcgaacaccatggcgacagcacgcccggcgccgcccttttcatcccggtgcacgatatcgacgcgctgcaccgggagctcacggccaaaaactaccgctatgcccggccgggagtggaggttgtcgactggggcaaggagctgaatctcaccgatccgttcggcaaccgcctgcggttttgcgagcagagccatgaggcctga

SEQ ID NO: 423274 - DNA, 132 bp, Serratia marcescens
atgaccaccttctcccccgccattccgatcctgcgcatcttttcggtcgacaaggccaaagagttttatctggattttctcggtttcacgctggcgtgggagcatcgtttcagcgaggatctgccgctgtaa

SEQ ID NO: 423275 - DNA, 1476 bp, Serratia marcescens
atgagcaccagcatcagcgctaccctcaaggatcccacgctgttccgcgaggccaattacatcgacgggcaatggttgccggcccaagcaggccgttcgatcgccattcataatcccgccaacggcgagctggtcggccacgtgccggccttcggcgccgaagaaaccgcgcgcgccatcgccgccgccaaaaaagcgctgcccgcctggcgtgcgctgaccgccaaagagcgtgccggcaagctgcggcggctgtttgaactgatgatggaaaatcaggacgatctggcacgcatcatgacggcggaacagggcaaaccgctggctgaaagccgcggtgagatcgcctatgccgcctcctttatcgaatggttcgccgaggaaggcaagcgggtctacggcgacaccattccgcagccgcaggccggtcgccgcattatcgtgcagaaagagccgatcggcgtgttcgccgccatcaccccgtggaacttcccggcggcgatgatcacccgcaaagccggccccggctgggccgccggctgtaccggggtgatccgccccgccagccagacgccgttctcggcgctggcgatcgccgtgctggcggagcgcgccgggctgcccgccggggtgtgcaacgtgatcaccggccccagcaagggcatcggcggcgaactcaccgccaacccggatgtgcgtaaactctccttcaccggcagcaccgaagtcggcgcgcagctgctggcccagtgcgcgcccaccatcaagaaaaccagcatggagctgggcggcaacgcgccgtttatcgtgttcgacgacgccgatctggacgccgccgtggccggcgctgtcgcctcgaaataccgcaacgccggccagacctgcgtctgcaccaatcgttttctggtgcaggacggcgtatacgacgccttcaccgccaaactgaaagccgccgtcgccaagctgaaagtcggcaacgggctggatgagggcgtcaccatcggcccgctgattaacccggacgcagtggagaaagtgcgcgagcatatcgccgacgccgtcgaacacggcgcatcggtgctgctgggcggcaagcctgacgcgctgggcggcaatttcttcaccccgaccatcctgaccgacgtgccgcgcacggcgaaaatcttccgcgaggagacattcggcccggtggcgcccctgatccgcttcagccacgaggccgacgccgtcgaactggccaacgacacgccgttcggcctggccgcttacttctacagccgcgacatcggccgggtgatgcgcgtggccgaagcgctggagtacggcatcgtcggcatcaacgaagggctgatctccaccgaggtggcgccgttcggcggcatgaagcactcaggtttggggcgtgaaggctcaaaatacggcatcgaagactatctcgaaatcaaatacctgtgccttggcggtttgggcgcctga

SEQ ID NO: 423276 - DNA, 216 bp, Serratia marcescens
atgatgaaatcagtggacagacatctcgcggcctacggcagcgaaatggattttttggcgtcgagcatcgccctgatggaatggcaagggcggcagattgacgccgggcaggtggccggcaatatgtcggaacagcaaagccgcctgttctttgcgcggttgcgttattttcgtcagctttatcaggccgcatcggcggccgaacacagcctgtaa

SEQ ID NO: 423277 - DNA, 915 bp, Serratia marcescens
atgatctcgcagcggttccaccccgatgagctgcgcgcgcaaacgctggccggtttcgatcgcgtgggcggcggcatctaccccgcgatgccggatcagcaccgcgcgtttttcgccgcactgccctacctgttcgtcgccacgctggacgaacagggctggcccatcgccaccctgttcagcggcccgcccgggtttttacgcacgccggacgacacgcacctgcgcatcagcgcgccgcgccgtagcgacgatcccgcccaggcgctgttgctgcccggcaaaccggtcggcgcgctcgggctcgacttcagcaaccggcggcgcaaccgcgccaacggcaccgtcggccgcaccgacaaaaaccgggtggagatcgtcgttcaccaaagcttcggcaactgcccgcagtacattcagcgccgcgaactctacccggtggagagccgaccacagccggttgagcatttagcttcgctcgatgcggcggcgcaggcgctgatccgcaccgcggacaccagcttcgtcgccagcggcgcgcacctggaactggcgcagggcggcgtcgatatttcccatcgcggcgggcggcccggctttatccatctggaaggcgacacgctgtggatgccggactttcgcggcaaccgctatatgaatacgttgggcaacctgctggccgaaccgcgggcggcgctgctgttcatcgattttgagcgtggcgacgtgctgcatctgcagggaaaaacgcagatcctctggcaggcggaaggacatcccggcgttgaaggggcggaacgctattggcggtttgacgttcaccgcgcctggcgttttgcggcggcgctgccgtggcggggacgcgatctggagtattcgccggcgacgctggcgaccggggtgtggcgccgctga

SEQ ID NO: 423278 - DNA, 618 bp, Serratia marcescens
atgtccaccatcaccctctacggcaccccgctttccggccacgttcaccgcgtggcgttgctgctgcgcatgctggcgctgccctatgaatgggtagaagcctcggcggaagtacgccagagcgcggcctttcgccggctcaacccgttcggccagatcccggtcttgcaggacggcgatctgacgctggccgacagcaacgccattctggtctatctggtgaagcgctatgcgccgaacagccactggctgccggaacagccggcggcggcggcgcgagtgcaggcctggctttccaaagccgccggtgaagtgcgctacggcccggcctcctgccgattgatcgcccagttcgcggtgccggaggattatcaggcggcgcgggcaatcagcgatcgttttctgccgcagatggagcagcacctgagcgagcgcgactatctggccggcgaacaggcgaccatcgccgatctggcctgctacagctatgtggcggtcgcggccgaaggcggcatttcgctggcgccttaccccgccatacgccgctgggtggcgagcatcgcggcgcttcccggcttcttcgccatgccggctctgccggaaccggcggcgagctga

SEQ ID NO: 423279 - DNA, 912 bp, Serratia marcescens
atggatcggttagacgagttggccatcttcgtggcggtggtgcagcagggcagtctggcggcggccgggcgcaaactgcggcgctcggcgccagcgatcacccgggcgatcgccgcgctggaacagcggttcggcacccgactggtggaacgcaccacccggcggctggcgcctaccgaggcgggcgtgcggctgctggagcgcgcgcaacagctgctgcaggattatcaggcggtggtgcaggataccgctgaagcgcagctgagcggcttgctgcgcgtcacctcgccggtgcagttcggccgccgctacgtggcgccggtggtgatggcgtttctcgatgattacccacagatgcagatcgaaatggtgttgaacgatcgcaatctcgatctgattgacgaaggattggatatcgcggtgcgcatcggtcatctgcaggactcttcccgcgtggcgcggcggctggggcaggtcagccgggtgacggtcgccagcccggcttacctggcgcgctgcggcgagccgcgctcgccggcgcaactggcggagcacgccaccatcgttggcacccagcggccgtcgctgcgcgaatggcgcttcggcccgcaggaaaacggcgagcgcgtgcgcttggctccccggctgttgctcaacgacgtggaggcgcagctgctggcggtgcgcgccggcaagggcatcgcccggctgctctcgtatcaggtggcggacgatctggccgccggcacgctggtgcggctgctggcggaccatgaaccgttgccgatgccggtacagctggtggcgcagcaggcgcagcgcatgccgctgaaggtgcgcgccttttgggattatgcgtttgaacggctcagcgcattgccgcaaattcagccggacgggcggggaaaataa

SEQ ID NO: 423280 - DNA, 798 bp, Serratia marcescens
atgaaacaacttgcggggagctatgacaacggcgccacggtggataatgaatacgctattttgacttcatttcaaactcgcagcgcggctatttatcatcaggcgaagcatgaaaagaatattgcgtatggcgaaagcgaacgcgagacgattgattggctttattctgcaaagcagcaccagggcacgttaatttttattcacggcggctattggcaatgctgcgataaggcagatttcgcctttatcgccgccgggccgttggcgttgggttttgacgtggtgctggtggaatatgcgctggcgccggcggttaatcttgacgccatttgtcgccaggtgggggcggcgcttgatgccattcagcgtcgtctgccgccgcactatgcccatccggtgcatttgtgcggccattccgccggcgggcatctggcggcgttttggcagcggcatgcgttggtggatgcggtctttcccgtcagcggcctgttcgaactggcgccgctgcaagagagctatgtcaaccgggcgctgcagctgaccgcgcggcagattgaaacgctcagcccggcgcgccggctgccggcgcgcagtaagccgctcacgttgtattacggcgctgatgagctgccggaactgatcggccagtcgcagcactatcacgcggcgctgcgccaaggcgggctaccggccgatctggtcgcggtgcccggcgccaatcatttcaccattctggatgcgttgttcgccgccgacggcgcgctgcttcgccaacttgaccaccacgggaaccactga

SEQ ID NO: 423281 - DNA, 372 bp, Serratia marcescens
atgcgcgaaatcgtagcgaccgggctgccggagatcggccagcctttttcctgggccacccggggcggcggcatgctgtttaccgcccacggcccggtgcgggcagacggcagcatcgagaccggcgcgcctgagcaacagattgcgttaaccttcgacaacctggcccagacgctgaaggcggcaggcagccacagcgataaggtgctgcaggtaatggtttatctcaccgacgttaacgacgttaaattgctcgatgatatttaccggaaatactttaattatccttatcccaatcgctccacggttattgtcgataaattggtggtgccgggaatgaaaatagaaattaccgtcagcgccatcgcctga

SEQ ID NO: 423282 - DNA, 1188 bp, Serratia marcescens
atgtttaaacagattgcaccttctgcagccgatcctattatgtcgctgatggaagcctatttgcaggaccccaatccgaaaaaagtgaatttaggcattgggctctattacgaccggcaggggaatattccgctgatgcaggcggtggaggccgccgagcagcggttgctggcgctgcgtcgcccgcacggctatccgccgatcgaaggttcgccgcagttcgctcgccaggtgcaggcgctgctgttcggcgagcaacaggcggccgagatcgccacggtgcagaccgtcggcggctccggtgcgctaaagttggcggcggattttttgcgccactttctggcgcgcggtgacatttgggtatccgctcccacctgggccaatcactgggcgatatttgaaggagccgggctgcaggtgaatacctatccctactttgacgaagcggcgggaggcctgcgtttcgccgccatgctcgacgcgctggacagcctgccgcccggcagcgtagtcctgttacatccttgctgccataacccgaccggcaccgatctgacggcggagcagtggcgcgccacgctcgccgtgctgcagcggcgtaagctgctgccgctgttcgatatcgcctatcagggcttcggcgacgggctggaggaggattgctttgcgttgcgcgaagcgctgaaaaccgatctgccgtttttggtctgcaactcgttttccaaaaacgtggcgctgtacggccagcggctgggcgcgctgtcggtgcgctgcgccgatgcggaaaacgccgccaacgtcaaaggtgcgttaaaaacgctgatccgccgcagctactcctgcccgccgacgcacggtagccagatcgtggagaccctgctcggcgacgccgaactcggtgagctttggcgcaatgagctggcggaaatgcgcgtgcgcatcaagcagatgcgtgagcagctggccgccggcctggcgcggggcggctcttcgctggatcaccagcgtatacgcgatcagcgcggcatgttcagctataccggcctgaacgaagctcagctgcagaccctgcggcagcgctacgccatctatctggtttcgcccggccgcatgtgcctgccggggctcaaccccggcaatattgactacgtgaccgccgccattctcgacgtcacccgtaccgtctaa

SEQ ID NO: 423283 - DNA, 1398 bp, Serratia marcescens
atgccacagatgaatgattttgagcatatcgcccgccgtcagggcgggttgaacaagcatcttaccgccgggcagatgtcgatgctggcgatcggcggcgccatcggcaccgggctgtttctcggcagtgcctacgccattcagatggcggggccggcggtattgctgagctacctgatcggcggcgttattgcgctgctgttgatgggcagcctggcggaaatgacctccgaacacccgacgcccggctcgttcggcgactacgccgaattctatctcggcccgctgttcggttttctggtgcgttattcctactggtcttgcgtggtgctggcggtgggcaccgaagttaccgccatcggcatgtacatgcagttctggttcccggcgacgccgacctggccgtgggtgctgctgttctcggcggcggtgatcgtcgtcaatgtgatcggcgtgaagtcgttcggccaggtggaatacgcgctgtccaccgtcaaagtgacggcgatcgtggcgttcattctgatcggcatcggcatgctggcgttctcgggcaacccggcttacggcctgcgcaatctgaccgccggcggcttcatgccgtttggcgtcaagggcatgtggttcgcaacgatcgtgtctatcttcagctacctgagcattgaaatgatcgcggtggccgccggcgaggcgaaaaatccggtgattgcggtgaaggcggcgttcaagggcaccctcgtgcggctgttcatcttctacatgctgtcgatcgctctgatgctggccatcgtgccctggcgccagtccggcaccggtgaaagcccgttcctgatggcgatgaacgtcatccatctgcccgccgccgccggtattttcaactttatcgtgctggtggcggcgctgtcggcgatgaacagccagctgtatatcaccacccgcatgatgttctcgctgtcgcgcgccgggcaggcgccggcggcattggggcgcgtcagccggcgcggcattccggtcaatgcgctggcgatgtcgtgcatcggcatcgtggtgtctatcgtgctgagcctggtggcaccggaaacctcgttcgccgccatgatgtctatctcggtgtatggcgcctgctttacctggctgatgattttcgtcacccatctgttcttccgccgccggcaccggcagactcacctgaaattccgcatgtgggggttcccctataccaccttgctgggcgccgggctgatggcggcgctgatgatctcgaccgcgtttaccgaattcttccgtatgacgctgtggttcggtattccgttcaccttgctgctggtggcggcctaccgcttccagagccgccgcgcggctgcgccgtcgccgttcaaggcgccggaggtggagtaa

SEQ ID NO: 423284 - DNA, 597 bp, Serratia marcescens
atgcctgtgtatcagattgacggcctgacgccggtcgttgaccccagcagttacgtgcacccgacggcggtgctgatcggcgacgtgatcgtcggcaaacacgtgtacatcggcccgaacgccagcctgcgcggcgattttggccgcctggtgatctgcgacggcgccaacattcaggacaactgcgtgatgcacggcttcccgcagcaggacacggtggtggaagaagacggccatatcgggcatggcgccatcctgcacggctgccgtattcgccgcaatgcgatggtgggcatgaatgcggtggtgatggacggtgcggagatcggcgagaacaccatcgtcggcgcgatggcgttcgtcaaagccgcggcggtgatcgaagccaacaagctggtggtcggcagcccggcgcgcgtgttgcgcgatctgaccgagcaagaactggcctggaagatcgccggcacccgcgaatatcaggatctggttcagcgctgcaaatcctcgctgcgcgaagtggcgccgctgaccgaaatcgaaccgggccgccagcgcctgagcttcggcgaccacctgatcccgaaaagccagctgtaa

SEQ ID NO: 423285 - DNA, 939 bp, Serratia marcescens
atggaacataaactggatgagttcattcgccatgccgtcgacgcgcagccgatcagcggcacctcgctgatcatttcgctgtacggcgacgcgctcagccaccgcggcggcgaagtgtggctcggcagcctgagcgcgctgctggaggccttcggcttcggcgatcgcttcgtgcgcacctcggtgttccgcctgcagaaagagggttggctggcggtggagaaaataggccgccgcagcttctaccgcgtgaccgagcaggggatgcgccagttccgccacgccgaatcgaaaatctatctgcgcgagcagcccgcctgggacggcaagtgggagctgttgctgctggaaagcgccgaaaaaaacgcgcgcgcgcggctgaaaaaagagctgggctggctcgggttcgggcaaatcgccaacaacctgatggccgcccccacccatgcgcaaaccgacgtgacggcgctgctcggcgagctgaacgccagcgagcaggtgatttatttccgcgccgattatccctacaaccgctccgagcaaaccctgcagaaattggtggccgactgctggtcgctgagcgaggtggcggccggctatcacgagtttatcgtctccttccggccgctgatggcgctgctgcgcgaagtcgatccggcggcgctgacgccgctgcgctgtttccagattaagctattattgattcacttcttccgtcgcgtggtgttgaaagatccgctgctgccggacgcgctgctgcccgcgcagtgggagggccagatcgcccgcaacctgtgcatcaatctttatcagcaggtcgatcgcgccgcaacggagtacgtcagcgcgctggcggaaaccaccatcggcgccctgcccgcgccggccgccggctactatcggcgcttcggcggcctgccgcgcgaccctacatattaa

SEQ ID NO: 423286 - DNA, 1308 bp, Serratia marcescens
atgacaataaatccacagcccctcgaaacgatcgaattcgcctcgcgcgatgagattgaagcgttgcagttggcgcgtctgaagtggacgctgcaccacgcctacgacaatgtgccgatgtacaaacgcaagttcgaccaggccggcgtgcatcccgacgatctcaaacagctgagcgatctggcgcgcttcccttacaccaccaagcaggatctgcgcgacaactacccgttcgacaccttcgcggtgccgatggaacaggtggtgcgcatccacgcctcctcgggcaccaccggccgcccgacggtggtgggttacacccagcgcgacatcgataactgggccgatatcgtcgcccgctgtctgcgcgccggcggcgccaccgccaaagacaaggtgcacgtcgcctacggttacggcctgttcaccggcggcctgggcgcgcactacggcgcggagcggctcggcgcgacggtgatcccgatgtccggcggccagacggaacgccaggcgcagctgatcctcgatttcaaacccgacatcatcatggtgacaccgtcctattgcctgacgctgatcgacgagctggaacgcaagatgggcggcgacgcgcgcggctgctcgctgcggctcggcgtgttcggcgccgaaccctggaccgaagccctgcgccacgaaatcgaaacccgcatgggcatcaaggcgctggatatttacggcctgtcggaagtgatggggccgggcgtggcaatggagtgtctggagagcggcggcggcccgaccatttgggaagaccacttcctgccggagatcatctgcccggaaaccggcatcgccctgccggacggcgagcacggcgaactggtgttcaccaccctgaccaaagaggcgctgccggtgatccgctaccgcacccgcgatctcacccggctgctgccgggcgacgcgcgccagatgcgccgcatgggcaaaatcaccggccgctccgacgacatgctgatcatccgcggcgtcaacgtcttcccgtcgcaggtggaagagcagatcatgcagttcgagcagctgtcgccgcactaccagctgcaggtcagccgcagcgggcacctggacacgctggcggtgcgcgtcgaactgaaagaatcggcgctcagcctcagccatcaacagcgttgcgacatctgccaccagctgcgccaccacatcaaatcgatcgtgggcgtcagcaccgacgtcagcatcgccaactgcggcgatattccgcgctcggaaggcaaagcgcagcgcgtggtcgatttgcggccgcgctga

SEQ ID NO: 423287 - DNA, 1206 bp, Serratia marcescens
atgaatcaggcatttatctgcgacggcgtgcgcaccccgatcggccgctatggcggcgcgctggcccaggtgcgcgccgacgacctcgccgccctgccgctacgcgtgctgttggaacgccatctgcaggtagattgggcgcagctggacgacgtgatcctcggctgcgccaaccaggccggggaagacaaccgcaacctggcgcgtatggcgctgctgctggccggattgccggtcggcgtttccggcaccacggtaaaccgcctgtgcggttcaggcctggatgcgctggcgatggcggcgcgcagcatcaaggccggcgacgccgggctgctgctggcgggcggcgcggaatcgatgacccgtgcgccgctggtgatgggcaaggccgacagcgccttcagccgccaggcgcagctgtacgacaccaccctcggctggcgcttcgtcaatccgcggatgcaggccgagttcggcaccgattcgatgccggagaccgccgaaaacgtcgcggcgcagttcaacatcagccgtgccgatcaggacgcctttgcgctgcgcagccagcagcgcgccgcccgggcgcaggcgctgggccacctggcgcaggaaatagcccccgtcagcctcagcggcaaaaaaggtgcggtgacgctgtttagccaggatgaacacccgcgccccgacaccaccttcgagcagctgcaggcgctgaaaaccccgttccgtcagcccggcagcgtcaccgccggcaacgcctcgggcctgaacgacggtgcggcggcgctgatcgtcgcctccgaagcgatggcggcgcgccaggggctgacgccgcgcgcgcgcatcgttgccaccgccacctgcggcgtggagccgcggctgatgggcatcggcccgctgcccgccacccgcaaggtgctggaaatcgccgggctgagcctggcgcagatggacgttatcgaactgaacgaagcgttcgccgcccaggcgctggcggtgatgcgccagcttggcctgccggacgatgccccgcaggtcaaccccaacggcggcgcgatcgctctgggacatccgctgggcatgagcggcgcgcgcctggcgctgtccgccctgtttgaactggaacggcgagccggccgctacgcgctttgcaccatgtgcatcggcgtcggccagggcatcgccatgatcattgagcgtgtctga

SEQ ID NO: 423288 - DNA, 441 bp, Serratia marcescens
atgaacgccaatacgccgcgcgcgctggctcagcgctgcgccgaacagatgttccagcaagatacctgcgctcaggcgatgggaatgcacatcgacgccgtcgacgccggatacgctcaggtcagcatgaccgtcggcccgcagatgctcaacggccaccagacctgccacggcggccagctgttcagcctggcggacaccgccttcgcctacgcctgcaacagccaggggttggcggcggtggcctccggctgcagcatcgacttcgtccgcccggcgctggccggcgaccgcctcaccgccagcgcggcggtgcgccatcagggcaaagccaccgggctgtatgacgtcgagatcgttaaccaacggggcaaaaccgtcgcctggttccgcggccgcgcgcaccgcctcggccacagcattttaggagatcaggcatga

SEQ ID NO: 423289 - DNA, 1530 bp, Serratia marcescens
atgaacgcgccccttcttaacggccaggtggcggtgatcggcgccggtaccatgggcatcggcatcgcccaggtggccgccgccgccggccacccggtgcggctgttcgatatcgcgcccgccgccgcccagcgcgcgatcgacgatctcgctcgccgcctgcgccagcgggtagacggcggcaaggccgacgccgcgcccaccgaagcgctgctggcgcgcctcgaacgcgccgactcgctcgagcagctggccgactgcacgctggtgattgaagcggtggcggaaaatttggcgattaagcagagcctgttccgcgatctggaggcgatctgctcgcccacgacactgttcgtaagcaatacctcttcgctgtcgatcaccgccatcgccggcgcactgcaacacccgcagcgcatggccgggctgcacttcttcaacccagcgccgctgatgaaactggtggagatcgtcagcggtctggagaccggtaccgataccctcgccgcgctgcaggccctggcgcagcgctggggtaagcaaagcgtcgtgtgccgctcgacgcccggatttatcgtcaaccgcgtggcgcggccgttctatgccgaaaccctgcgcgcgctggaggaacgggtggccgacgccgccacgctggacgcggtattgcgcgacgccggcggtttcgccatgggcccgctgcagttgaccgatctgatcggccaggacgtcaattacgccgtgaccgaatcggtgtatcaggccttctatcaggatccgcgcttcacgccctcactggtgcaacaggagctggtggcggccgggcgcctcggccgcaagtccggccgcggtttctaccgctacgacgcaccgcgatccgccgccgcgatcgcctttgcgcctccggcgcaggccgcattgccgcaacgcgttacgctgcacggcgactggtcttcgctggccgatttggcggaactgttgatcgaaaatgcgggggcgatcaaacaacccggccagaccagcccacacgtcacgatcgacgacgttacactgatgttaaccaatggtaaaaccgccggccagctggccgacgaacgtggaacgcccgtggtgctgttcgatctctgtgccgactatgcgcacgcctccgccatcgccatcagctgcgcggcgcaaaacgatgcgcaacacaatgccaaagcgattcgcctgttgcagtccctcgacaagcaggtcattcaactgccggattaccccggcctgctgacgatgcgcaccctggccatgctggccaacgaagcgctcgacgtggtgaacaaaggcgtcgccagcgccgaagataccgatctggcgatgctgcgcggcgtcaactatccgcgcggcccgctggcctggggcgccgcgctcggctggtgccacattctggcgacgctggaaaacctgcaacgctattacggcgaagcgcgctatcgcccaatgccgctgctgcgccgctacgcttcccccgcctctttcccaggagccgaacgatga

SEQ ID NO: 423290 - DNA, 792 bp, Serratia marcescens
atggataacgcattgattctcagccatctcgacgccggcgtgttgacgctgaccctcaaccggccggatcggctcaatagctttaacgacgagatgcatcgccagctgagcgaagcgctgacgcaagccgagcgcgacgacagcgtgcgctgcctgctgatcgccggcgccgggcgcggtttctgcgccgggcaggatctcaacgatcgcaacgtcagcgccgatcaacaggcgccggatctcggcctgtcggtcgaacgtttctacaaccccctgatccgtcgcctgaccgccctgccgaagccggtggtgtgcgcggtcaacggcgtggcggccggcgccggcgccgcgctggccctggcgtgcgatatcgtcatcgccgccgacaacgccagcttcattcagtcgttctgccgtctggggctggtgcctgactccggcggcagctggttcctgccgcggctggccggccacgcccgcgcgatgggcatggccatgctgggtgacaaaatcagcgcccaacaggcgctggcgtggggcatgatctggcaggtggtgccggcggatgaattggccgatcgcacgcaaacgctggcgcgccatctggccacccagccgacctacggcctggggctgatcaagaaagccctctacagctcggccaccaacagcctcgatcagcagctcgatctggagcgcgatctgcaacgcctgggcggccgcagcgacgactatcgcgaaggcgtcagcgcgttctttgccaaacgcacgcccaacttcagcgggaaatag

SEQ ID NO: 423291 - DNA, 774 bp, Serratia marcescens
atggacaccccctttattttgcatcagcagcagcaccgcgtggtcacgctgacgctgcatcgcccggaggcgcgcaacgccctgagcacgccgtgcctggaacagctggttgcacggctggagcaggccgacgccgacagcggcgtgggcgccgtggtgatcgccggtgcggcgcgcttcttcgccgccggcgccgatctgcgcgaactgcaacagcaggatctgccggccgcgctggcggatcgccgtccacagctgtggcagcgtctggcgcagttcagcaagccgctgctggcggcggtgaacggttatgccctgggcgccggctgtgagctggcgctggcctgcgacatcgtcatcggcggcgaaagcgcccgcttcggcctgccggagatcaccctcggcctgatgccgggcgccgggggcacccagcgcctgatccgctgcgtcggcaagtcgcgcgccagccagatggtgctgaccggcgagcccatcgacgcccgcaccgcgctgcaggccggtcttatcagcgaagtgtgcgtcgatgccctgacgctggaacgcacgcagcagattgccgaacgcatcagccgtcaggcgccgctggcgctgcgcgccgccaaacaggcgctgaaacaggccgaggaaaccggcctcagccaggggctggcgatggagcgtcagcagttcgtcaccctggccgccaccgacgatcgccgcgaaggcatcgccgcctttttcgaaaaacgtacgccaaactatcaggggcgctga

SEQ ID NO: 423292 - DNA, 1059 bp, Serratia marcescens
atgacggtctttcatcgcctgaacgtcgccgccatcgagcgcgaaacgccggacgccgtagccatcaccctgcgggtgcccgaagagctgcaaaaccaataccgctatacccccggccagcacctgacgctcaaggcgttggtcaacggcgaagagttgcggcgttgctattccatctgcagttcaccgcaggaaggcctgctgcagatcggcgtgaaggcgattgatcaggggcgcttctccggcttcgtcaaccgcatgctgaaagtcggcgacgcgctggaggtgatggtgccgcaggggcgcttcggctaccagccgcaggcagagcgccacggcaactacctggcgatcgccgccggctccggcatcacgccgatgctgtcgatcatcaaggcgacgctgctgctcgaaccgggcagcagcttcaccctgatctacggcaaccgcaacagccgttcgatgatgttcaaagaggcgctgtcggacctgaaaaaccgctacccgcagcgttttcagccgctgtacctgttcagccaggaaagtctcgacagcccgctgctcagcggccgtatcgaccgcgaacgcctgacggcgatcggcggcgcgctgctggatttccgcgactatgaccacgcctttatctgcgggccggaatcgatgatggacgacgcgcaaaccgtgctggaacaggccggcgtaccggccaatcacatccacagcgagcgcttcaacaccagcggcttggccgcccgcccgcgccacagcggcgatcgcaacgccacccgggtggcgatcctgctcgacggccgccggttggatatcgagatcggcgaacaggacgacagcattctcgacgccgcgctgcgccagggcgccgacctgccctacgcctgcaaaggcggcgtctgcgccacctgcaaatgccgtctgaaggccggccaggtggagatgggcgtcaactatagcctggagccggatcagctggctgcgggctacgtattgagctgccagtcgtggccgaaaggcgacggcgtggtattggacttcgacgtctag

SEQ ID NO: 423293 - DNA, 498 bp, Serratia marcescens
atgaacgtcacccgtttgcaacccgccgaaattccgcagatttggcactgcctgcagcagatcagcgatcccgagctgccggtgctgtcgatcaccgatttgggcatggtgcgcgacgtggcgcgcgacggcgctggctggcgcgtgaccttcactccaacctattccggctgcccggccaccgaatttctgctcaacgccatcgagcagcggctggcggccgccggcttcagcccggtgcaggtggacattcgcctcagcccggcctggaccaccgactggatgaacgccgacgcccgcgaacggctacggcaatacggcgtagcgcccccgcagggccacacctgcgatcggccacacgcccacggcccggtagcctgcccgcgctgcggcagcacccacagcgagaagatcagcgagttcggctccaccgcctgtaaagcgctgtaccgctgctgcgactgccgggaaccgttcgattatttcaaatgcatatag

SEQ ID NO: 423294 - DNA, 759 bp, Serratia marcescens
atgacggttaacgatccgcgcatcagctatttactccgccagggcgacacgcctctgatcctcgcccagcgcctgtgcgcctggtgcggccacgcgcccgagctggaaatcgatctggcgctggccaacatcgggctcgatctgctcggccaggcgcgcaacttcctgggctacgccgccgaactggccggcccgccctgcagcgaagacagcctggccttcggccgcgacgagcgccagtttcataacctgctgttggcggagcagccgaacggcggtttcaacgacacgctggtgcgtcagttcctgctcgatgcctaccacgtacagctgcaccaggcgctgagccgcagccgcgatgcgcagatcgccgccatcgccgccaaatcgctgaaggaggccgattaccacctgcgcttcagccacggctggatgatccgcctcggcgacggcaacgacgtcagccaccgcaagatccagcaatcgctggataacctgtggcgcttcaccgccgagctgttccacgccgacgcgctggagctggaactggcggaacaaggcatcgccgtcgatccgcgcgaactgcaggccccctggcaagcgcaggtggaagaaacgctgcgccaggcgacgctggcgctgcctgccgagcaggcgttccggcacggcggcaagcaaggccggcacagcgaacacctcggcccgctgctggcggagatgcagttcctgcagcgcgcctatccaaacgggcaatggtag

SEQ ID NO: 423295 - DNA, 288 bp, Serratia marcescens
atgagccacgttgaatggccgctgtatgaagtgtttattcgcagcaaacaagggctggcgcatcgccacgtcggcagcctgcacgccgccgacgaccaaatggcgctggaaaacgcccgcgacgcctacacgcgccgcaacgaaggttgctcgatctgggtggtgcagtcgcgccatctgatcgcctcgcagccggaagatcgcggcgcgttcttcgatccgtccgaagacaagatctaccgtcatccgacgttttacaccattcccgacggcatcaagaacatgtag

SEQ ID NO: 423296 - DNA, 939 bp, Serratia marcescens
atgacaactgacgcacagtatcagcagcatttcgacgacaagatcgcggcggatatcgccattgaggccaaagactggatgccggacgcctaccgtcagaacctgattcggcagattggccaacacgcccactcggaagtcatcggcatgctgccggaagccaactggctgacgcgcgcccccacgctgcgccgcaaagcggtgctgctggccaaagtgcaagatgaggccggccacggtctgtacctctacagcgccgccgaaaccctcggctgttcgcgccaggacatctaccaaaagatgctcgacggcaagatgaagtactcctctatcttcaattaccccacgctcaactgggcggatatcggcgtgatcggctggctggtcgacggcgccgccatcgtcaaccaggtggcgctgtgccgcgcgtcctacggcccctatgcgcgggcgatggtgaagatctgcaaagaggaaagcttccatcagcgccagggctacgaggcggtaatggcgatggccaacggcagcgacacgcagcgcgccatgctgcaggacgccatcgatcgcttctggtggccggtgctgatgatgttcggcccgagcgacgccgactccccccacagcgcccagagcatggcgtggaagatcaaacgccacagcaacgatgagctgcggcagaagttcgtcgacaacaccgtgccgcagcttgaagcgctgggcatgacggcgccggatccggagctgcgctgggacgccgccgccggccactatcgcttcggcgaaatcgactggagcgagctgcatgaggtgatcaaagggcgcggccaatgcaaccacgaacgcctgcaggccaaacgccgcgcctgggaagacggcgcctgggtgcgcgacggcgccatggcccacgccgcgaaaaacgccgcctccgccgcatag

SEQ ID NO: 423297 - DNA, 2067 bp, Serratia marcescens
atgcagcagttacacagttatctttctggcgcctgggtgtacgggcagggagaggcgcgcgagatccgccacgcggtgaccggcgaagcgctgtaccaggtctgctctgacggcctgccgttggcggcgagcctggactatgcccgcagccgcggcggcccggcgctggcgcacatgacgttccagcagcgcgcccagatgctgaaagcggtagccaaacacctgctggcgcataaagaggcgctgtatcagatttcctatcaaaccggggcgacgcgcagcgacggctgggtcgatatcgagggcggcatcgccacgctgttcgcctatgccggcatggccggccgcgatctgccggacgataccctgtggccggaagacgagctgatcccattgtcgaaacaggcgcagttcgccgcccgccacgtgctcacttcacgccccggcgtggcgctgcacatcaacgccttcaacttcccgtgctggggcatgctggagaaactggcgccgacctggctggcgggcatgccggccatcatcaagccggcaaccgccaccgcgcagctgacgcaggcgatggtcaggctgatcgtcgatagcggcctggtgccggaaggggcgctgcagctggtttgcggcggcgtcggcgacatgtttgcgcacctggattaccaggatgcggtgactttcaccggttcggcgcagaccgggcagcggctgcgggcacacccgcgcctgctggagaaatcgatcgcgttcaccatggaggcggattcgctcaactgctgcgtgctggcagaagacgtgacgccggaaatgccggagtttgcgctgttcatcaaagaagtgtgccgtgaaatgaccgccaaggcggggcagaaatgcaccgcgatccgccgcatcatcgtgccggcggcgcaggtggcggcggtgcgtcaggccttgctgcagcgcctggcgggggtgacggtgggcgacccgcagctggagcaggtgcgcatgggggcgttggtcagccatgagcagcgtgatgatgtgcaaagcaaggtggagttcctgctgcgcaacggctgcgaaccgctctgtggcgcggcgctggataagctggaggtgctgggcgacggcgcgcgcggcggggcgttttatccgccgaccctgctgtattgcgccgatccgttcacccatcaggcggtgcacggcaccgaggctttcggcccggtggcgacgctgatgccgtatgcggataccgaacaggcgatcgcgttggcgttgctggggcagggcagcctggcgggctcgctggtgaccgccgatccggcattggccacgcgcttcattcgcgcggcggcctgcgcccacggccgcatgttgattttggatgagcgggcggcggcggagtccaccggccacggttcgccgctgccgatgctggtgcacggcggcccggggcgcgccggcggcggtgaagagctgggcgggctgcgcgcggtgaaacactatatgcagcgcacggcgatccagggcagcccggcgatgctggcggccatcggcggcgaatgggtgcgcggcgcgccggtcgccgagcatccggtgcatccgttccggaaatacttcgagcagctgcagctgggcgatagcctgttgaccgcgcgccgcaccgtgaccgaagcggatatcgtcaacttcgcttgcctgagcggcgaccatttctacgcgcacatggacaagatcggcgccgccgactcgctgttcggcgagcgggtggcgcacggttactttgtggtgtccgccgcggccgggctgtttgtcgacgccgccgtcgggccggtgatcgccaactacggcatggaaaatctgcgctttatcgagccggtgaagatcggcgataccattcaggtgcggttgacctgcaaaaagaaaatccgcaaaccgcagaaaaccgccgaagatcgcccgcacggcgtggtggtgtgggatgtgcaggtgttgaatcagcaacagcagccggtggcgctgtacagcattctgacgctggtggcgcgccaacagagggacttcgaagcgtga

SEQ ID NO: 423298 - DNA, 894 bp, Serratia marcescens
atgcctactggcgatattatgcacgaacaggccgtcctgacgctgtcgttgcaacaatgggcggcagcggaagcatccagcgcggtcagcgaactggaacagggcaaggtgctgtttctgcccgaactggccttcaccctgtctgaacaggaaatgccgctgctggatccgacattggtcgacccgaagcgcaaaaacatcagctaccaaccgctgtccggcaagctgagcggcgtcgccgtcacggaacgccggcagcaggttcagcaattgctggaacgctattaccaatcctgccgccagttgatcgccgggctgttgcccgaatatcaggaggcgctgcaccacccgaccggcagcctgcgtttacatccggtttccgcttggcgggcggccagttcctggcgcaaagacgacagccggctgcacgttgacgccttcccgtcgcgcccgaactacggcgaacgcattctgcgcattttcaccaacatcaacccgcacggcgagcatcgccaatggcgggtcggcgagccgttccctgagctggcggcacgctttatgccgcgtctcgctcgctactccgccttcggcagttggctgcagcaccaggtgcgcatcaccaaaacccgccgcagccattatgaccacctgatgctgcagttgcatgacgccatgaaggccgacggcgattatcagcaacgggggccgcagctggcgctgacgttcccgccgggcagcagctggatttgcttctctgatcaaacgccgcatgccgcgatgggcggccagtttatgctggaacagaccttcctgctgccggtgaataagatgcaggatccgcagcgttcaccgctgaaagtgcttgaacagctgcgcggtcagccgctgatctga

SEQ ID NO: 423299 - DNA, 1554 bp, Serratia marcescens
atgactcagcagcaacccatacaggatgccgtgccggcgcgcagcgctaaaagctccccattattatttcaggctggcgtgtttgtcatcatcgttgccgccacgctgatcctctttaacagctggcaaatctggaacgcgcatcagcgcgatctgcgcagcgccgagcatgaatccgccaacctcgcccgctcgctggcgcagcatgccgacgatactttcatgcaggtggacggcaacctgctcgatctgaacgaacgtctccagaccgacgggctgggcccagcgcagctgacgcggctgcagcgcgtcatgcagacgcaggtcggcaatctgccgcagctgcacgggctgtttctctacgatgcgcgcgggcgctggctggcgacctcctcgggcaaattcatcaagaacgccaacaacgccgatcgcgattacttcaaataccatcaaaaccgcgacggcggcggcctgtacatcggcaaggtgatccgcagccgcaccaccggcgatctgatcattcccgtttcgcggcgtttcaacaacccggacggcagctttggcggcgtggtgctggcgacgctgtacgtcgattatttccgccagttttacgacagcttcgccctcaataccgacgcctcactgaacctgctgctggcggacggcaccatcctttaccgccgcccttactcggcggcgtcgatcggtaaaaacatcgccaagggcgtgctgttcagcgaaattttgccgcattcggaattcggcaacgccaccatcacctcgctgtacgacaaagtggagcgcatctacggctattcgcgggtcaaccgctttccgctggtgatcgccgccgggttgtcgaaacgcgacgcgctggcggactggcgcaccgacgccggtctgttcgccgcgggcggcctctcgctgctgatgatcctgttggcgatgggcatggtgctgctgcggcaaatcaagcacagcatgcaaaccgaagccgagctgatgcgcacccgcgatcagttgaccagcatcaaccagatgctcgaagagctggcgctgctggacggcctgaccgggctggccaaccgccgccagtttgatatcgcgctgaagaacgagctggcgcgggcttcgcgcaactaccgcagcgtggcgctgctgatgctggatatcgactatttcaaacagtacaacgacagctacggccacgtcgccggtgaccagtgcctgcagcagatcggccaaacgctcaaagggttggcctgccgcagcaacgacgtcctggcgcgctacggcggcgaagagatggggattatcctgccggataccgacgtgcaaggcgcactgattttcgccgagcgcgttatcaacgcggtgcgcgatctgaaaattccgcatcagggcaacccgcacggcatcgttaccatcagcattggcatctgcgccaaagtgccgcatatgtataacgatacgccgatcagctttatcaatgaggcggacagtgcgttgtatcaggccaagaaaaaaggcaaaaactgcatttacggcgcttaa

SEQ ID NO: 423300 - DNA, 195 bp, Serratia marcescens
atgtcggattacatcataatcactttactgacgctggcggtgtattacccccttacgctggggacgctggcggtgatgatgtacttcgcctggcggcggcgccggtcgccctattggcggttgggattggcgctgttggcgctgctgttcgtgctgttcgccaaggcggcgtatgactggcaccgctatggctag

SEQ ID NO: 423301 - DNA, 420 bp, Serratia marcescens
atgctggtacaaccctatctgtttttcagcggtaactgtgagcaagcgattaacttctacgaacagcagttgaatgccaaaattgaaatggtcatgcgctataaagacatgcccgaagaagcccggcaagacgggccgcaggacgtcagtccggaggcgatcatgcatgcgcgcctgctgatcggcgacggcgtactgatggcctccgacggctgcccgcaagatgacggcggcggcgcttctcataaaggcttctcgctgtcgctgaaccccagcgatgcggagcaaggacgcaaactgttcgacaatctggcgcagggcggccaggtgacgatgccttaccaagccaccttctgggccaaaggctttggcatgctgaccgacaaattcggcgtcaactggatgatcaacgtcgaataa

SEQ ID NO: 423302 - DNA, 921 bp, Serratia marcescens
atgctttctaaccaacgctttgagcgcgaattcttgcgccctcgttattggttgctgtggatagggctgggaatactctatctcttggtattactgccctacccgctcatttatcgactcggacacggccttggcagaatagccatgcgcctgatgaaacgccgggtaaaaatagcgcgccgcaatttagagctctgcttccccgcaatgcccgccgccgagcgcgaggcgctgatcgtcaaaaattttgagtccgtcggtatgggcctgttcgaagtcggcatggcctggttctggcccgactggcgcatcgcccgctggttcaaggtgagcggcatggaaaacatgcggctggcgcgtcagggcggcaaaggcgttctgctgatcggtctgcattttctgacgctggaactgggcgcgcgcattttcggcatgcaaaaccccggcatcggcgtgcatcgcccgcacaacaacaggctgatggagtgggtacagacccgcggccggctgcgctcgaataaattcatgctcgatcgtaaagatatcaaaggcatgatccgcaacctgaaacagggcgaaatcctgtggtacgcgccggatcacgattatgggccgcaaagcagcgtgttcgcgccgctcttcgccgtggaaaacgccgccacgaccaccggaacctttatcctggcacgcatggggcggccgtcgatcgtgcctttcgtgccgcgccgcctgccagatgctcagggctatgagctgatcgtgcagccgccgttgacggacttcccgctggatgatgaaacgcgcgcggcggccaagatgaaccgcgtggtggaagaacaggtgctgctggcccccgatcagtacatgtggctgcaccgccgctttaaaacccgcccagccggcgagccgtcgctgtattga

SEQ ID NO: 423303 - DNA, 198 bp, Serratia marcescens
atgtcatatgaaaatgacgatctaaacggtgttgagcaaccgagcgactacgtgaaaaccaccgcctgcgaagtgcgcagcggcgtaaaggcagcgctcgagcaatcatgtgcctgcatcaaggataacccttgggcggggataggcgccggcgccgtcgtgggcctggtaataggatttctgttaggcaaaaggtaa

SEQ ID NO: 423304 - DNA, 249 bp, Serratia marcescens
atgggcatcatttcctggatcatttttggtttaatcgccggtatcctggccaagtggattatgccgggcaaagacggcggcggctttattgtgaccgttatattgggggtcgtgggcgccgtagtcggcggctatatcagcaccttcttcggtatgggccgcgttgacggttttaacctgggcagctttgtggtggcagtaatcggcgccctggtggtgctttttgtctacaggaagatcaaaggctaa

SEQ ID NO: 423305 - DNA, 390 bp, Serratia marcescens
atgggtctgttcgatagcgtattgggtaacattctgggcggcggcgccaacggcaaaggcatcgactacatcgccattatgcagtgggtcgagcaacaaggcggcctgcaggccattttggacaaattccgtcaggggcagttcggcgatatcgtcggttcctggctcggcaatggcgaaaatcagccgattaccggcgatcacgtacagcaggcgttgggtagcgacgccatcaaccaactggctgaaaagctgggtatcgatccggctcaggcgtccagcaccattgcacagttcttgccaacggtcaccgatgccgcctcgccaaacggtgaagtgcagcaagacagcaacgagctgggcgacatggtcggtaaactgttcaaataa

SEQ ID NO: 423306 - DNA, 933 bp, Serratia marcescens
atggataaactgagcgcaatgaaaacctttatgcgggtggcggaactgggcagcctgtcggccgccgctcgcgatctgcgtttgacgcagccggcggtcagtcagcaaatcgctgccctggagcagcgactgggagcccagctgctgtttcgcagcacccgggcggtcaccctgaccgatgccggcagcggttattatcagcgcctcaaaccgattctggcggcggtcgacgaagcggaagaggcgttgcacggccagcgccaccagttgcagggcaatctgcgcattcacgccccgaccgggttcgggcagttgcacgtcacaccgctggccatcgctttccagcagcgccatccgaacctcgccatcgagctgctgctggacgatcgcctcgccgacgtgatcggcgaaggcatcgacgtggcgctgcgtttcggtgaactgcatgcgcccggcatggtggcgaaacgtttgggcgagctgcagcgcctgctggtggcgtcaccggcctatctggccaggcatggcacgccgcgttccccggcggagttggcgaaacatgcgcacattcgttacagcggcctgaacgacggcgatacgctcaccctgttcggcccgtacggctccgagacggttgctctgcggcccacgttccgcgccaacaatacgctatcgctgctggccgcaattgaggctggggccggcatcggcggcgctcaacggcctttaatcgccgaacagctggcgacaggggcgctggtgcccgttttgccggaataccgctacccgcccatggcgctgcacgcggtctatcccgccttgcgttttattccggagaaagtgcgcgcctgggtggcgcatctgcagcaggcgttgacgacgatcgaggggatcagcggagtgaatgcccccggccagacgccgggagcctaa

SEQ ID NO: 423307 - DNA, 1053 bp, Serratia marcescens
atgaatgcaaagcgacaggcattggtgatcggcgccaatggcgtgattgggcgccgattgattgaggagttgaccggccagggctggcaagtggtgggcgtctcacgtcggggtgggcaaccggcgtcgggggggcgccacctgcaggttgatctgctggatgcggcggcgacgcgcgacgcgctgcggccgctgagcgcgattagccacattttctatgccgcctatcaggatgcgccggactgggcggggctggtggcgccgaacctgcagatgttgcaacacgttgtcgaggggctggagccggccgcaccggcgttggagcacatcagtctgatgcagggctataaggtgtatggcgcgcatttggggccgtttaaaacgccggcgcgcgaaagcgacgccgggcatatgccgccggagtttaacgtggcgcagcaacagtatctggcgcagcggcaggccggcaagcgctggcgctggagcgccattcgcccgagcgtggtggggggcttctccctcggcaatccgatgaatctggcgttaagcatcgcggtttacgcgtcgatcagcaaagcgctcgggttgccgctgcgcttccccggtaaaccgggcgcttaccacagcctgctggaaatgaccgatgccgggctgttggcgcgcgccacgctgtgggcggcgaccgagccggcggcggccaatcaggcgtttaatatcaacaacggcgatctgtttcgctggagcgagatgtggccgaaaatcgccgcttactttgggctggaatgtgcgccgccgctgccgatgccgctggagagcatgatggcggacaaagcgccgctgtggcgcgagctggtgcagcggcaccaattggctgaaccggactatcgcgcggtggccggctggcgcttcgccgatttcgtcttttcctgggactatgacatgttcgcggacggcagcaaggcgcggcgcttcggtttccatcagtttgtcgaaaccgaagccatgtttttctcgctgttcgatgagttccgccgtcgcggcatcatcccctga

SEQ ID NO: 423308 - DNA, 1008 bp, Serratia marcescens
atgtcaacaaatgcagcgctgcccggcacgatgaaagcgattgaaatcagccagccgggcgcccccgaggttctggtcgtcgctgaacgcccggtgccggttccgcaagcgggccaacttctggtgaaaatcgccgccgccggcgttaaccgccccgacgtgctgcagcgccaggggaactatgcgccgccgcccggcgcctcggatatccccggcctggaaattgccggcgaagtggtggccactggggaaggcgtgacccgcttcgcgcccggcgatcgggtttgcgccctcatcgccggcggcggctatgccgaatactgcaccgtgcatgaaagcaatgcgctgcccgttccggcgggcctgagcctgaccgaggccgccgcgctgccggaaaccttctttaccgtctgggtcaacgtgttccagcgcggccacctcaaagccggcgagaccgtgttgatccatggcggcacctccggcatcggcacggtcgccaccatgctggcgaaggccttctgcgcccaggtgatcaccaccgtcggctccgaagagaaacgacaggccagcctggcgctgggcgccgacgtggcgattaattaccgcagcgaagactttgtcgcacgcaccaaagacgccaccaacggtaaaggcgccgacgtgatcgtcgacctgatcgccggcgattatgtagccaaaaactatcaggccgcggcgatggaaggccgcatcgtgcaaatcggcacgcaaaacggcgtggtgaaagagctcaatctgatgccgctgctgttgaaacgcttgacccataccggttcgacgctgcgttcgcgcagcgtggcggacaaagcgcagatcgccgccgagctgcgcgagaaggtttggccgctgctggagcgcggcgtgctgaagccgcaaatttttaaaaccttcccgcttgagcaggccgccgccgcgcatgcgctgatggagtccagcgagcacatcggcaagatcatgctgacgttctga

SEQ ID NO: 423309 - DNA, 210 bp, Serratia marcescens
atgaccataattaaagctgcaaaccatcaggaagcagaaaaactcatccgctccggcaccgccaagaaaatcgaactggcctacgatatcggcagcgacgacttcttccagcttgccagcctgtggtgcgataaaggcgccaagatctccaaaggaaaagaccacttcatcgtctcgttgaaagggttccgcatcccccctaacgattga

SEQ ID NO: 423310 - DNA, 375 bp, Serratia marcescens
atgccgagatggcttacattgccggccgccagtgccattctgctggcctttgccgcttgcagcgccccgttgggcgcgctggagctgaattatcatccgcctgaacccagcatcacccccgcccccaaaactgcgccggagccggggccggcccccaaagcggaaaaaccgccgattgcctgggcagaggcgagagataaaagcggttttcgcgtcgatatcgagtgcgatcatccaggctgcagcaaaccacgcgccaaaccttatcccgcgtatgaaggcccggtgaagaaaaccgatcgccgccgccagtccgatccttattccaccaatcaggatcccgattacaacattcagttgggctatgagtggtag

SEQ ID NO: 423311 - DNA, 213 bp, Serratia marcescens
atgtctaacatgatcaaaggtcaagtgaagtggttcaacgaagctaaaggttttggtttcatcaccccagcagacggcagcaaagacgtattcgtacacttctctgctatccaggatcaaggcttcaagaccctggctgaaggccagaacgtacagttctctatcgagaacggtgcgaaaggtccatctgcggctaacgttaccgctatctaa

SEQ ID NO: 423312 - DNA, 201 bp, Serratia marcescens
atgcaggttaacgatcgagtgacggtaaaaacagacggcggcccgcggcgtgaaggcatcattttggccgtagaggtgttcaacgaaggcaccatgtatctggtttctcttgacgactacccggcgggcgtatggttttttaatgaaatcgacagccgtgacggcacgtttgtggagccctgtcgcgagcatgggcagtaa

SEQ ID NO: 423313 - DNA, 630 bp, Serratia marcescens
atgccaacgatcatcatggattcatgtagctataccagattgggattaaccgactatctgacttcgcatggcgtgaagaaacgccatattaatgccatcgaggacattgacagcctgcacgaaaaatgcagcaagttgaatcccagcctggtgtttattaacgaggactgcttcatccacgaagcgaacgccaccgagcgaataaaacgggtgatttcactgcacccggatacgttattcttcatcttcatggccattaccaacgtacatttcgacgattatttatatgttcgcaagaacgtcatcatatcgtcaaaatccatcaaaccagagactatgaatcagctacttagtcactatctcgagagaacgtccctacgggcggagaaatcctctctggatcaaacgccggtaacgctgagccagaccgaatcgaacatgttacgcatgtggatgtccggtcaaggcaccatccagatatcagaccagatgcaaataaaggccaaaacggtctcttcccacaaaggaaacatcaagcggaaaataaagacgcacaacaagcagatcatttaccacgttgttcgtctgaccgataccttgaccagtggaatatttgtcaatagccgttaa

SEQ ID NO: 423314 - DNA, 705 bp, Serratia marcescens
gtgagacggaatcagtatgggcagccgataggtgaagccctccctcattggcagccggcaggcatgcccggccacacgccactgcaagggcggttttgccgcctggaaccgcttaacctcgagcgctggggggatgcgctttatcaggcttatcaaaccgccgaggacgatcgcgactggacctatctgttttgggaacgcccgcagtcgcgcgcagatttccaacgttatctccaggcgcaggcgtccagcgcagacagaaacacgatggtggtgatcgatcgggcgaacgggcgtgcggtaggaacctgcgcttttttgcgcatcgatcccgccaacggcgtggccgaactgggcaccatcaactggtcgccgctgatgaagcgcagtgcgctgggcagcgaggcgatcttcctgatgctgcggcacctgttcgacgatcttggttaccggcgttgcgaatggaaatgcgatagcctcaatctgccttcacgccaggccgccgagcgcctggggttccgctatgaaggcacgttccgtcaggccgtcgtcgtcaaaggacgcacacgcgacaccgactggctgtcgatcgtcgacggggaatggccggcgcggcgcgcggcgtttgccgcctggctatcgccggataacatcggcgatgacgggcggcaagcacggcaattgcaggccttccgacgcgagtaa

SEQ ID NO: 423315 - DNA, 1416 bp, Serratia marcescens
atgcacccacgtttacaacaggatcttgcacagtttccgcagatcctcgaccacacccgccagttggcggaagattttctggccgggctgcagcaacgctcggtctgcccaccgctcgcgcaacagcagctgcaacccggtgacgatcggctagcggaaaacggcgaaggcgccctggcggcgctggatgacttttggcaacgttatcaggcgggcatttccgccagcgccggcccgcgttattttggcttcgtcaccggcgggggcacgccggcggcggtcgcggcagactggctggttagcgtgacagaccaaaatagccaactcagccatgatacgatcgccgcggcgatcgagctggccgcggtgacgcagttgaaatccctgctgggcctgccggaagcgttcagcggcagcctggtcagcggcgccaccatggccaatttcgccgggctggccattggccggcagtggctggggcaacagcacggcgtggatatcgcccaacagggcctggcggcgctcggccccgtccaggtgctggcggccaacccgcattccagcagcgtgaaggcgctcagcatgctcggcatcggccgcgacgcgctgacgaccgtcgccagcctgccggactcagaagccatggatatggcggcgctggagcgacagctcgccgccggcgcaggccgtcccacgctggtgctggccagcgccggcacggtcaacaccgtcgctttcgacgatctgccgcgtctgctggcgctgcgggagcgctacccgttctggctgcatgtcgatgcggcattcggcggcgtggcggcctgctcgccgctatacgccccaaggctcgagggctggcagcatgccgattccatcaccgtcgatgcgcacaaatggctgaacgtgccttatgacagcgcgatccaatttacccgccacctggatctgcagatgcaggtatttcagaaccattcggcttacctggaagcgccgacgccgcggccggacaactatctgcatctgacgccggaaaattcgcgccgcttccgcgccctgccgctttggctgacgctgaaagcctatggccgcagcggcatacgggatatcgtcgagcgcaatgtccgattggcgcaggcgctgggcgcggcgttagcggccgacgacggcttccatctgctggcgccggtgaatttgaacgtggtgtgtttcgcgctcagtcacccgcagggcgacagcgaagcggcgcgcgatcgctttctcgatcgccttaaccggcacggcgtggtgcgttgcaccccgacgagctatcaccatcagccggggatccgcgccgcgctggtcaactggatgacggaggaacaggacatcagactggcgctggactcgctgcgccattgcctggcggaagcggcctaa

SEQ ID NO: 423316 - DNA, 876 bp, Serratia marcescens
atgatgaatgaacgtctcccgctgcatgtcttgccgacctttgctatcgccgccaggttggagaatttgcgcgccacggcgcagcaggtgcatttgacgcatggcgcggtcagtcagcaaattcagctgctggagcaggcggtgggctacccgctgtttgaacggcgcgggcgcggtgtgcgcctgaatgccgccgggaaagagttgctggcggcggtagagccggcgctgcaggcgctgcagcagggcgtcgcccgcgcccggcgctcggcggcgagccagacgctgcgcatcagcgtgctgccgtcttttgcccattactggctgttgccgcggttgccggcatttcatgcagcctgcgccgatattgcgctggatatcgatgcctcgctggcgttgcaggatctgtcgcagcgcgggttcgatgcggcgatccgcatcggcagcggccagtgggcggggctgcaggcgcagcgcatcgcgtcgggcgacgtgctgccggtcgcctcgccggatatggcgcggcagtggggaacggcattcgagaacggcggcgacatccccttgctggagcacgacgtcagcccgtggcgcgactggttcaatgcgcaagggcgctcgcggtgcgggcggcaacaggcggtgttcaacgatgccgggttgttgattcgcgccgcggagcaggggttcggcatcgcgctggcgaaaaagctgcttgtgcaggatgcgatcgacgaggggcggctggtggcgctggctgcgccctgtcgcctgagcgaggacgacgtttatctggtgtggccgcagaccgccgggctgacgccggcggtcacacgcttgctgcagtggctgcagcaacagttggcggcggtttaa

SEQ ID NO: 423317 - DNA, 1386 bp, Serratia marcescens
atgacgcctctgatccacactctgctcgacgagatttggcaaagcctggggcaacgccccgcgccctgcgaccggttaaccgtaagcggtaccggcgcattgccttcggcttttcccgtcaccgaattggctaccgccgcctggagcgccgccggtttggcctgcgccgagttgcttcgccgcgaggcagccgatgcgccgcaggtctggatcgatcaacgcctggcctcgctctggttcggctggacgctgcgcccgctgggttggacgctgcctgcggcctgggacgccctggccggcgactacgcgacggcggacggctggatacgcctgcacaccaatgcaccgcaccatcggcgggcggtggaacaggtgctgggcccggcaccggacaaaggcgcgctggcggaacgcgtgctgggctggaaaaaaagcgagctggaggaagcggtgatcgaagccggcggctgcgcggcccaaatgcgctcggcggccgcgtggcgacaacatattcagggcaagagcgtggcgctcgaaccgctgatccacgcctcgctgcagccggaagcgccgccgccgggctggacgttgcccgtcgcccggccgctgcacggcgtgcgagtgctggatctgacgcgtattctcgccgggccgatcgccacccgttttctcgccggtttgggcgccgacgtgctgcgcatcgatccctacggttgggatgagcccggcgtcgagcacgaggtaatgctgggcaaacgcagcgcgcgcctcaacctgaccaatgcgcacgatcgccacacgtttgaacatctgctgaggaacgcagacgtgatcgtgcacggctaccgtgccggtgcgctggagaagttgggctatggcgcggaggaaaggcgcgcgctggcgccgggtctgatagacgtctgcctaaatgcctacggctggagcggaccgtggcgcacccggcgcggtttcgacagcctggtgcagatgagctgcgggctggcggaggcgggcatggtttggcgcagcgccagtttgccggtaccgctgccggtacaggcgctggaccacgccaccggctatttgatggcggcggcggtgctgaccggtatggggcaacgcctgagccgcggcaccggctaccacgcgcggctgtcgctggcgcgcacggcgcaactgctgctggcgcatccctgttcggcagattatcggccggagccgctgacgccggccggaaccgccgacgagaacccggaaacggaactgacttactggggcgccgcgcaacgcctgcgcgccccgttaagcctgcagggtacggcgctgcaatgggcgttgccggcgaccacgctcggcacctcacagccggagtggctgcgccgttaa

SEQ ID NO: 423318 - DNA, 2184 bp, Serratia marcescens
atgaaacaccggctttccccgctcgcgctcgcgctgctcgtcagctttcccgccgatgccctgctgctgcagcaaggcgacgcgcagtttgaactcgatcccgccacgctgcgcattgccgccggcgctgtgccggtcaatctggcgcagcccgcgcaacaggtggaagatctcaccgcgtcgccacaacgcgccagctggcgctggccgcagagcgcggtcaaggttagcgcccgtctggaaggcggcgatctgcgcctgagcttcagcagcgaccggccacagcttctgaactggtatcgcctgccgccacaaacagaaacgctgctgttgccgatcggcgaaggcagccgcattccgctcgacaacgcggtctggcgccattacctgacggcggaaatgacgccgctggataccaactgggatctgaagctgccgctgtggagccagcagcaccagggcaaggtctacagctggctgatgttgacgccgttcagcaaccgggtcaccttcgcctcggcgcaggaaaagctggagatgcgcgccgagcatcagttcaaccgcttcaatcagcaacaggcattcgaggtgctgctgcacgtcggtgacacgccgctgtccggcgcccgccgctatcgcgactatttgcaacagaacggccagttcagcagcctgcacgagaagataaagcaggcgcccgaaggcgaaaagctgatcggcgccacccatgtctacctgtggggggacaaactgctggcggcggaagatgtcaaagattggccggggttgctgcactacctcgcctctcctgccgccgaagcgctgcggcagaagatggatgccgagagcagaaagctcctgctgcagctggcgggcaaaacgccggagggctggcagcaacagcccctgatcgacggcatcaaccaggcgttgacggcgcaaatcccgctgggcgccacgccggatgacgccgactttctgcaggcgcagcagcgccaggccgctgcggtgcgggagcgggcgcagcgagagctggggcgctggctaaccccggcggaccgttgggggcaagggctggccaaaccggtgatcgatgcgctgcgccaggccggcttgccgcgcctgtggttaggcaccgataactggactgccgccttcctgcacccgcaggcggtaaccgccaccaaagcggccggctatctgatcgccagctacgactcctacgataccgccattgcgcgcggcgtgaacgacagctggctcaccgcgcaactgccgacggcactgcgggaaagttgcaccatcgtgcgcgccgacggcagcaagaaacccggcttcggcaagcagggttactacctcaacccgggctgcgtcctgccctattctcaacggcgcatgcgcgagctggtgcaactggccgggttgaacagcctgtttctcgacgtggacggcaccggcatggtctccgacgactatcagcccggccacccgaccggcgcggcgcagatggccgaggcgcgcaacgcccggctggcctggttcagcgccacccttaagctgccgctcggctcggaggacggcaatgcggtgaccgcctgcagcctgatgttcgcccacggcatggaaacctggggattcggctggggcgacaagcagatgaatcaggataaatcctcgccctattatctcggcgcctggtggcccaacgcccaaccggcgtttttcttccgccccgccaaggtgaagcagccctaccgcaccgtcgaattcgatccgcgttatcgcctgccgctgtaccaggccgttttccacgatgcgatcgtcagcagccaccactggaattacgacaatctgaagttcagcgacgttcagaccacccgcagtctgctcagccagttgtacaacaccgcgccgatgttccatctgagccgcgccaccctggcggcccgcctgccggcgatcaaacgcgccgacgccgccttccggccgttgcatcaggccctctgggacaaagcgctgaccgacttccgctggctcgatcgggacggctgggtgcagcagacgagcttcagcgacgggtcgacgctgaccgccaacttcagcgcgcggccgttcgccggcgtagcggcccacagcctgcgcgccaaactggccgacggccgcacgttcgacgttgcgccttag

SEQ ID NO: 423319 - DNA, 699 bp, Serratia marcescens
atggctatgactcctttcgttttaaatttattgctggcgatgtgcctgggcgcggtaattggcgccgagcgccagtggcgccaacgcatggccggcctgcgcaccaatgcgctggtggcgaccggcgcggcggtctttattctcagctccatgtccaccgatccggccagcgccggccgcgtggctgcgcagatcgtatccggtatcggcttcctcggcgccggggttatcatgcgtgaagggctgaacattcgcggcctcaacaccgccgccacgctgtggtgttcggcggggatcggcgtcctgtgcggcctgggccagcattgggatgcggtggtcgccacgttggtgatcctgtgcgccaatatcctgctgcgcgaggccgcccagcgcatcaatctgcagccgcaccagcaggcgaccgatctggaactgtgctatcgcattcaggtgacctgtggcgagcaggatgaaattctggtgcgtaccctcattctgcaggcgctgaacggcgtcgccttgcggctgcaatctttgcgcagcgccgatatttccagcccggggcaattggaagtgtgcgcggaaattaccgccacgccggccgcacaaaaagaaattgagggtattgtctgccgcgtcagcctggaaaaaagcgtgagcgccgttcgctggcgcgttgcgtctgaattaccggtctga

SEQ ID NO: 423320 - DNA, 2700 bp, Serratia marcescens
atgactcagattaatgaaagaacgcgtcgccgtgataaagacgcggtgacctacgccattgcggaagaagcgaccaacagcatcgcccaaacgctggcgaacctgaagtgcaaccgcaacggtttgactcaggacgacgccgatgagcggctggagcagttcggcgccaatcaggtcgcccacgacaaggcgccgcatgccttgatccagctgatcaaggctttcaacaacccgtttatcttcgtgctgatggtgctggctgcgatcagtttctttaccgattattggctgccgcgccagagcggtgaagaaactgaactcaccggcgtcattatcattctcatcatggtcacgctgagcgggctgctgcgtttctggcaggaataccgcaccaacaaagcggcggaagcgctgaagtcgatggtgcgcaccaccgccacggtgctgcgccgcagcagctacagcgcgcatccgctgacgctggaagtgccgatccgcgaactggtgccgggggatatcattcagctctccgccggtgacatggtgccggccgacgtgcgccttatcgcctcgcgcgatctgttcatcagccaggcgattttgaccggcgaagcgatccctatcgaaaaatacgatgccatgggcagcgtggcgcagaagtcgagcgaaggggaagtgtccagcgagaacgcgctgcttgagctctccaacgtctgcctgatgggcaccaacgtcgccagcggcaccgccacggcggtggtggtggcgaccggcgggcgcacctacttcggctcgttggccaagtcgatcgtcggttcgcgggcgcaaaccgcgttcgatcgcggggtgaacagcgtcagctggctgctgattcgcttcatgctggtgatggtgccggtggtgttgctgatcaacggtttcaccaaaggcgactggagcgaggcggcgctgttcgcactggcggtggcggtcggcctgacgccggaaatgctgccgatgatcgtcagctccaacctggcgaaaggggcgatcgccatgtcgcgccgcaaggtggtggtgaagcgcctgaacgccattcagaacttcggcgccatggacgtgctctgcaccgacaagaccggcacgctgacccaggaccgcatcattctcgagcaccatatcgacgtcaacggcgccagggataacgaggtgctgcacctggcctggctgaacagcttccatcagagcggcatgaagaacctgatggatcaggcggtgatccgcttcgggcgcggcaaaccggggatcgaagccctggggcgtttcagcaaggtggatgagctgccgttcgatttcgtgcgccgccgcttgtcgatcgtggtggcggacgaaaatggcaagcagcagctgatctgtaagggcgcggtagaggagatgctggagatcgccactcacgtgcgtgaaggcgacaagacgctggaactggacgacgcgcgccgtgcggcgctgcaggcgctggcccgcgagtataacgaagacggtttccgcgtgctggtgctggcgacgcgcgagctggatgcgcaacgcccggccgacccgctgagtgtggccgacgagcgcgacatggtggtgcaagggttgctgaccttcctcgatccgccgaaggagagcgcgcagcaggcgatcgccgcactgcaggaaaacggcgtgacggtgaaggtgctgaccggcgacaacccggtgatcacctgcaagatttgccgcgacgtcgggctggagccgggtgaaccgctctccgggctgcagattgaacagatggatgacgaaacgctggcgcgcgaagtggagcagcgcacggtcttcaccaagctgacgccgctgcaaaaatcgcgggtgctgaaaatgctgcaggccaacggccataccgtcggcttcctcggcgacggcatcaacgatgcgccggcgctgcgcgatgccgacgtcggcatttcggtcgacaccggcaccgacatcgccaaggagtcggcggacatcatcctgttggaaaagaacctgatggtgctggaagagggggtgatcaaagggcgcgagaccttcggcaatatcattaagtacctgaacatgaccgccagctccaacttcggcaacgtgttctcggtgctggtggccagcgccttcattccgttcctgccgatgctggcgatccacctgttgattcaaaacctgatgtacgatatttcccagctgtcgctgccgtgggacaagatggacaaagagttcctgcgcaagccgcgcaagtgggactccaaaaacatcgggcgctttatgctgtggattgggccgacctcgtcaatcttcgatatcacgacgtatgcgctgatgtggtacgtgttcgccgccaacagcgtggaacaccaggcgctgttccagtccggctggttcattgaggggctgctgtcgcaaacgctggtggtgcatatgctgcgcacccagaagatcccgttcattcagagcaccgcggcgctgccggtgttgctgaccaccgggttggtgatggcgctcggcatctacattccgttctcgccgctcggcgccctggttggcctgcagccgctgccgtgggaatacttcccgtggttggccgctacgctggtcagctactgcgtggtcgcgcagttgatgaagcgtttctacatccgccgcttcggcgagtggctgtaa

SEQ ID NO: 423321 - DNA, 774 bp, Serratia marcescens
atggatctgacctatgcgcctttgctggcctggctgttgctcgtccatctgctggcggattttccgctgcagccgttgagttgggtggaagataaaatccagcatcgcgcgcgttcacgttttctggtgttgcacgcgttgctgcacggggtgctggccgcctgggtggtggccggtttcggcctgctgcacggcgggctttcttcacttcaggtgctggccagcctgctgatcatcgccgtcagccactacctgatcgatttactgaaggtcaccgcgatgaaccgcctgagcccggcccgcagtttcctgctcgatcagggattgcatctggcggtaatcgccttgctgtggctggggctgacgccgaatgccggtgaactgctcgccgcgctggggcggcaactggggcgttggcaaaccggcctggtgctggtggcctactgcctgatttatctgccgatgagcctgctgatcgggcaactgctggcgcactggacgccgcaaatgccgccttcggccaaggccgacaacgactcgctgctgcgcgcgggcaaacagattggctatctggagagaacgctgatcctgacctttgtgctgctggggaaaatcccggcgatcggctttttgttggcggccaaatctatcttccgtttcggcgatctgcgccagagcgacgataagatgcgcaccgagtatgtgctgctcggcacgctgttttccttcacgctgaccatcatgctcggcctgctggtcaacaaactgctgtag

SEQ ID NO: 423322 - DNA, 597 bp, Serratia marcescens
atgccgacgccaatcagcgtaatcagcggcgatctggtcgattcccgccgatcagacaccgtcaactacctcaatgagctgcacagcctgctcgatcggctgcggcgcgacgggcggctgcatcaggtggaaatctttcgcggcgacgccttccaggcacaggccgccccggaggacgggctgctgctggcggtgtatattcgcctcgcgctgcgggcgacgggcgccgcgcactgggatgcgcgcgtcgccgtcgggctgggcagccaacggcccgacgccgccggctatggcagcgcctttatcaactccggcagcgcgttggacgccatggcgaaaaattgccggttagctctgaaaaccgacaacgatcggacaaacgccattgtcagcgatctgctgccgatgttagatcatgtgattggccgcctgtcgcagaccgaagcgcgcatcgtccaggcgagaatgttcgccgacagcggcgccgtcgtggcggatcagctgcaaaaagccgcctccacggtctccgccgcgctgaaacgcgcggcctacgaggaaatcatgcggtttattcacgccattaacaggatcgtctga

SEQ ID NO: 423323 - DNA, 180 bp, Serratia marcescens
atgtacaacttctcccgctatcaggcaaaagaactggcgctggcttacatgagcggcaaaaaacacgatctgtcgccgcaggaatttttgcagcagctgaaaagcagcgagcgatcgtttgagcacctgctgaaacacggcagcgaaatgccgcgtgacgtgctggttaaaagcttctga

SEQ ID NO: 423324 - DNA, 1110 bp, Serratia marcescens
atgccgctcacattcaaacgttcggaaaggctctccatcggcaccgaaatagagctgcagctggtcgatgacaagcactacgatcttacggatcgggccgaccgggtggtcagcgcggtcggcgaccgccggcgcgtcaaacatgagctcaccaaatcgatggtggagctgaacagctcggtgcaccgcgatctcgatgagctgcacgccgagctgcgcgccctgacccataccgtccggcgcagcgcgcagcgcctgggctgtgacgtctgcggcggcggccgccatctgagcaacgactggcgcaagcaggtcatcagcgacaacgcgcgctacaggcagctggccagccgctttggctatctttccaagctggcctgcgtgttcggccaacacatccacctcggcgtcaacgacggggacgaagcgatgtatctgtgccatgcgctgacgccctactttccgcagctgatcgcgctcagcgcatcgtcaccgctgtatcagggcgtcgatacgcgctttgccagctcccgtttcagcgcgcagaattccttccccaactacggatgcctggaacacatctacagctggcgcgaattcaacgcctactacgaacggctgaacgccgccggcgtgattgaaagcatcaaggatatttactgggatgcgcggcccaaaccggagctgggcacggtggagatccgcatctgcgatacgccgctgcgcctcgcgcatgccgtgctgctggtcggttactgccgtctgctggctgatttcctgttgcaacaccgcacaccgatcgcgccggaatacgatgccttcaccaattacaacaagatcaacgcctatcgtagcggtttcgccgccgaatacgtcgatcccgcgacgctgcgtcgcagcagcctgaccgcccatatcctgcacactctcgatgtgctgagcgggttcgccgagcgacgggaggatcgggccgtgctacaggcggtcgagcaccatgtccgccagggcatcagcgattcggagcatatccgccagatgttgcacaacggcctgccacaggctcaggtgatcaagcgcctgtgcgatgagctgttgcaaccggcaagttaa

SEQ ID NO: 423325 - DNA, 327 bp, Serratia marcescens
atgacgtcattgacgccgctgaagctgtttaaaaacctgtcggacgagacgcgtctgacgctggtgctgttgctgcgccacgccggcgagctgtgcgtgtgcgagttgtcgggcgcattggtactgccgcaacccaaaatctcaaggcatttggcgatgctgcgtgaaagcgggctgttgctcgatcggcgcgatggcaagtggatatattatcgcctgtcgccgcatatgccggcttgggcggcggggattattgagcaagcttatcagtgtcgggcagaacagatgatggagttggggcaacgtgtagcgaaaggctgcccgtaa

SEQ ID NO: 423326 - DNA, 1284 bp, Serratia marcescens
atgatagtggcaggagcgatctttattctgacgttggccttggttatctggcaaccgagagggctgggcattggctggagcgcggcgttcggcgcgggattggcattactgagcggcgtggtgcacgtcggcgatattcccgtggtgtggcagatagtctggaatgcgaccgcgacctttatcgccgtcatcatcatcagcctgctgctggatgagagcggcttctttgcctggactgctctgcacgtcgcgcgctggggcaacggcaaaggccgatggctgtttacctacatgctgctgctgggggccgtggtggcggcgctgtttgcgaacgacggcgctgcgttaatccttacgccaatcgtgatcgccatgctgtcggcgctcggctttcgccctgcggcggtactggctttcgtgatggcggcgggctttatcgccgatgccgccagcctgccgctggtggtgtccaatctggtgaatatcgtttcggcggatttcttccggctgggctttacggagtatgcggcggtgatggtgccggtcaaccttgccgcagtggcggcggcactggtgatgttgcatctgttctttcgcaaggatattccgcggcgctacgcgttgacgcgtttaccgataccccaagaagcgattcgcgatcgtgcgactttccgagccggctgggcggtattggcgttgttgctgattggcttcttcgctctggagccgctcggcgtgccggtgagtttggtcgctgcctgcggcgcgctggttctgctggcggtggcgaaacgtgggcgcgcgatcgacaccggcaaagtgctgcgcggtgcgccctggcagatcgtgattttctcgctgggcatgtatctggtggtctacgggctgcgcaatgccggcttgaccgagctgctttccggcgtgttggacgcgctggcgcggcaggggctgtgggcggcgacgctcggcaccggcttcctgagcgcgtttctctcttccgtcatgaataatatgccgacggtactggtgggggcgttgtcaatcgacggcagcggcgcggaaggcgtcatcaagcaggcgatgatttacgccaacgtcatcggcagcgatctcggccccaaaatcaccccgatcggcagcctggccacgttgctgtggctgcatgtgttggcaaggaagaacatcgtcattacctggggctattattttcgcgtggggctggtgatgacgctgccgatcctgttcgtcaccttggctgcgctggcgctgcggctgtccgtttga

SEQ ID NO: 423327 - DNA, 432 bp, Serratia marcescens
atgagcagtatcaagatttatcacaacccggcttgcggcacgtcgcgcaatacgttggcgctgatccgcaacagcggcgttgagccggaggtgattttgtatctggaaacaccgcccagccgtgaacggttgattgcgctgctggccgaaatggggatgacgccgcgcgcgctgctgcgtaaaaacgtcgagccttacgccgagctgaaactggatgagaccggctggaacgatgagcaactgattgacttcatgctgcaacagccgattttgatcaatcgacccattgtggtgacaccgctcggcacgcgcctgtgccggccgtcggaggtggtgttggatattctgccggatccgcagcgcggggctttcagcaaagaggatggggagccggtgatcgatgcgcagggctgcaggataaccaaaggttga

SEQ ID NO: 423328 - DNA, 963 bp, Serratia marcescens
atgaatgcaaataacaacccgccgcaagccgtattcacgccggtaacgcgccatgccatcttcatcgtcgccactctgtcgcccgttcccgcccatctggcggcggtgcgcgcctggtgcggcgacatcgccgccgtggtgcgttcggtcggcaaacgcgcgccggcgggcaacctcacctgcgtttgcggcttcggctccgaagcctgggatacgctgtttggtgccccgcgccctcaccagctgcatccgttcagcccgatcggcagcggggaacgcgtcgccgtcgccacgcccggcgacatcctgctgcatatccgcgccgatgaaatggatctgtgtttcgaactggcctcgcagctggtcggcaagctcggcgacgccgtgacggtggtcgaagaggtgcacggcttccgttacttcgatcagcgcgccatgatcggcttcgtcgacggcacggagaacccggaggggcacgaagccttcgactacacggtgatcggcgacgaagacgcggcgttcagcggcggcagctatgtgctggtgcaaaaatacctgcacgatatgcagggctggaattcgctcagcgtggaaacgcaggagaagatcatcggccgccataagcagtccaacatcgaactggatgaagcggtcaaaccgtcgtcatcgcacagttcgctgaccaccatcaccgacgagcaaggcaacgaggtgaaaattctgcgcgacaacatgccgttcggccgccccggcctgcgcgaattcggcacctactttatcggctatgcgcgctccccgcagccaatcgagcagatgctggaaaacatgtttatcggccgcccggccggcaactacgatcggctgctcgatttcagccacgcggtgaccggcaccctgttcttcgtgccgtccgccccgctgctggaagcgctggccgatcgcagcggcgccgaactgcactga

SEQ ID NO: 423329 - DNA, 918 bp, Serratia marcescens
atgataattcgcccgaaccagaactggttttttcgcctgttcgcctggcacggttccgtgctgtcaaagatcacctttcgcctgtcgctgaacgtgctgatgtcgatagtggcggtgatcagctatcaatggtacgaacagctcggcgtgcatttgaccatcgcgccgttcagcctgctgggcatcgccatcgcgatttttctcggctttcgcaataacgccggctacagccgctttgtcgaagcgcgcaacctgtggggctcgctgctgattaccgagcgctccctgctgcgccagatcaaaagcctgctgccggacgaaccggcggtgcaccagaaggtcgccaagctgctgatcgccttcagctggagcctgaagcatcagctgcgcgccaccgatccgaccgccgatctgtaccacaacctcagcagcaaagagctggccgaagtgatcgccagcccgatgccgaccaaccgcatcctgctgatgctgggccaggagatcggcaagctgcgccgacgggggctgctgagcgacatcaccttcgagctgctcgacaacaagctgagcgagctgtcccacgccctcggcggctgtgaacggctcgccagcacaccggtgccgttcgcctataccctgatcctgcagcgcaccgtttacctgttctgcagcctgttgccttttgccctggtgaccgatctgcattacatgacaccgtttgtttcggtgttcatttcctataccttcttatcctgggactcactggccgaagagctggaagatccgttcggcgtgtcggccaaccatctgccgttaaacgccatctgcaacaccatcgagcgcaacctgctggaaatgaacgaccaaagcccgctgccgccgccgatgaaacccgacgagcactttaatttgatctga

SEQ ID NO: 423330 - DNA, 843 bp, Serratia marcescens
atgaacaagcacctgctcctcgcagaaaccgacgatatcgaacaggaatgcctgtcgcgccacgcggtctggcagcgcaacgatctggcccaggcgcaacaggattggctggcggaagaagtgccggtcgccctggtgtacaacggcatttcccacgtggtgatgatggcgacgccgaaagatctggcggccttcgccatcggtttttcgctgtccgaaggcatcatcgcctcccccgacgatatctacgacatccgccaacagccggcctgcaacggcattgaagtgcatgtggaactctcgagccgccgttttatgcagctgaaagagaagcgccgcagcctggccggccgcaccggctgcggcgtctgcggggtggagcagctgcaggaggtcgcccagcccatcgcgccgctgcccttcacgcaacgcttcgatttggccctgctcgaccgggcgttggcgcagctgcaggaggtgcaaacggtggggaaactgaccggctgcacccacgcggcggcctggatccagccagatggcgcgctcagcggcgggtgtgaagacgtcggccgccacgtggcgctcgacaagctgctgggctaccgcagccaacaggcgtggctgcaaggggcggcgctggtgtcgagccgcgccagctatgaaatggtgcaaaaatccgccatgtgcggcgtcgagatcctgttcgccgtttccgccgccacccgcctggcggtcgaggtggccgagcgcagcaacctgactctggtgggcttcagcaagccagggcgcgccaccgtctatacgcacccgcagcggctctggcaatcgacgacggtggcctaa

SEQ ID NO: 423331 - DNA, 330 bp, Serratia marcescens
atgattatgctgagcaattcaaggttgtatgctttttcaccagctgaacccctgacgttaccgctgtttgccgatcgcgtggcctgcggctttccttccccggcgcaggactatgtcgagagcaggctggatatcggcaagctgctggtgcggcaccccaacgccacctacttcgtgcgcgccagcggcgagatggagcgtgcaggatggatcaggcactaccgacagattaagaaactgagcatccgagaaacagcagacgcgacaggctacagtacttcccaagtttgtcgcattcaggccttctataaagaagttgagactgattaa

SEQ ID NO: 423332 - DNA, 435 bp, Serratia marcescens
atgattatgctgagcaattcaagattgtatgctttttcaccaggtgaccccctgacgttaccgctgtttgccgatcgcgtggcctgcggctttccttccccggcgcaggactatgtcgagagcaggctggacatcggcaagctgctggtgcggcaccccaacgccacttacttcgtgcgcgccagcggcgagtcgatgatcgacggcaatatccaggatggcgatctgctgatcgtcgacagcgccctgacgccggagcacggcaatatcgtgatcgccgcggtggacggcgaattcaccgtcaaaaaactgcagcgccaccccgacgtgcggctgttgccgatgaatcccgcctatgcgccgatcgtgttcgacgacgaggcgcagctggagatcttcggcgtggtgacctttatcgtctacgcggcgcggtaa

SEQ ID NO: 423333 - DNA, 2538 bp, Serratia marcescens
atggccataaaaaacaagaacggcgcagggcgtacgttcacatcagccaaacgcattaccgggaagcgcgtcgctatcgggataggatgcgcactatcgggcatgctcacctccgcgatggcggcacccggtgcgtcggcatcaccctcggcggtcgaacagcccgctatcctttccttcgccattcccgccggtgatctggcgcccgccttgcagacggcggccgctaaggccggcgtgatagtgattttcacgcccgaacagacgcgtggaaaaagcaccgcgggcctgcagggacattatcgcctcaccgacgcgttcaatacgctgttggcgggcagcggattgcgcgctcagcaaaccgcacagggatatcggttggtcgacgccgggccggttcagcctttgacgataccggaactgtcggtggtcggcggtttgtccgacagcgtcgccgccggccgttcggtactggataaagaagacatcgaacgcgtacaggccgataacatcgccagtttgcttgatcgcttgcccggcgtagggatggcgggatcgccgcgcccgggcggccaaagcctgaatatctggggcatgggcgacatggaagatgtgaaggtggtgctggacggcgcgccgaagggatttgagaaatatcggcagggttcggtattcatcgaacccgaactgctgaaaaaggttgaggtcgataaggggccgcacaatctgttgaacggcaatggcggctttggcgggaccattacgctggagaccaaagatgccggggatatgctgctgccgggcgaagattttggcggcttgctgaaatacagctaccacaccaacgatcgccagggcatttacagcggtgcgttgtacggccgtacgccggaaggattcgccgacggtttgatctacatgagcaagcgtgacggcggcaacctgaagcggccggacggcacgcgctttgcctattccgccaacgatcaggcttcctacctgttaaaaaccaatatttatctgagcgaggcgcaaacgctgacgctgtcggcgatgcgctccgattccgatggctggcagccttttgccgccaagcgggacgatatcgccgcgcccagccaggcggatatcgataaatatggccgggaagacgcgtggcgccgcattctggtgtatcgcgaccagacggacaccaattactcggtgaaatggaatctggcgccggaagcgcagccgttgctgaatctgacgctgtcttatgcctattcgaagacagaacagcatgacaagcggccagattccgcttcaaagttcagctatctcggtacgttgggcaatgaaagctgggtgaactataccgatcggcagtttgacgtcagcaatgaaagccgtttcgccagcgggccgctggagcacaagctgttgctcggcgcgcggtggcataaacatcagcgcgataccctgatgtattacccctcgcaggtgaaaaacgccagttacaactacggctatttccagccgtattacatgccggcgggcgaacaggaaacccgcagcgtttatctgcaggatgcggtcagcttcggcagcctgaccgtgacgccgggcgtgcgttacgatcatgtgaccaataccgggcaaccgaaccgggcgccgcgctataacgacagcgatccgctcgtgggccatgattacagcagcgtgacctataccggctggtcgccgcatttgggcgtgatgtggaaagcgacgtcgaatctgtccctgtttgccgacgttagccgcacctggcgcgccccggtgatcgacgaacagtacgaagtgcaatacgccgcttccagcgtgcccggcaccagccgcggcctgcaggtggaacgcatgacgggcgtgcgccttggcgcggtgctggacttcaacgatgtgttgatggcgcgagacagcctgcagatccgcactacgctgttccgcaatcgcggcaaggacgagattttctatcgtcgcggcgtagtgtgcgacgccgcacggcatgggggccaatgtgggcaaccgttgtcgaactatcgcaacttgccgggctataccattgagggcgtggagctcgaatcgttttatgacagcgaaagcctgttcggcagcctgtcgttctcctcgattcgcggcaaacgcgacgcttcaccgcgcgatccgtggggcaacgaaacctggattgccgaaattccacccgttacggcacacgcgatgctgggtatgaaagtaccgcagtgggacatggccttcggctggaccggcgattttgtgcgtaaacaggatcgttcaccggccgacggcgatccgatggccgttgtctgggcgctgccgaaaacgtcgggttatgcattgcacggcctgttcgcctcgtggcagcccagcggtttgcagggcttcgaagctcgcgtcgcggtggacaacctgttcaaccgcgattattacccttacctgggcgaatcggtgtccggcgtagggcgcaacatcaagtttagcgttagccaacgtttctga

SEQ ID NO: 423334 - DNA, 513 bp, Serratia marcescens
atggcaaggaaagaggccgcggcagccaacgggtttgctcaacagctttaccttgagcaccacagttggctatgccattggctgagacagaaggtcgggtgcgcgcatcacgccgaagacctggcgcaggatacgttcatcagtattttactgagtccgcagttgcttgccattcggcaaccacgccccttcctggcgaccgtggcgcgccggctggtggcgaattattaccggcgtaaaacaatcgaagagagctatctgcaggccttgagcgagctgccggcgatcgaggcgccctcgccggaggtccgtcaacaaaccctcgaaatgctcgaacagttggatcaggcgttggacggattgccggcgcacgttcgcgaggctttcctgttggcgcacctgcagggcatgcgttattgcgacatcgctgaacgtttgcgggtgtcgaccagttcggtgaaacaatatctgcagcgcgccaatttgcactgtttctttgcattggcggcgtaa

SEQ ID NO: 423335 - DNA, 918 bp, Serratia marcescens
atgatggaatcggatatcgatcggcagagcgcgcgtgaggccgccgcctggttaacccagctgatgtcggaagaggcaagcgacgcggatagggaaaactggcggcgttggtgtcaggcgaaaccggaaaatgaacgcgcctggcggcatatcgccgcgttttcatcccgtttttctctgcttaacggggcggcggcgcagcgtagtctgtcgcagttgccaaacccgcaacgccgccggttgctgagaagcctggcggccatcggcgtggtagggtcggttggcatcggttctggcgcgctgccatggcgcccctggctggcggattaccgcacggcggtgggggagcagcaaaccgtcgcgttggcggatggcgcgcagttgatgctgaacacgcaaacggcggtcaacgtcagccttcagcaggccgcattgctggaaggtgaaatgatggtgaatctgccgccggaaagcggcgcgttgacggtgaggctgccgcagggcgagatcgtggcgcaggctgctcgcttcagcgttcgcctgtgggaaacctacagtgatatcgccgtttatcttggccgggtcacaatcctttcgccggcgcatcggaacgcggtgctcaacgccggtcagggcggcagattaagccggcaaggcattggcgatccgtaccgcgtgacgcaagagcccggttggcggcaaggcatgctgttggccgacaacatgcggctggacgacttcctgatggagctggggcgttatcgtcagggcgttattcgctgccggccggaggtcgccggcctgcggctctccggtgcgttcccgctggctgaccccgagcgcgtcattgcggctctgcccggtgcgctgccggttagggtaaatatgctgtcaaaatacttcattaccgtgtcctaa

SEQ ID NO: 423336 - DNA, 819 bp, Serratia marcescens
atgttgaatcacaacgtattacctgccgatttatctttaccgcctacaggcgggcgattgcgctgggctaccgccaatgtgttggcgttgggtctgcatggtgcgttgttgtttggccttggttatcacctggtgccaccgttgctgcccgcggcgcaaccgatggtgttgatgatggttgccgagcaggcggaatcgatccccaacgcagagccgatgccaaccggtgtgcgccaggtgcaggcagtggcgcaacggcaggccaaccgggaaccggaggcggcgatgcctccgctgattcatgcgccgcgtgcgacggagcagcagagcaaggccaaagggcaacggaacgaccccatcagaccgaagacggaaccgccgcgcccaaggcaaaaggaacaggaaaaaatagcgtctgcaagctcaatagcatcaagcaccagcgcgccgccgtctctggatggaaagcgtgttgccgcgccgcaaaccagcgtggcgtcgcagccgagccaggatgcctcggtctggagcggcctgctgttggcgcatttgagccgtttcaaacgctacccggccctggcggtacgccagcagcgccagggcattgttcaggttgccgtgacgttggatcggcaggggaacgtgctgggcgtgaagctattgcgatcgagtggggttgcttcgctcgaccgggaggcgcttcagttaccgcagcgcgcttctccactgcccgcgcccggcaacgagatcgcagcggggcaggcggaattcagcgtgaacattccgattcgtttcgatctgcgtgaagttcgccgttaa

SEQ ID NO: 423337 - DNA, 1287 bp, Serratia marcescens
atgttcgccctggtagacgtcaacagcttctacgcttcctgcgagaccatctttcggcccgatctgcgcgggcggccggtgatcgtgctgtccaacaacgacggctgcgtgatcgcccgcagcgccgaggcgaaggcgctgggcgtgccgatgggcgcgccttatttcaaaattaaagaggagatgcaccgccgcaacgtcgcggtgttttcctccaactacgcgctgtacgccgacatgtcccgccgggtgatggacacgctggaagagatggcgccggcggtggagatctactcgctggacgaagcctttctgcggctggacggcgtggcgcattgcgaagcgctggagcagttcggccggcgggtgcgcgatcgcatccggcgcgagctgcatttaacggtcggggtcggcattgcgccgagcaaaacgctggccaaactggccaacttcgccgccaagaaatggcgcggcaccggcggcgtggtggatttatccgatccggcgcgccagcgcaagctgctggcgctgatcccggtggaagaggtatggggcgtggggcgccgcctgactcgccagctgcaggcgatgggtattcacaccgcgctgcagctggcggactgcgatacccggctggcgcgtaaaaccttcagcgtggtgctggagcgcacgatacgcgagctgcgcggcgagtcgtgcctgcaatgggaagatgaggcggcggcgaaagaacagatcatctgttcccgctcgttcggccagcggctgacgcactacccgcatatgcgcgaggcgatctgcagctacgccgaacgcgccgccgaaaagctgcggcaggaaaagcgctattgccgcaacgtgtcggtgtttatcaaaaccagcccgcattcggcgggcgaggggtattacagcaatatgggcaccgcccggctgcaaacgccgagcaacgacagccgcgacatcatcgccatggcggtgcgcgcgctggaaagcatctggcaggaagggcggcgttatctgaagggcggcgtggtgctgggggatttcagcgccgccgccatggcgcaaatcgatctgttcgacgactgcccgccgcgccgcaacagcgagcggttgatggcgaccctcgatcgcctgaatcaggaagggcgcgggcgcgtgtggttcgccgggcaggggatcgtcaagccgtggcaaatgaagcgcgaaatgctgtcgccggcctacaccacccggctggcggatattccggtggtgcggctgtcgccgcgaaactcgcgccggtag

SEQ ID NO: 423338 - DNA, 984 bp, Serratia marcescens
atgaaaataggcattgtggttttcgacggcatcattccctttcacctttcggtgccctttgcggtgtttgaaaaagtgctggcgccttcaggcgcgccgctgtgcgaactgaccctgtgcgccgccgagcctggcgagctgaaaaccaatgccggtttttccattgtggtcaaccttgggctcggcgcgctgagcggcatggacatggtgatcgtacccagttgggacgctccggcccgccagccggaacccgcgctgctggatgcgctgcgccatgcccatgccgccggcgccaccgtcgtcggcctttgcatgggcgcattcgtgctggcggcggcgggcctgctgaatcatcgccgggccactacccactggcgctggctgccggactttcagcaacgttatccggcggtgctcgtcgaaaatgacgtgctgtatctcgatgaaggggatgtcgtgacgtcggccggcaccgccgccggcatcgattgctgcctgcacctggtgagaaaacgctggggcgcggacatggcggcgcaggcggcgcgccagttggtggtgccccctcaccggcaaggcggacaatcgcagtatgtcgcgctgccggtgcaaaatacccgccagggggataacttttccttggcgctggcctgggcgatggaaaacctgcatcagacgctgtcgttggatagtctcgcgcagaaagcctgcatgagccgccgcagctttacccgccggtttcagcaaaccaccggcacccgcttttcgctttggctgctgaatcagcgcctcatcgccgcacagcgtttgctggaaaaaagcgactgctcggtggaaaccatcgcggaaaaggtcggctttccctctaccacctcattgcggcgccactttcttaagcaactgaacacctcgccctcgcgctaccggcgcgagtttcgcggcgacagccgcaccaccggaatatccgccagccgggtggtgtag

SEQ ID NO: 423339 - DNA, 714 bp, Serratia marcescens
atgaaagctttggttcatgccaccttgctggccgccatgatgggcgccgcttccttcaatgcattggctcaggagaccgtaaacgtgaatagtaaaaccatcagagccatgtcgggcgcccccaccaccactgccctggccgccgccaaaacggcgctgatcgtggtggatatccagaatgaatattatgcaggcaataacttccgcggcaagatggttatcccggatggccagaaggtgttggataacagtaacaagctggttgagttcgcccgcaaaaacggcatgccggtctatttcgtgcggcatctggggccggccaacggcccgctgtttgccgaaggctcggtctacgccgaattccatcaggcgctgcaacccgctaaaggggatgtagtgatcaccaaagcgacgccgagcgcgttcgtcggcaccgttctggatgcgcaactgaagaagcagggcatcaaaacgctgattgtggccggtttgatgacgcacatgtgcatctcttctaccgcacgcgacgcggtgccgctcggctatgatgtgctgatcccgcaagacgcgacggcgacgcgcgatctggacgacggcgcgggcggcgtggtcgatcatcgcgtgttgcagcgggcggcgctggccgcggtggcggacgtgtttgcggaaatcaaaactaccgagggcatcctggcgctgccggtgaccaaataa

SEQ ID NO: 423340 - DNA, 1344 bp, Serratia marcescens
atgcctggatttaattatggcggtaaaggggatggaactaactggagttctgaacgtggtacgggcccagaacctgggggcggtgataagggccattccggcgatcgcggcggcgccagtgttggcaacagcccggaacagcaacagatagcggcgatccaaaacgatccggcgttgcgcatgaagctggcggcggtgatcaaggcggcgcgcagaatcaacccggatgcacaattgcgtattgaaagcgtcagcccgtccggcacgctgagcctttctgccacaggtctgacggccgatcaggctaagcacattggcctgggtggactggtgatgggagtcaacgccaagggcggaatggtggcgatcggggatatcgaaaccggccatgcgcgcaaaacttcaacccccggtaaaggtggtagtaatggcctgaacgccgggcagatcggcgcctcttcgttaggcagtttcgtgacagactcacaccgcgatcggcccgtcaacggctggcatggtaacggcaaaagcggtgagttctcgacgacccgcacgaccgggagttatttcggctttcatcatttgaaggtggaaaagcaagccggaatggcgacctacagtctctactataaggccaataagaaccggcccgcgtttatcgccgtggtgagaggggataacctgaatggcatggaggtgaaatatgccaacggtaagccggtgaaatctccaggcacggtaaaaaatatcgttaaggagttcgtcgaatatcaaaatgcggaattaaaagcgatcaaggatggcgtcagcctggccgccggcatcaataaagacattgcggaaaagctcggcgcgaaatacgccaagctcgccaaggatttggaggcaggaattcaaggcagatatatccgcaatgtgcaggatgcggaaaaaacctacgagcaattgacgaagggcttgaacaaaaagctcaaggcgcaggataaagcggcgattgtcgcctggttgaaaaagatcgatgcggaacagtatgcccgcaatgcgcgggtattgggcaaggcgtttaccggcgtggattgggcgattaaaggggcggacctgacaaacgccgcgatcgagggtttctctaccggcagctggaaagcgttccgtaatcagcttgaggcgctcgggttgtccatcggggcaggctacacgctctccgctatcgccgcgtttttcgcgccgacgctggtgtcgtcgacggtgggcatttttgcattcgcttatctgtttggctgggctaccagctatatcgatgcggctcttgcaggagaactggaaaaactgattgtggatctgtaa

SEQ ID NO: 423341 - DNA, 417 bp, Serratia marcescens
atgattaaatcctccatcacccacccgccgctgctcgccgcgctggcgcaatgcgggcataaaacccaggtactgatcgccgacggcaactacgcctgcgtgacgcacgcgccgaaagacgccaccgtggtctatctgaacctggcgcccggcacgctcgccgccccgccgatcctggaaaagctgctggcctgcatcaacgtggaaagcgccgcgctgatggcctgcccgccggacttcaccaacaccatcgaagccgaatatcggcagctgctgccggcacagtgcccggtcgaacatctgccgcgcgaggcgttttacgccgcggtcaaatcggatcggacgctgctggtgatcgcctccggcgagcagcgccgcttcgccaacctgctgctgacggtggcgccggtggtgtga

SEQ ID NO: 423342 - DNA, 762 bp, Serratia marcescens
atgggcgatcttgcgggcaaaaaggtgtttatcaccggggcggaacagggcatcggccgcgccaccgcagagcggctgatcaaggccggttgcgacatctattttcactatcacagcgacgaaagcggccccaaagcgctggtggcgctggcccattcattggggcaaaaggccgcttacggctacgccgatctcatcgatagcgacgaaacgctgcgctgcgtctcggccggcgccgagtttctcggcggcatcgatattctggtcaataacgtcggcggcatcgtcgggcgaaaatggctgggcgagatcgaccgcgccttctggcaaaccgtgatcgacgtgaacatgaccaccatgctgaacgtgacacaaagcgcgctgccgttcctgaaggcggcaaacggcgccagcatcgtcaacctggcgtcgcaggccggccgcgccggcgggcactctggctcgctggtctattccgccaccaagggcgcggtgctcacctggacgcgctcgctggcggcagagctgggcgaatacggcatccgggtgaacgcggtggcgcccggcctgatcctcggcacccgcttccataatcgccacaccacccaggcatcggcggaggaaaccgttcgcgccatcccgctgggccgtgcaggcacgccggacgacgtggcgcgcgccatcgccttcctggcggcagagtacgacggcttcatctccggcgccaccctcgacatcaacggcggcatctaccgcatgtaa

SEQ ID NO: 423343 - DNA, 1308 bp, Serratia marcescens
atgaaaataagcaagccgcaggatattgaacgcagcgctatcaggaaattgacgctgcatattgtccccctcatgattttattgtatttcctggcgtttctcgatcgcaataacatggcctacgccgccaaagcgctggaagataacctgggcctgaccgcctcggccttcggcttcgcctccgggattttctttatcggctatttcctgtttgaaatacccagcaacgccggcaccattaaattcggcccgcgcatctggttcgccagaatattaatttcctggggcatcttcgcgaccctgctcggctttgtacgcacgccgctggagctgtatatctgccgttttatgctgggcgtgtgcgaagccggattctttccctcggtggtgtattactttacggtgttcttcccggaaaaataccgcaccaaaattctcggcatgttcatcatcgtccagccgctgtccaacgccgtcggctcgccgatttccggctttattctcaatattcagcatgactggttcgggttcgccccctggcagctgctgtttatcctcgaagggttgccgccgatcgtcatcggcctgctgatcccgttcctcatcaagaactcgcccaaggacgttggttatctgaacgtggaggaaaaggcctggctgatgagcaacgccggccgctccaaatccggctctaaaatcacgctgggcgacttcctgaaagggatgaagaacaagaaatacctgctctacgcactgctcaacttcggcatggtgtgcggcatttacggcttcggcacctggctgccgtcgatcattaccgccctctccggcggcgatatcttccgcgtcagcctgctggcgctcattccctacggcctggccgcgctgctggtgtacccgtggagcctgtgggccagcaaaaccaaaaagctcggcgtattcgccggcctcagcatggtggtcgctgctatcggcctgatgggggcggtgacgttttttaaatacgatccgctcgtcgcgctgtcgttcctgtgcatcgccgctatcggcatctacaccgccgtaccgccgtttttatctatgcccgccaatatttccaccggcgcggccgcggccgccgggctggcggtggtcagctgcatcggcaatatcggcggcttcgtcgcgccttatgcggtgggcgtgctgaacgatctgaccggcagcagcgcgccggggctgtttttcctggcctcgtgcctgctggccaccgggttgatctgcattttctactgcgcgaaacagcgtgaaggcgtcatcaatacttaa

SEQ ID NO: 423344 - DNA, 1038 bp, Serratia marcescens
atggcaaatattcgagatgtcgcgcggttggccggcgtgtccatcagcagcgtgtcgaacctgctgaataaccgcagccaccagatgagcgcgcagacccgtgagcgcatcgaacaagcgatggcaaccctggggtatcggccggcccgaacggcggcgttgcccgcaccgcaggcgaagatcatcggcctgctgctgccgtcgatcgtcaacccgagcttttcggcgctggcgcatgcggtcgacggcgcggcgcgggctcaccgttaccgcgtcttgctcggcaacgcctaccgccaggaacaggaagaggccgcgtttatcgacgatatgttcctgcatggcgtgcgcggcatcatcgtggcggcgagcgacattcgccaaacccattttgtccgggccgccgagagaggcatgaagatcgtcagctacgacagcccgttcgccgagcagatggccaccgatgcccggctgttcgacagcgtatcgatggacaatatcgccgccgggcgcctggccgcgcagcacctgctcgaacgcggctgccgacacattgtgttcgccaccgaagcgacgctgaccgtcgggcgcagccacaagatcgacggttttctaagtgtgctggggcacagcctgagcgaacgccaacgggtgatcgaaggcaaagccaacagcgcctacggcgacacggaaatgttcgaattagggctgacgctggcgccgcgcgtgctcgcgctgacgccgcgcccggacggcatcgtggcgattaacgatgcgctgggcatcgggctgatggtggggctgcgcgccgccggcgtccaggtgcccgcagacatctcggtaatcggcatcgacaatatcgcgctggccggcctggccgaaccggggctgacgtccgtcaggccgccgctggcggagatggcgcagctgatggtcgagcgcctgatcggccgcatcaacgatgatgcgcaaccgcccggcgagtttctcttcccgccgacggtcatcagccggcgctcggtcaaagccgccggctaa

SEQ ID NO: 423345 - DNA, 876 bp, Serratia marcescens
atggatccgctcagccaactgttgatgcttaacgacatgcgcggttatgtggcgcgcgattgccatttcagcggcgagtggcgctcgccgcatgccgccggggagtggagccagatccgctggcacatggtgctggcgggcagctgtcggctggagatccccggcggccggccggtaccgctggagcaaggcagcctgctgttcttgccgcacaactccgcccaccgcctactgccggagagggccgacagcgccacgcacctgctgtgcggcgtgcaaatcttgccgcacagcgcgtcgccgctgctggcgagcctgccggaatgtttgctgttcaacagccgccaacaggggcggctggcgctgctgcaggcgaccggccagctgctgagcgatgagttcagccaacagggccaggggcacaacgccattgtcagccagaccatggcgctgctgttcgcgctggcgatccgcgcctggctggcccagccaaatcagagcggcaatctggtcgccgcgttgctgcatccgcagttgggcaacgtggttgaacagatgctgcgccgcccgcaacatccctggacgctggttgaactgagcaaacaggcccatatgtcgcgcgccaacttcgcccgcgtctttcgtcaggtcacgcagcaaacgccgctgcaggcccttaccgccatccgcatgcagctggcggcccggctgctggcgcgccaggcgttgccgctgagccgtatcgccgaacaggccggctattcgtcggaggtggcgctgcacaaagccttcacccgccacttcggcctgacgccgggaaaattccgccagcaggccgccgagacaccgccggacgcttgcccgatcccggcgtaa

SEQ ID NO: 423346 - DNA, 573 bp, Serratia marcescens
atgaaaatactattctttctgagcaagggcgacaagctgggattaacgctgattcgcctcagcatcgccatcgttttcttatggattggtctgctcaaattcatcccttacgaagcggacagcatcacgccgttcgtcgccaacagcccgctgatgtcgtttttctatgacatgccgcaggactatcaggcgcacctgacgcacgaaggcgaactgaacctcgccgcccgcgcctggcagcaggccaacaatacctatggcttctccaacggcctgggcgtggtggaagtggcgatcgcgctgctggtgctggccaacccgttctccaaatggctggggctattgggcggcatgctctctttttgcacgccgctggtgacgctgacctttttgatcaccaccccggaggcctgggtgcccgcgctgggcgatgcgcatcacggtttcccttatctctccggcgccgggcgcctggtgctgaaggacaccctgatgttggcgggcgcggtgatgatcatggcggattcggcgcgcagtttgctcgagaaacagtggcgagggaaggtcgcatga

SEQ ID NO: 423347 - DNA, 456 bp, Serratia marcescens
atgagcgtcatgaaccgggccgtggccggcagcctgatgatgctggcctgttctgccgtgggggaggggacgatggggcaagaaacccgaacggtagagagcgcctacgcttatcagcaaacgcgtcagcgcattatcagcacggccgagcagaagggcgtgacgctgttcgccgagttcgatcacgcgaaagcggcgcgtgagcatcatctggcgatgccgcccaccacggtgctggtgctgggcaacccgctggcgggcacgccgctgatgctggcgcggccggcgttggcgctggatctgccgttcagggtgctgattgcgcaagacgaacggggcaaaacgcaggtcagctaccacccggcggaaagtctgaagcggagcgccggggccgacgaacgacagatcgcggcgctgaggccgctggagcggttagttgaggccgcaatacgctga

SEQ ID NO: 423348 - DNA, 1338 bp, Serratia marcescens
atgtacgattatcaggcgattatcatcggttttggcaaggccggcaaaacgctggcggcctttctggccgggcagggatggcgcgtggcgatggtggaggcgtcggcgcagatgtatggcggcacctgcatcaacatcggctgcatcccgaccaaaacgctggtgcacgatgccgagcttcacgggccgggcgaacaggcgttcagccaggcgatggcgcgcaagcggcaggtgaccggcctgctgcgggagaaaaattatcaaaacctggcggggcttgaacaggttacggtgatcgacggacgggcggagtttatcgatccgcatcgcatcagcgtgcagggcgcggcgggaacgcaggtgctgagcggcgagcgcatcttcatcaacaccggggccgtcagccgctggccggcgatcgacgggttggatcgctcgcagcggagttacgacagcaccggcctgctgcagttgacgcagcggcccgcgcggttgggcattattggcggcggttatatcgggctggagttcgcttcgatgttcgcgcagttcggcagcgccgtgacggtattcgaagaggcggatgcgttgctcggccgggaagaccgcgatatggcgcaggcgatacagcaaatcctgagcgacgccggagtcagcttcacgtttaacgccggcgtgaagcaggtgcgcgatgtggaagggggcgttgaggtggtgcatcagggcggcgtgcagtcgttcgatgcgctgctggtggcggccgggcgcgggccgaacaccgcaggtttgcagctggcgcgcgccggcgttgagacggatgagcgcggcgccgtgcgggtggacgcgcaactgcgcagcagcgtgccgcatatttgggcgctgggggacgtcaacggcgggccgcagtttacctatatctcgctggacgatttccgcattgtgcgcgacagcctgttcggcgcgggtaaacgcagcacggccgatcgcggcgcggtgccttactcggtgttcatcacccccagcttctcgcgtatcggcctcagcgaagatcaggcgcggcagcaggggcgcgacattaaggtcgccacgctgccggcggcggcgatcccgcgcgcccgcgtgctgggcgacacgcgcggcctgctgaaggcggtggtcgatgcgcagaccggccaaatcctcggcgtggcgctgctgtgccgcgatgctcatgagacgatcaacatcgtcaaaacggcgatggacgccgggctgccctatacccggctgcgcgatcagctgttcacccatccgaccatgagcgagtcgctcaacgacctgtttgggctgatagggtaa

SEQ ID NO: 423349 - DNA, 843 bp, Serratia marcescens
atgaacaaacgggaattagaaagcgcgattgtcaccgatttttccaaacgcatgagctacggcgactacctgtgcctggaccaactgctggactgccagcacccgctctccaacccgccgcatcatgatgaaatgctgttcgtgatacagcaccaaacctccgagctgtggatgaagttgatgctgcacgagctgcaggcggcgctgcggctggtgcagcaggacaaactcagccactgcttcaaaatcctggcgcgcgtcaaacagatccagcggctgttgttcgaacagtgggcggtgttggaaacgctgacgccgtcggagtacgtcgagtttcgcgacgtgctgggcagctcgtctggcttccagtcgcaccaatatcgctcgatcgagttcctgctcggcaacaagaatgcggcgatgctggcggtgttcagcagcgacgcggaaaaacacgccgcgctgaaggcgatcctcgaagcgccgagcctgtacgacgaatacttgctgtacctggcgcgccacggtttgccgatcccgcaggagtgcctcgagcgcgactggacgcagccctaccagcgcaacccggatctgctgccggcattcaaagtgatctacgacaacccgcaaacctactgggaagcttatgaaatggcggagaagctggtggatatcgaagagagcttccatctgtggcgcttccgccatatgaaaacggtggagcggattatcggctttaagtcgggcaccggcggttccagcggcgtcagcttcctgaaaaaggcgttggatctgacctttttccccgagctgctggacgtgcgcaccgaaatcggcgcctga

SEQ ID NO: 423350 - DNA, 468 bp, Serratia marcescens
atgagcgtgaggattatcgataaggcggcggagaaggtggtgggggtgagagtcgtggggccgtatccgcagacgatcccacagggctcgcagcaactgctggcatggcggcagcgccacggcgtgccgttcggcaaatggctggtgctgtattgggacgatccggcggaagtggcgccggaaaagctgcgcgccgacgtggtgatgagcgtggcggacgatttcgcgctgccggcggagagcgagggcgttaccgtgctgacgctgcccgccgggcagtacgcggtctaccacgtgcgcatcagcgatggcgacttcgagcgggtgtggggcgagttctaccagaagctgttgccggccagcggctatcagccggttgagggggtaagctatgagcactatctcaacgactgcgaagccgacggctatttcgacctcgatatttaccagacggtgaagaagtggtga

SEQ ID NO: 423351 - DNA, 1929 bp, Serratia marcescens
atgttggatcgcattattgcgcacacgccgctgggccaggagctgctgctgttccgctcgctggacggtatcgaggcgctttccacccctttcgacttctctattgaattgctgagcaccgacgcgcggctcgatcgcaaagcgctgctcggccaaccgctgacgctggagatcccgactcagggctttctcagcgccccgcgctacctgaacggcaagatcaccgccatcgccgtcagcagcgaagagatcggcggcacgcgctacgcggtatataacctgcacgtgcagccggatctgtggccgatgaccaaggatcgcaacttccgcatcttccaggaacagacggtgccgcagatcgtcaagactctgctggcggagcacaacgtgcagctggaagatcagctgaccggtgactatcgcctgtggggctactgcgtgcagtacaacgaaagcagcttcaacttcatcagccgcctgatggagctggagggcatctattactatttcaaacacgagatgggcaaacacacgctggtgctcggggatgcgccccaccaccaccaaccctaccccggctacgagatgatcccctaccacctgacgccgtccggcggcagcaccagcgaggaaggcatcagccagtggacgttgtccgatcgcgtcacgccgggcatctacagcctggacgactacgatttccgcaagccgaacgcctggctgttccaggcgcggcaaaacccggtctcgccgacgccggggcagatcgacgtctacgactggccgggccgctacaccgagcatcagcagggggagttctacgcccgcgtgcgccaggaagcctggcaggccgagcatcagcagatccggggcaccgccaccgcgatgggcatcgctcccggcagcacctttacgctgtataacgccccgcacgccgacgacaaccgcgagtacctgacgctgcaggccaactaccatctgaaagagaaccgctacgccagcggcgacgatcagagcagcgaacaccgtatcgacttcaccgtactgccggcggacgtgccctggcacccgccgcagcaggccacctggccgaaaacccacgggccgcagaccgcccgggtggtcggcccggccggcgaatcaatctggaccgacaaatacggccgcatcaaggtgaaattccactgggaccgcttcgggccgaaggacgacggcagctcctgctgggtgcgcgtctccagcgcctgggccggccagggctacggcggcgtgcagatcccgcgcgtcaacgacgaagtggtggtggactttatcaacggcgatccggatcggccgatcgtcaccgggcgcgtttataacgaagccagcatgccgccgtgggcgctgccggccgccgccacccaaatgggctttatgagccgttccaaggacggcaccgccgacaacgccaacgccctgcgtttcgaagacaaggccggcgccgaacaggtgtggatccaggcggaacgcaacatggacacccaggtcaaaaacgatgagagccacagcatcgctaacgaccacacccacctggtgggcggcaaccagatcaaacgggtggtgctcaatcaggccagcggcgtcaaaggcgaggcctcggcgctgaccggcaaaacgcgcagcgacgccgtggtcaacgcctttaccctcggctccggcgaatcgctgcggctggagtgcggcgaaagcgtgatcgagctgctggcgaacggccaaatcaacatcaccggcaccagcttcaatatcacggtgaaagaggacggggagatcaataccggcggccagctggatctcaaccagcccggcggcgccgcgcgcaccgccgcgccgggcggcggccatcaggcggcgatccagagcgccgtcgatcagctgttccctaaagagtag

SEQ ID NO: 423352 - DNA, 1434 bp, Serratia marcescens
atgtcgggaaccgggataaccaaaccgaattcgaacagcctgccgagcggctatcgattcaacgaattcgagatccaggaagcgatcggcgaaggcggcttcggtatcgtctaccgcgcctacgatcaccaactggaacgcaccatcgccatcaaggagtacatgccgacctcgctggcgaaacgcaacgacgatctcagcatcgggctgcgcggcgagcgcttcggcaaaaccttccaggccgggctgaacagctttattcaggaggcgcgcctgctggcgcgcttctcgcaccccggcctgctgcacgtgctgcgcttctgggaagagaacggcaccgcctacatgggcacccagttttacagcggtaccacgctgaagaacctgcaggcgcagcagccggagaaaatcgacgaggcgtggatccggcggctgctgccgccgctgttcagcgccatcaacaccatccatcaggaaggctacctgcaccgcgacatctcactggataacatccaaatccaggagagccagctgccggtactgctggacttcgggtcggcgcgcaaagagatcggcaacctgtcggacgaaacggagatcatgctgaaaccgggtttcgcgccgatcgagcagtacaccgagaacagcgacggcgaacaggggccctggaccgatatttatgcactgggcgccgtgctgcacacgctgatcgtcggttcgccgccgccggtcagcgtggtgcgcagcatcgaagacagctatcagccgctggccgagcgccgtcccgccggctactcgccggagctgctgcgcaccgtcgaccgcgcgctggcgctgaaaccggaagaccgcccgcagaccatcgatgaaatggccgagctgttgcatctgccgatcgccgatgaaaatgaaatcatcagcaccccggccgccgcgccggagaacctgctggtggccgccaacccggctgcggccgccgcggccgccggcgccgttaccgcgcgcagcacccaattctcgcggccgatgatggccggcgccggcgtcgcggcgctgctggcgatcggcgccgtcgcctggctgagcggcggcgaggatgataccccggccgtagcgcaaaacagcgaagcgtcaccggcgcagaaaaccctgacggagcagccgagcgcaccatctgcgccggtggaaccagaaaaggcggcgccgccaccgcagccggtggcgctggtgtacttcaagctgcagccgggcgagcaggtcagcctcgacggcaagccgcagcaggtgacgccgggcgaaaacggcttcgccagcctgaatctggcgccgggccgttatcagctggagatccgccacaacgatcggctccgccagcagcaactcagcatcgacaacgccggcacctggctggtcaatccggccaccgccggttaa

SEQ ID NO: 423353 - DNA, 2655 bp, Serratia marcescens
atgtctgaaatcagccgctcggtattatttggcaaactggatagcctgttattcacctctctggaaagtgcgacggcgttttgcaagctgcgcggtaacccctacgtcgaactggcgcactggctgcatcagctgatgcaatcgccggacggcgatctgcagcagatcgtccgccacttcgcgctggacgaggcgcagctggcgcgcgatatcgtcgaggcgctcgatcgcctgccccgcggcgccagcgccatttccgatctgtccgagcacatcgacagcgcggtagaacgcgcctgggtctatggctcattgaaattcggcgcggcgcgcatccgcggcgggcacctgctgctcggcatcctgaaaacctacagcctgcgccatctgctgaaggccatttctccgcagttcgagcgcatcaacgccgatctgttgatggagcagttcgccgccatcaccgctcactcggcggaaaacgcccaggatgcgccggcggaaagcagcgccgagaacgtatccggcgcggcgcgcagcggtgaaagcgtgctggcgcagtatgcccaggatctgaccgccagagcgcgcaacggcgagatcgatccggtggccgggcgcgatgaagagatccggcaaatcatcgatatcctgatgcgccgccgccagaacaacccgctgctgaccggcgaggccggcgtcgggaaaaccgcggtggtggaaggcctggcgctgcgcatcgtggccggcgacgtgccgccgcagctgcgcgacgtgaagctgtgcctgctggacatcggcatgctgcaggccggcgccggtgtcaaaggcgagtttgaaaaacggctgcaggcggtgatcgacgaagtgcagtccagcccgacgccgatcatcctgtttatcgacgaaattcacaccctgatcggcgccggcggcgcccagggtaccggcgacgccgccaacctgctgaaaccggcgctggcgcgcggccaactgcgcaccctcggcgccaccacctggtcggaatacaagaaatacatcgagaaggatccggcgctcacccgccgtttccaggtggtgcaggtgcatgaaccgagcgaagacaaagcgctgctgatgctgcgcagcaccgtcagcccgctggagcaacaccaccgcgtgctgctgctggatgaagcggtggacgccgcggtgcggctgtcccatcgctatattcctgcccgccagttgccggacaaggcggtggcgctgctggataccgcctgtgcgcgcgtggcggtcagccaacatgccgagcctgctcaggtcgaagactgccgccaccgcatcgatgcgctgcagatagagttggatatcgcccgccgcgaggccaaggtcggcatcggcgatcccctgcgcccgcaggagattgaagcccagctgaccgcgctgcgccaggaattggaacagctgaccgaccgctggcagcaggagctggcgctgatccaagagatcatcacactgcgcgcacagctgcaccaacaggaagcggagcctgccgacgaagagacgcaggctggccctgacgccgacgcgctgcgtgcccagttgggcgaactgcagcagcagttgagcgcgctgcagggcgaagcgccgctgatcttcgccgccgtcgacgccaacatcgtggcggcggtagtggccgactggaccggcatcccgctgggccgcatggtgaaaaacgagattgaggcggtgctgcaactctccgacaccctgaaccagcgcgtgatcggccaacgccatgcgctggatctgatcgcccgccgggtgcgcacttcgcgggcgcggctggacgatccgaacaagccggtcggggtgttcctgctggccgggccgtccggcgtcggcaagaccgaaaccgcgctggcgctggcggaaaccctgtacggcggcgagcagaacgtcatcaccatcaacatgagcgaattccaggagtcgcacaccgtttcgacgctgaaaggcgcgcccccgggctatgtcggctacggcgaaggcggcgtgctgaccgaggcggtgcgccgccgtccttacagcgtggtgctgctggacgaaatcgagaaggcgcacccggacgtgcatgaaatcttcttccaggtgttcgacaagggctggatggaggacggcgaaggccgccatatcgatttccgcaacaccatcatcatcctgacctccaacgtcggcaccgatctgatcgccggactgtgcagcgatccggagctgctgccggagccggatgcgctgagcggcgcgctgcgccagccgctgctgtcggtgttcccggccgccttgctcggccgcctgctggtggtgccgtattacccgctgaccgacgctacgctgggcaacatcgtgcgcctgcagctgggccgcatccagcgtcgcctggcggagaatcacgacatcgtctgcaccttcgacgacgcggtcatcgagcagatcgtcagccgctgcaccgaggtggagtccggcggccgcatggtcgacgccatcctgaccaacaccctgctgccgcagatcagccacaccctgctgaccggcagcgccaacgaccagcgctatcgccagctgcatatcgcgctgcagaacaacgaattcatttgtcaatttcaggcataa

SEQ ID NO: 423354 - DNA, 1071 bp, Serratia marcescens
atgagtgcggagatgattgccaccgaactggcgccgccgcagatcaacgcgctgtatcgcctgccggacgacttctggccgcggctgcgcagcgcgccttacaagcacgatctgtttcagctgctgcgccgcatcgacgcccagggcggccagccttacctgctggggcgcgcgccgctgccgcgccacgagatgctgcgcctgggccaggagccgtcgctgtcgttcgcgccctccacgctggcgcaggtggcgccgcgcgccaacagcccgctgcacgacgtctcgatcttcagcttcggcctgttcggccccaacgggccgctgccgctgcacctgaccgaatacgtgcgcgaacgggtgtaccaccaccaggacaccagcctgctggcgttcaccaacctgtttcatcaccggctgacgctgctgttttaccgcgcctgggccgacgcgcagccgacggtgtcgctggatcgtccggacaaccggcgcttcgacgagtacctgtcgagcctgatcggcatcggccagccggcgcagcaggaacgcgacagcatcaacgcccacgccaaacattttatggccggtcatctgattcgccacagccgcgatccggaaggcctgagcaagattttgcagcagtatttcaaggtgccggtgcgcatcgtcgaaaacgtgccgcactggctgcgggtggaaccgcgcgagcaagctcggctcaaggctgggcgcggcgcgccgcggctcggcgagtcggcctttctcggcatcgcggtgcgcgatattcagcacaaattccgcatcgagctggggccgatgccgcagcaagactatgaccgcttcctgcccggcgccgacctgtgccggcagctgcgcgactgggtgcgccaatatctgggcatcgagttcgtctgggaagtgcgcctgatcctggcgaaggaacaggcgcacggcatccagctcggcggcgcgcagcggctgggcctgagcagctggctggccgacgatcggcggcaacgcgatctcgacgatctgatcttcagccctgaaccgctggaaaatccgttctga

SEQ ID NO: 423355 - DNA, 1887 bp, Serratia marcescens
atggacagtaaacttttagactattacaaccgcgagctggcctatctgcgcgagatgggcgccgagttcgccgaacagtacccgaaggtcgcgggccgtctcggcatgcgcggcatcgacgtggcggatccttatatcgagcgcctgatggagggcttcgccttcctcacctcgcgcgtgcagctgaaaatggacgccgagtttccgcgcttttctcagcgcttgctggagatcatctaccccaactacctgtcgccgacgccgtcgatggcgatcgccgaactgcagccggacagcagcaaaggtgacatcagcaacggcttcgtggtgccgcgcggcaccatgatggacagccagacgctgaagaaaagcggcatcacctgcagctacgccaccgcccatgacgtcacgctgcagccggtgcgcatcgccgccgtcgagctgggcggcattccggccgatatcccgttggcctcgctggggctgcagcacagcggctgcgtcagcgcgctgcgcattcgtctcgagtgctacgaaagcgtgacgctcaacaacctgcagctggatcagctgatgttttacctggccgggccggacatgcaggcgcagcagctgctggaactgctgatgcagcacagcgtcgggcttgtctgccaaacggtggaggcgcagccgcagcggcgggcgctggcgctggacgggctgcggcaggagggcttcgccgccgatcaggcgctgctgcccaacgacctgcgcaacttcgaaggctatcggttgctgcaggagtacttcgccttcccggcgcgcttccagttcttcagcgtcaacggcctgcgtccgctgctgcagagcgtgcgcgaagggaaaaaggcgctgcgccagttcgaaatcgtggtgctgctggatcggcacgacgccgcgctggaacgggtggtcgacgccgcccatttggcgctgcactgcacgccggtgatcaacctgtttccgaaggtcgccgaacgcatcgcgatcaacgaaaaaaaccacgaataccatctggtggtcgacaatatccggccgctggattacgaagtgttctcggtgcagcggctcggcggcagcgccagcgaaaaacgctacgagcaagagtttcggccgttttacagcaccctgagcgcggacgatggcaactatggcgcctacttctcgctgcggcgcgaacagcgcacgctgtcggagcacgcccgccgctacggcacccgcaccggctatgccggttcggaagtgttcgtgtcactggtggacgagcggcaatcgccgtggcacagcgatctgaaatacctcaccgccgacgtgctgtgcaccagccgcgacctgccgttgatgttgctgcaacaggatcagggcaacttcgtgatgcccgattcgatcccgatcaagcaggtctcgctgcgcaaaggccccaccccgccgcgcccggcgctggccgaaggcatgatcacctggcggctgatcagccagctgcagctgaactacctcagcatgatggacggcgatccggaacagggcgccgccagcctgcgccagctgctggggctgtacggcaacctgagcgagccggcgatcgccaaacagattcagggcgtgcgccactgcaacctgcggccggtctatcggcgagtgccggagccgggccccatcgtgttcgcgcgcggcatcgccatcgatctgacggtcgatgagcaagcgttctccggcaacagcccttatctgctcggcagcgtgctggagcgcctgttctcgcgcctggtggcgatgaacaccttcaccgagatgacgctctccagccagcagcgcggcgaaatcgcccactggcaggcacgcatgggcaaaaggacgctgatatga

SEQ ID NO: 423356 - DNA, 576 bp, Serratia marcescens
atgaacgataagcgcccaccccactacgacggcggcgatctgcaccgccagggctatcgctatcgtcaggacagcgaacgcctgacgtcgcgcgacaaaatgcagccggtgctgctcgacatgctgaccgacgacgagccgcagaaaaaacaggaggcgcaggtgcgcaacctggtgtcgcacagcgaactgcgccgccgggtgctgcgcgatctgcagtggctgttcaactgcgtcaacagcgaatccaatctggatctcggcgattttccgcaggtgcggcgctccaccctgaattacggcatcgcctcactggcgggcaagcgcatgtcggacatcgaatggctcgacattcagcgcgcgctgaccgagtccattctccatttcgagccgcgcattttgcccgaagggttgcaagtgcgctgcatctcggacaccggctcgctggagctgcacaacgtgttgtcgatcgaaatcaagggccgcctgtggtgcgtgccctatccgctggagtttctgttccgtaccgacgtggatctggaaaacggccacttcgatctgaaagacatagggtaa

SEQ ID NO: 423357 - DNA, 822 bp, Serratia marcescens
gtgaaatcattagcaagcatgctgcaaggtcagtcgatcggcgcggccatcaccgccgtcgaaaacgatatcaaggcgaaaccggcggatgccgacctgcgcgccgcgctggtgcaactgctgtgcctgagcggcaactggacgcgcgccaacgcgcagctgaaatcctggcaggcgttgaaaccgatcgctcaaccgaccacgctgctgctgatgcagtcggtcaacgccgagctgcaacgccaggcggtgtttgccggcacggccgcgccggcgctgctgcggcaggatcagccctggctgaaactgatggtgcaggcgctgcatcaggatgcgcaaggggcggccgaacaggcccaggcgttgcgcgatgaagcgctggaggccgccccggccggcgccgggcggttaacgctggccgaaggcgaccaagaacggcaactgcgtttcgactggctgaccgacggtgacggccgcctcggcccggtatgcgagctggcgctgaacggcgtttactactggctgccgttcgccgacatcgccgcgatccagttccaggcgccgcagagcgccatcgatctggtgtggagccatgcgctggtgcgcctgaccgacggccgcgaacaggtgtgccaactgcccgcccgctacccgctggccgaagacagcgacgacgcgctgctgctgggcaaacgcaccgaatggcaaccgctgggcgacggcacccactatgcggggctgggcttgaagacctggctcagcgaaagcgacgaattcccgctgcacagcctgcggcagctgagcttcgacgcgagcgcctga

SEQ ID NO: 423358 - DNA, 987 bp, Serratia marcescens
atgaaatattggatgccggggctcgtcgccctgatggcggtgccgaccgcgcaggcgatgaactatcgcctggtttactcccccagccagaagctggaagtgtttatcgatgacgtcaaaaacagcaatccggcaagctggtgcggcaaaagcatcccgctgcgcatcgtctcggcgcaaagccaggatccggcggtgctgaacgacttcctgccgcgcgtcggcaatctgctggaaaagcagtgcccgaaaaccggccacctgccatggacgctgaccgacaagcgcggtgagaagctggccagcggcgaggccgccaaagcgcgcggctggaaaccggtggtcaaacaggaggccgtcgagcagccgcagaccccgccgcagccggcgatccctgcggcagtagccgtgacctctccgcaagcggacaccgcgccggctcagcgtttcagcctgccgcagggctgccacttccgcaccttctggcgtgacgaagccaacggcggcgcgctgttcattcccgccggcgacgcgctgcgctgcggcgaggacggctggctgcagggcagcggcgcggtcacgctgcaacagggcggccaaaccctctcgccgacgctgtggttcctgcaaggctatccgctggcgcagatcaacggcggcgatcgcgcgctgaccgtcgtcagcgccaacgcccagcggctggttctgggcggcaacccgcaggcaccgggcagcttcctgctgctgagcttcgaaccgaagctgcacgcgtgggcgttcaacggcgaagcgatcgttgaaatgccgcgcgtcgacgccgcagacgagaacaagatcaaacagcgcctgcagcaggcgcaaaccgcctggcaaccgctgctgagcgcccccgctccgctgaccttcaagctggtggaaaagctggccgcagaccgggtcgatcccgctagcggcagctacctgtcggttaacggcgccactcactga

SEQ ID NO: 423359 - DNA, 774 bp, Serratia marcescens
atgaatatcaccatagcctctacctccaaccagggcggccgcgcctccaaccaggatcagaccggcgaggtgctcggcaaccgcgccgcctgcttcgtggtgtgcgacggcatcgccggctttccgggcggcgatatcgccgccaaactggcgcgcgacaccattttgcaaaacttcgacggcgaaaagcacctgaacgcccagagcattcgccagcacattacgcgcgccaacgccgccatccaccagcagcagcggcagtcggacgaatacagcaagatgggcaccacgctggtcagcctgtttatcgatcgcgattatcagctggcctactgggcgcacgccggcgacagccgcctgtatctcttccgccgcggctacctgcatgccgtcaccaccgatcacagcctgatccaacagatgcaggacgccggttatcagaccaacggcatcaacagcaacctgctgtatttcgcactggggctcaatgaagagcgcgacgccacctacagcgacgtactgcagctggaagacggcgacgttttcctgctgtgcaccgacggcttctggcacagcttcagccaggccgagctggaacagtcgctgcacatggtcaactcccccagcgagtggatcgctctgatgcagcaggcatggaagaaaaacaataacagcgataactacagcgctatcgccgtctggattggctcaccgcaggaaaccaccctgctgcattcgctggcggatgcggagcggtttctgagccgcgactga

SEQ ID NO: 423360 - DNA, 1743 bp, Serratia marcescens
atgcgattttccattgtaaaaaataaaagcggccaggttccgccgcagagcagttgcgattttctgccgccgggcggcaccatcggccgcagcgtggacaacaacctggtgctgccggacgaagagcgcgccatttcccgtctgcaggcgatcgtgcatatttccgctgacggcgaatgccgcatcactaaccgcggcaacgttacccgcgtgctgctgaacgacattccgctggaacgtggccgccaggttgaactgcaggacggcgacgtgctcggcatcgacgattaccagattgaagtcagcgcgctgcaacagcacgccgcgccacaggctcaaccggtggccaaggccgccgccgttgccgctgctgcggcccctgcagccgccgccaaagaaaaatccgccgcgccaatccccaacgaaatctgggacagcctggtggaagaattcacgccgaatgcgccggccgccgccacagccacaccgccgccggtcgccaatccaggcaaccacccgctgctggatacccccgctcgcgagctgaacccggccgatccgctggctcagctggcgggcgatgtcgatctgcgccagctgctgcagcagcaaaccgatccggcggcgctgttcaacaccgacaccacctttgagcgcgaacacatcctggccgataccacccccagcgcgctgctggcggagcaggctgcgccgccgcgcccggcggctcccacccaaaaaacgcagcaaccggagcaagagctggatccgctggcgctgtttggcggttcatccgcgcccgcttcgccagaagcgttgaacagcaacgatccgctggggctgctaatgggaggcgccgtgccgctggcccagccggaagaaccggtacagccgcccgcgccgccgtctccgccgccgatcgccgcacaaccgcaagcgccgcgcccacagccgacgccaccgcccgtgcaaatccccgagccgcagccccaacccgcgccgcagttcagccagcaggaaccacccgtgcagccgccgcgcccgcgccaaggcaaccgcctgggcatcgatccggtcgcctaccagtccgcccagcggcaacatgccgccgcgccgaatggcgacacattggaagggccgttgctggcggcgctgttgcaaggcatcggcctcgacgatctgcagccgcagccgcacttcgacgaacaacagatccgccaggccggccgcctgctgagcctgttctcgcaaggcaccgtcgccctgctgtcatcccgctctatcctcaagcgcggcgtgaaggccgaaatgaccatgatcctcgacgaagccaacaacccgttcaagctgctgccttcgggaaaaacggtgctgatgcagatgttcggtagccagatgccgggctttatgccgccggaacaggcggtgcgcgacgcgctgatcgacctgcaggcgcaccagttggggatgatcgccggtattcgcgccatcatcgccgccatgctgcagtcgttcaacccggagcgtctcgaagaagaagcgcgcaaggaaggcgtggcgccgcgcctgtcgctgcccgccaaccgcaaggctgcgctgtgggactacttcgtgaagaactatcagcaaacctccggcgagatcgaggacgatttccacaccctgttcggcgaagccttcctgcacgcctatgacgttgaagtgaatcaatacaaagactcacagaccaaaccggacgcgtaa

SEQ ID NO: 423361 - DNA, 363 bp, Serratia marcescens
gtgaaaagaatcttactgactgtggccatcgccgcaacgttgaacgctaatgcagcgacaaaaattgactactcccctgccgagtacctcaaaaactacgcgcttagcgtttgtatcgccgaggggtactcagcaaaagaagtcaaaaacgatgccgccgccgctgctcggggttacacggaattcggcgattattctctggaagcgcataccgctgtcagggcgctggcaaaagaatttctggcaaagccctatgacagcatgtctggggagccgatgacgatggcaaagtgcatcgaccttgtacacagccaagcgttgcaagccatcatcaagaaataccaagggaaagacgacaactga

SEQ ID NO: 423362 - DNA, 483 bp, Serratia marcescens
atggctattgatatgttcctgaaagttgaaggtgccagcggcgaatctaaagattcgaatcacaaaggctggaccgacattacttctttctcctggggcgcttctcaaccgggcaatatgggcgttggcggcggcggtggcgccggtaaagtgtgcttcaacgatctgcacgttaacgcgctggtcgacaagtcaaccccggcgctgctgaagcattgctccagcggtaagcacctgaccaaggttgagttgtctgtctgcaaggcgggcggtactcaggttgagtacgttaaaatcaccctggacgacgtgctggtcaccgccgtgcagtacaccggcgcaggcggcgaagacaccgtgggcgtcacctactccttccaggcggcgaaagtgaaacagcaatactgggagcagagcgacaaaggcggcaaaggcgccgaaagcagcgcaggttggaacatcaaggaaaaccgcgaagcttaa

SEQ ID NO: 423363 - DNA, 492 bp, Serratia marcescens
atgaaaccattatatcgtcagctaaaaagcagccattactcctctgattactctagcccgggatatttggcagcagaagccgtttacgccgagattggttatgagcttgatacgcttctaaagcaaaaccctggttatgccaatacctgtgccgtccgcatgagcctggcgctgttgaaagctggcatcagcttcaaaggccgcctgccaatcaaaaaaggcgcctataagggtaaaactattgaacctggagccaaactgctggccgatcagttacatcgctccagtagttttggcaaagccaaaattttctttaatgctccagatgcagagaagggtatcggcaataaaaaaggcgtcgtgttcttcaataaaataaccaactatgatggcggacacattgatctgatcgaaccagaaaactcgctattgacctgccattcccattgctattttaactgcaaagaagtctggttttgggaattaagctag

SEQ ID NO: 423364 - DNA, 384 bp, Serratia marcescens
atgaagacaaaacggttttatctggcatcgctgttggcagtcgtctgttcgctctccgccgcgccgccagctttcgcagagcagacaacgagacagcatttgacgtccgatgatgtcaatctgccaggcagcgactttttccgtttctatcgcagtgcagataaacaggaaaaagagaaagcgcgcatttatttgctgggcgtgctggacgcgacggaaggaaaaagctggtgccaatacagccagctacaaaccgtcactctgcaggagtttgtgttcgaattctttaataaacttcccgctgcgcgcctgcacgaaagggcagcctccctgattgaagaggctctggcgactcgcttcccctgcaaaggaggcaaagcatga

SEQ ID NO: 423365 - DNA, 1506 bp, Serratia marcescens
atgagcaactcgcctcagcaacaaaatgcgttgcagaccaccgagactttttccagcgatgaattcagcgcgctgctgaacaaagagttccggccgaagaccgatcaggccaaagaagcggtcgagaacgcggtgaaaaccctggcgcagcaggcgctggaaaacaccgtcaccgtttcttccgacgcctaccgcaccatccaggcgctgatcgcggaaatcgacgaaaagctgtcgcagcagatcaaccagatcattcaccacgacgacttccagaagctggaaggcgcctggcacggcctgcattatctggtcaacaactccgaaaccgacgagatgctgaagatccgcttcatgagcatttccaagcaggagctgggccgcacgctgaagcgttataaaggcgtgggctgggaccagagcccgatcttcaagaaagtctacgaagaagagtatggccagttcggcggcgaaccgttcggctgcctggtgggcgactactacttcgatcacagcccgcaggacgtggagctgctgggcgaaatggccaagatcggcgccgcctcgcactgcccgttcatcgccggcaccgcgccaagcgtgatgcagatggagtcctggcaggagctctccaacccgcgcgatctgaccaagattttccagaacaccgagtacgccgcctggcgcagcctgcgcgagtcggaagacgcgcgctacctgggcctggtgatgccgcgcttcctggcgcgcctgccgtacggcatccgcaccaacccggtggacgagtttgacttcgaagaagacaccgacggcgcgacccacggcaactacacctggaccaacgccgcctacgccatggccgccaacatcaaccgttcgttcaaagagttcggctggtgcaccgccattcgcggggtggaatccggtggcgcggtggaaaacctgccgtgccacaccttcccgagcgacgacggcggcgtggacatgaagtgcccgaccgagatcgccatcagcgatcgccgcgaagccgagctggccaaaaacggctttatgccgctggtgcaccgcaaaaactccgacttcgccgcctttatcggcgcgcagtcgctgcagaagccggcggaatactacgatgccgacgcctccgccaacgcccagctttccgcgcgcttgccgtacctgttcgcctgctgccgcttcgcgcactacctgaagtgcatcgtgcgcgacaaaattggctccttccgcgagcgtgacgacatggaacgctggctgaacgactggatcatgaactacgtggacggcgatccggccaactcctcgcaggaaaccaagtcgcgcaaaccgctggccgcggcggaagtgcaggtggaagagatcgaagacaacccgggctattacagcgccaagttcttcctgcgcccgcactaccagctggaaggcctgaccgtctccctgcgcctggtgtcgaagctgccttcgctgaagcaaaacgacgcgtcctga

SEQ ID NO: 423366 - DNA, 537 bp, Serratia marcescens
atgtcaaactcgaaatcccgcagcgggcagaaattcatcgcccgcaaccgcgcgccgcgcgtacagattgaatacgatgtcgaaatttatggcgcagagcgcaaaatccagctgccgttcgtgatgggcgtgatggcggatctggtggggaaagcggtcgatccgcaagccagcgtggaagagcgcaagttcatggagatcgacgtcgacaacttcgacgagcgcatgaaatcgctgaagccgcgcgtcgcttatcaggtcgacaacaccctgaccggcgaaggcaagctgaacatcgatctgaccttcgaaagcatggaagacttctcccccgccgccatcgcccgcaaggtcgacgcgctggacaatctgctggacgcccgcacccagctttccaacctgctgtcctacatggacggcaagaacggcgccgaagagctgatctccaagatcctgcaaaatccggcgctgctgcaatccctgaccgacgcgccgaagccggcggttaacgacgaaaacaacgagcgtgaggattaa

SEQ ID NO: 423367 - DNA, 1032 bp, Serratia marcescens
atggctatcgacaccgataccctgctggcaccggtcgacgcggacaatccctgcggcgacaacctggaatacgacgccgactttctggcgatggaacaagccgccaccggcaaggccgaacaacagttcggcagcaccatcatcccggaagaagcgccggattgggtgcaggtcgaacgcctagcgacctcgctgctggcgcgcaccaaagacctgcgcgtcatgctgtatctcacccgcgcctggacccagttgcgcgggttgccgggctacgccgacgggctgacgctgatccaccagtcgatggcccgttactgggacgccctgcagccgccgctggagttcgacggcgaggccgacccactgtttcgcatcaacgcgctggccgaccttggcgacaaagccgcgctggccgccagcgtgcgcgccgcgccgctgctgaaaagcgccgccggtgaaatctcgctgcgcgatgccggcgccctgctcgacggcagcaagcaggagtgccccaactttcccggcggccgcgcacggctgcaggatgagctggcgcaacaggatcgccccgaaggcgccctggtggcgcgcatcgccaacaccctgagcgccattcgcggcgaagtgacccgtcatctgggggaaagcgcgctgccggaaatgagcgcgctcaccaaggtcttttcgctggtggcgctcgccggccagagcgaggccccggccgccgccgaacccgacgccccgccggaagccgccgccgtgcagccacccgccgccgtgcagagcgccaccgccccgctcaactggcgtagcgcgcagatccagtcgcgtgacgacgcccagctgatgctggacaaggtgaaaaactattttcgtcttcatgagccgagccacccggcgccgctgatgatcgatcgggtccagcggttgattacgctggactttatgcaaatcgtccgcgatttggcgcccgatgggcttaaccaactggagaccattctcggtcgccccgacaacgaggagaacagctag

SEQ ID NO: 423368 - DNA, 720 bp, Serratia marcescens
atgagcactgattcaagcgccccgacgagcatcggctggtacggcaaactcccttccgccggcgacttcctgcaacgccgcctgcccgatccggtggtcaacaactgggcccactggttccataacgggctggtgaatttgcagcgcgatgcgcaggggccgaacggccacccgttcagcaacgcaccggtgtggaacttcgtgatccccgccacgctcggcagcccgtacgtgcagatgggttgcctgttgccggcgcgcgatcgcgtcgggcgacgctacccgatctgcgcgctgcgcctgttcagccaacaggattggcggccgcaacagctgaacatggcggcgagctggtaccaacagctcggttataccctgctgaacggcgtgcgcaacggtttctccgccgagcagatcgaccgcacgttgcaggcgatcccggcgctgcccagcccgccggcggaagcggattccgagatattgtcaattatcggtttccagcatccggacgtgccgggcctcggctggcaacaggccgccgactgtttcgacccggcgcagtacaccagtttctggtggaccaatcaggccgacggacacccgctctacacccacgtgcacagcggcaacctcaccgtgcagctgttttcactgctgttcgagcccaacggctgggcgcgccccggccgcggcggccagtacccgcaaatgtttgattaa

SEQ ID NO: 423369 - DNA, 3636 bp, Serratia marcescens
atgctcagtacgttattctccatcatcaccagccgcctgctgtggggctttgtcggcattaccgcgctggcgttcatcatctggatgatcggcccgctggtggccatcggcgactatcgcccgctggagccggaactcaaccgccagatcgccatcggcgttatctacctgatctggttcctgtgccgcctgatcccgcgcctctacagcgcctggttcaacagccgcctgctgagcaacctgcgcgccgccgaagcggtgccggcggaagacggcaagcccgaggtcaaacaagacgatcagttggcgcagcgcttcgacgaagcggcgcagctgctgaaaaaggcgcgcttcacaccgggccagggcgacggcaaacaccgctggatgacccgctttagccgccagtacctgtaccagctgccgtggtatgtgatcatcggcgcgcccggcgccggcaagaccaccgcgctggtcaactccggcctgcacttcccgctggcggatcgcttcggcaaatccgcgctgcgcggcgtgggcggcacccgcaactgcgactggtggtttaccaacgacgccgtgctgctcgacaccgccggccgctacaccacgcaggaaagccagcgcgaagaagacgccggcgagtggcaaagcttcgtcgcgctgctgaaaaaataccgcacccgtcagccgatcaacggcgtgatggtgaccatcagcgtcgccgatctgctgagcgacagcgccgaagcgcgcgccgcccaggccagcgcgctgcgcaaacgcctgatcgaactgcacgaacagctgggcattcacttcccggtctatgtgctggtcaccaaaaccgacctgctcaacggctttatggcctacttcggcagcttcgacaaagcacagcgcgaccagatctgggggttcaccttcccttacgagcgctcgcggcagccggacttcaacctgaacgccgctttcgaacagcaatacgccctgctgcaacagcggctggacgcggcgctgcctgatacgctgctgatggagcacgacgcgcgccagcgcgccgaaagctacctgttcccgcaggagttcgccgcgctgcgcccgctgctcggccaatacctggagcaggtgttcgccacctccagttttgaaacccgctttaccccgcgcggcatctatttcaccagcggcacgcaggaaggcctgccgttcgaccgggtgatgggcgagctgaaccgctatctgcagctgccgacggcaaactcaggggcgcaggccaacgcggcctgggacagcgtgggccaggaagcgccaatcccggcggccaagggccaaagcttcttcctgaaagagacgttggaatcggtggtcttccaggaatccgggctggcgggcagcaaccgctggtgggaataccgcaaccgcgccctgcactgggcgggttacatcgcgctggcggtgatcctggcggtgctggcgatgctctggttcaccagctacggcaacaacaaggcctatctggcggaagtggccgccaaggtgcccggcgtcgagcgccaggggcaaaacctgacgcagttgggcaacggcgacatgttctcgctgctgccgttcctcaacagcctgctgcacctgccggacagccagaacttttcgctggacgatccgccgttcacctaccgcatggggctgttccgcggcgatcaggtgagcgacgccggcaatgcgctgtaccaaaaagctctgaaagagctgctgctgccgcaggtggcgcaacagatcgccaccacgctgcgcaacgacaaccacggcgatgcggacttcagctacgaagcgctgaaggcctaccagatgctgtatctgccgaagcagtacgacggcaaattcctgcgcgcctgggtgatgctcaacctgcagcgcaacctgccgcagggcagcacccagaaacagctgcagcagatcgaatggcatttgggccagctgctggatgcgcagatccaggcctcgccttacgccaaagacgaccaactggtggcgcaggcgcaggctgccatcaaccgggcgccgctgtcgcagcgcgtctacggccgcctcaagcgcctgctgctaaagcagaccgacatcaagccggtcagcctggtcgatttggccggcccgcagaccgagctggcattcagccgcaaaagcggcaaaccggtgaccgacggcgtgccgggtctgtttacctcgcaggggtattggaaagcgttcaacgacaacatcgatccggtgaccgacaccctgcgcaaggaagacgtctgggtgttgaacagccagacgccggagcagaagagcgccgacctgaccaagaccatccgccagctgtacatgcaggacttcatcagcgcctgggatgagctgctgggggatatccagctggccaacatcggcaacctgacccagcgcatcagcagcgcgcgcctgttgtccggcaacccgtcgccgatgcgtaacctgctggtcaacgtcagcaaaaacgtcaccctgcgcgacgagaaaagcgacgccgactcccgttcgctgctggccaaaaccgaagacagactgaatcaaaacgccaaccgcacgctggaagcgctgttcaccaaccggccggccaacgccgacggcgacgtatccgcccagccggaacagctggtgatggcgcacttcgcgccgctgctggagctggcgcaaagccagggcgaaggcaataaggcgatccctttcgacagcgtgctcaagcaggtcgatgagctgtacagctatctgacggcggttcagggcgcggccaacagcggcatgtcggcgccgccgagcgacatcatcccgcgtctgcaggccgaatccggccgcttgccggtgccgttcaaacagatgctgctgtcgctggcgatcggcgccagcagcgacacccagcgcaaagagatggagaacgtgaaaaagcgcatcagcttcgaggtcggcagtttctgccgccaggcgatcgccggccgttatccgctggtggcccgggcgcgccaggaagtgacgccggacgatctggcgcgcatgttcgcgccgaacagcgggctgatggacagcttcttccgcgacaacctgcagggcaaggtcgacaccacccgcgccaactggcgctttactcccggcgtggacggcaagacgctgcccggcggcgaaggcatcctgcgttccttccagcaggcgcagcgcatccgcgacgccttcttcgccaacggtaccgcgacgccctcttaccgcgtgaccgtgcggccggtgcggatggataacgacatcctcaacctgacgctggatatcgacgggcagctgttcaaatacagccacggcccgcaggtgccgctggtggtcagttggccgggcacccgcaataccaaccaggtgcatctgcagctggcgctggccaacggcaccaccgccagcctggtgaccagcgggccgtgggcgctgaaccgcctggtggatatggcgcagtcttcgggcaccggcggcctcggccgtcaggcgaccttcaatcttgacggccaccgcgtcacgctggagttcacgcccaacagcattcgcaatccgttccaactgccggccttctcgtgcccgtag

SEQ ID NO: 423370 - DNA, 1203 bp, Serratia marcescens
atggcgccagcggccaacccgctggtggacgccgccaacccgctgctgaacgccatttcgcagatccgccaatcggccacgcacgccaacccggcgcagctgcgccaacagctgatcgacgaaatgcgccgcttcgagatccgcggccaacgcgccaacctgccgtacgaggtgatcatcggcgcgcgttattgcctgtgcaccgcgctggatgaagcggcggcgctgaccccgtggggcagcaacagcgtgtggtccggcagcgggctgctggtgaccttccataacgaaacctggggcggcgagaaattcttccagctgctggccaagctgtcgcaaagcccgcgcgagcacatcaacctgctggagctgatcaattattgcctgctgctgggctttgaaggccgctaccgggtgatggaaaacggccgctcgcagctggaaaccatgaaacagcgcctgctgcagctgatccggtcggtgcgcggcggctatgccccgccgctgtcgccccatgcgctggatctgccggtacagcagaaactgtggcgcccgctggtgccgctgtgggcctgcgtggcgctgaccggcttcctggcttcgctgctgttcatcgccctcaactggcggctgggcgacaacaccagcccggtgctggcggcgatttaccaaaccaatctgccgcaggtggcgatcggtaacccggcgccggccgcaccgccgacgctgagcctgaaaagcttcctgcgcaaagagatcgccgaagggctggtggtggtgcgcgacgaagcgcagcaaagcgtggtaatcctcaaaggcgacgggctgttcgactccgccgccaccacggtgcgcgccaactatattccggttatcgaccgcatcgccgccgccatgaacggcgtcagcggcaaaatcctggtcaccggctacagcgacaacgtgccgatccgcagcgcccgtttcgcctccaactgggagctgtcgctggcgcgcgccgaagcggtcagcgcccggttgcaaaagcacctcgccaacccgcagcgtgtcaaggccgagggccgcggcgagagcaatcccgtcgcgccgaacgataacaaagtgaaccgcgcgttgaaccgccgggtagaaattacgctgttggtcgccccggaaaatacccaggcggaaatcaacggcttgccgcaaggaaccggaaagtaa

SEQ ID NO: 423371 - DNA, 1347 bp, Serratia marcescens
atgaaagatgctcataaggttgtctggacggaggggatgtttttgcgcccccaccatttccagcaggcggaaaactatctcgaaggctatatgcgcaactggggccaggcccacagcggctgtttctggggtttcctcaccctggatctggaccaaacgctgctgcgccagggcaagattgccctcaacgccgccagcggcatcatgccggacggcacgccgtttcgcttcgccggcgcccagcaggcgcccgcgccgctgaccatcgccgaaaacaagaccggcgaaaacgtggtgctggccctgccgacctaccgcgcggggcgtgaagacgtgatctttcaggaaagcccggaggcgctggcgcgctatctggcttacgagaatgaagtcgacgatctcaacgccgtctcggtgggcagcgcggcgctgcagtttggccgcctgcgcctgcggctgatgctggagagcgagctcaacgccgaatggacggcgctcggcgtgacccgcgtgctggaaaaacgcggcgacaacagcctgcgcctcgataccgcgcagatcccaccgatgctgaactgccagggcaacccggtactgaaaaccttcatcaacgatctgcagggcctgctgcaacagcgcagccagcagatgagccagcgcctgctgcagccgggccgcggcggcagttccgaaatggtcgatttcatgctgctgcagctgatcaaccgccacctcggccaggtgagccacgcctaccacctcgaccatctgcacccggagcgcctgttcgccgattggctgcagttcgccaccgagctcgccagcttctcggcgcagcgcaccccggaaggccgtctgccggtgtatgaccacgacaacctggcgctgtgcttcggcaagctgatgctgttgctgcgccaggggctgtcggtggtgctggaagacaacgccattcagctgacgctggtcgaacgctcccacgggctgaacgtcgccaccgtgcaggacgccaaaatgatgcgcgacttcggcttcgtgctggcggtgcgcgccgacgtggccgccgaggtgttgctgacccatttcccggcgcagatgaagatcgccccggtcacgcgcatccgcgatttggtgcagctgcagctgccgggcatcggtttgcgcaccatgcccgccgcgccgcgccagatcccctatcacgccggctacacctacttcgagctggaaaaaggcggcgacctgtggaaacagatggaaaaatccagcgccttcgccctgcacctggcgggcgaattcccggggctggacatggaattttgggcgattcgcagccatacggaccggtaa

SEQ ID NO: 423372 - DNA, 531 bp, Serratia marcescens
atgatgacgacccctatcgcttcccgctggtgcgggatgctgtttttgctgctgggcgcgttggcgctcggcggctgcatgtcttccgccaaaagcgtgccgtcgcgttacagcctggtgttcgatgccgatcgccaggtcaacgccgccgccggcgcgcaaccggcgccgataaaaattcgcgtgctgctgctgcgttcggatgcggaattcatggatgccgacttcttcagtctgcaaaacgacgccaaaagcgtgctcggcaacagcctgctggacagcgatcagttcttcctgacgccgggccagaccggcaaaaaactcggtgggcaaagcgcgttggatgcgcgctacatcggcgtgatcgccgaatatcaaaatctggacggcaaaatctggcgcctttcactgccgctgccggaacccaccgaaaccaatttctacaaggtatggcaattctcgccggatgagctggaagcgcatatcgtcgcgggcgtgagtggcctgcgccccgtaaaaaaggtcgactga

SEQ ID NO: 423373 - DNA, 546 bp, Serratia marcescens
atgacggcgccctattacacagccattaaacaagaagaggacattgtgaaaacacggattaccctgacgctgctgaccgccctgacgcttgccggttgttccacgccgccgccaccgccgccggcgctcaataacgacgccatcgtcagcagtgaggtcaacggcgtcacgctaaagcaccgcgccgcggtgagcgcgccgcaacagttcaagccgatcggtgaggagtaccgcagtctgtacgccgccagcatcatgagcagcccgaattataccggcaccgccgtcggcagcctggacaacgccgccgcgttctacgcgctgggcgaagtggaaaacaactggctggcgatctccgccatccggggcggcgacctggtgggttacatccaggccaacgccggcgtaccggaagcgcgctacaaatcgacgctgcgcaaagatctgccgcgccgcgcgcgcgccgccaaacaggactgcgtcaaagtcggcggcgacagcaaggcgtgtaaaaacgccggctcagccacctggatcctccagtag

SEQ ID NO: 423374 - DNA, 393 bp, Serratia marcescens
atgtttgccaacagccaaatgatcggcgtggacctggcgtttcccgacgtctgtctgacgccaagcccggcgccggtacccgtgccctacccggatatcgccctggcgccgaccgccatccccaacgcgttcaacattctgttcgtcggcaccccggcgcacaacatggcgacggtgacgccgctgaccaacggcgacaaccccggcgtggccaccggcgtcgcttccgggacggtgatggggccgtcccgccacctgaccggcgcctttaccgtgctgctcaaaggcaccccggccacccggctgaccagcctcagcctgcagaattccaccaacgcgctcggcatgcgcatcgtgccgagccaattaaaagtgttgctgcttgcgccctga

SEQ ID NO: 423375 - DNA, 636 bp, Serratia marcescens
atgagcgttgccaacacaacccgcgccgtcaacatcgcaccgccccagcaggccgccggccaggtcgtcaacctgttgccggacggcagtctggtggtggagtgcgaaggccgcggctggcattgccgccgggcggcgagctgcctgctgacgccggcactcggcgatagcgtgctggtcgccggctgcggccaccagctgtgggcgatcgccgtccttgagcgcgcggaaccgcaaagcgcggcgcggctgagcgttgcaggcgatctgcacattgaaacgccgagcggctcgctgtcactgcacggcgcgcaggcgctgaaactgagcggcgacgccatgacgctgcaggccaacagcggcgactgccaggtcgacaagatgaaatacagcggcgaagagctgtcggccttcgtcagcatcagccgcctggtcggcaaacgctgcgagtcgctgtggcattcggtcagccagatcagccattcgctgttccgcaaagtgcgccagaccgagcacgtgcgcgccgggcagctggattaccaggcggaagattacgcccgcattcatgcccgcaacacgctcattacttcaaaagacatcaccaagctggattcggaacaaatccacgtcggataa

SEQ ID NO: 423376 - DNA, 1068 bp, Serratia marcescens
atgacctcaaagccagagcaaatacgccagcgcgtgaaacgcggcgagctgattgccggtgaggatttgcacggcctgtcattcgccggtatggatttggccggcggcatgttcaacgaactgaacctgaacggtgtgaacttctccgattgcgatctgcgcgacagcgtcttcagcaattgccggctcgaacaggcgcaatttgcacgggcgaacctgaagcaaacggccttcaaccagtgcgccatgtcgggcggccgcttcagcgagagccatgtcgaactgacgatgttcaacgactgccggcttgaacagggcgacttcagccggctggcgctcaaccaaagccactggatgtcatgccaattggccggcgcgaacttttccgccactcagcacgatcgcaccaccttttacgaaagcccgctcgacggcgctgcgttgaatcaggcgcggttatctcttgtcacgttcttccgattaaatctccgtgacacaaggtttgaaggggcagatttcgaccgcgtcacgtttttcgaatgtgaccaccgcggcaaaagttacgccgggcagcgcctgatcgcctgccagtttaccgataaccaactggacgacgtcgatttcagccaggcgacgctgcgtcaaagcaacttcaagggcgcttcgctgcggcgcgccaacctggcgggcgtgcaggcgcagcagtcgctgtggctggaggccaatctgacccacgcgcagtgccgcggcgggcagttcgatcaggcgatcttcagcgaagcgacgttggacgccgccaacttcagccaggcgcgcctgtatcaatgcgtattccagcacagccgcgcggcgcgctgtgatttcagcgacagcgacctgacctacgccgacttttgttatgccgacatcggcgccgccgatttccgccgcgcgcgctttatgcgcacccgcatgcaccgcgcccatcagcagcaaacgcgctggggcgatcgcagcggaattctcgagcgcgacgaagagctgtacgccgccgaaacctggagcgcacagcgccagagccgaatctga

SEQ ID NO: 423377 - DNA, 2553 bp, Serratia marcescens
atgaaagtcgtaaaacctctgcgcctcagcgcgcttcatcgccccttctcttggcaagggcaaaaccatctgggcgtttccgttttggccttggccgatatgggggcttccccgcgcctgcgccccgaaccggagctgtggcagttggccgccgaagaactcacgctgagcggcggcgtgctcgatttggctatccccaaagcctgcgcggagtttctcgccaccggtaacgcctacacccaccatcaacaagacaaaaccgcttgcgccgtaaagatccagctggattcgctggaaaaaacgctggtggttttcggcgatcgccattggatcaacgatcgtccctccactcccctcccttttgcagaaatgcgtctggactggcgccgggcttacggcggcacccagttcgccgataatccgcacggcatcggcgccactccagaaacatttccgcagggccgcatccatcgcctacccaatattgaaccgctgcaggggcgcctcgcgtctcctcggcaaagcgcgcaaccggcaagctttgacgcgttggatctcacctggccgcgccgcttctcccgcatcggtaaaaactacgacgccgactggttgaaaaacggctttcccggcttcgccaacgatatcgactggcgcctgttcaacatggcggaaagcgatcagcagtttcctcaacgcgacagcttgccgccccgcgccgcctatcgaatttggaacatgcacccttcagaaccggtgcagcaaggtcatttgccgccgtggcgcacacgctgtttcatcaaccggctgcgcggcgacgaaacgcatttcgaagaaatcgcgatgcgccacaccaccgtctggttcttcccccatcgggaacagatgctgctgatttatcagggcagcacacgcatcaatgaagacgatgccgccgacgtaatgcagctgatgccggctttggaaaccgaaggcgagccccgctccaccgcgcattatcggcaggtgttgacccagcggctggataaggaacggggggctctgcacgcgtttcgtgagcaagagttgttgccggaagcgtgcatcggcgcctggctggatacggaaacgccgacgcagcaaagcccgatggcggaaaatatcgccgcctacgagcaccggcagcgcgaagagcaccgccagcgcctgctgcgtgaaggccaggacatcgatgaactgttcccgctgccgtcgcaagacgcgccgccgaagctggaccaactcgccgaattcgtcgagcgtctggaaagccaggccgaggcgcagtatcaggacatgctcaagctggcgcaagccgagggtatcgatccgcgcaatcccggtggggatcacgtgccgccatccggtgcggaaagctaccagcagcagcgcgatctgctgttccaggaggcgcgccggcatcccgacgcgttcagcgaaaaacagctgggggaaagcgagcgcgcgctgcaccaaatgtatttaatgtcggcacaggcgcaaagccctgcgctgcgtttaagcggcgatctggcgcaaatcattcgccaacgcgtcaccgccgccatgctgcgcgataaggatctcagcggtcttgatctcaccggcgccgatctgtccggcatggatctctgccaggctaacttgcgcggcgctttgctggaaaacgccaatctgcgccaaacccaactggtgggttgcgaccttcgcgaggcgatgctggcgcgcgccgatctcagcggcgccgtcttgcagcaggccgatctgagccacgcctctttggccctggcgaaatgcgaagcgacggatttcggcggcgcacagctgcacgaaaccaacattcagcaaacgttgtttcaacgctgcgatttcacgatggcctcattacgcgatttgctgggatacgaaaccttgctcgggcagtgtgatttcagccgcgccacgctggccaacattacgctgatggagctgcaactggagcagctgacattcagccacgcccggctcgaaaaagtcagcttcgtcaaatgccgcttgcaggcggtgaacttcgatcgggcgcggctggaaagctgcgcctgggttgataccgagacgcaaagcctcagcttccgcgccgcacgcctcacggcctgcgccttcgcggcaaagacgctgctgccgcaggcggatttcagcgacgcgacgctaaaccagtgcaatttacgccagatgccgttgcagcgggccaatttcagccgtgcacgtctcaataattgcgacctgtcggaaagccggttgaacgacgccgatttccgtcaggccaacggcagcggcagcctgttcattcgcagcgatctgtctcgcgccaacctgcgcgacgccaatttcattgcggcgatcctgcaaaaatgcgtgctgtcgggcgccgacctgcagggcgccaatctgttccgggccgacctgtcgcagtcgcaagtggatcaggcgacccggctcgagggcgcctataccgccagggtgaaaacattgcctcgccacaacgggaaggaagtatga

SEQ ID NO: 423378 - DNA, 501 bp, Serratia marcescens
atgggcgcgttcattgccttttcgacgcaggacagcctctggggacaaatcctgtttaccttctttggcatcctggttggctgcgtcttgctcgccgcgatcggcaaaatctttttgtcggccagccgagcggccgcgttgcctgcgcggttgctgatctttgtcgcgctgatgctggcgctgctgaaatacaaccagcaggtgatgtctgcggtgaatgcccccgcagaattgatcgggttcctgattttgcccggctttttgatgggttacctgggtgcggcgcccaccggcagactggcgctggcgatagagctgccctgttttgcggcgctcgccgcgctgctgattctgggcaccgccgacgtcgaattttttgccccctatcacctggagagcgccggccaatttatcgccaaggcgatcgctgcggcattgtccgtcgccgccgtgctgttggctcgcggaataaacgggaaggacggcgcactgtcctcttga

SEQ ID NO: 423379 - DNA, 390 bp, Serratia marcescens
atgtcgaaggccaaaaatgttctcaccgttatcgggttgattttattggctcctatcctcagcctggtgggttttttcaaattcatcacggtcgatatctggggttatttcaaacatatcggttcttccctcagcgtgatggagaacggtatttccgcctccgggcaaatcgtcagcattcgccagaccaacctgtgggacgggaatcggccggtctgcgaagtcgaagtcaaatacatcgcccaagacggaaaaaaccatacggccgtggcgaaaggcccgatcagcgtcgtggatctgccgcgttatcagccgggccatttcaccgcgatcaagtacgaccccaagaaccccaaaaaagcggtgatcgaagagctttcccggctttaa

SEQ ID NO: 423380 - DNA, 2340 bp, Serratia marcescens
atggatcgccttatcattgcgcacacgcctttgccctcccatcagctgttgttcagaagcctttccggtgaggaaaaactggccggattgttcgagttcgacgtcgagctgctcagccccgacaatcggctcgatctgaaagcgctgctgggacaaaaaatcacgttggagctgcggggcaatccgctggcgccgcgctatctcaacggcaatatcacgcgcatgactctctccggacgggaagcaggcggcaaccgttactatatctaccgcgccgtgctgcgccccacgctgtggtatctgacgcaaaaccgcgattttcgcatctaccaggaaaagaccgttcccgacatcctgactcaggtgctggggcagtatcaggtgaaaatcgataatcgcctgagttacgactaccgcatctgggggtactgcgtgcagtaccaagagagcgatttcgatttcatcagtcgcctgatggagcacgaaggcatctattactatttcacgcaccagcaagacggccatacgctggtgctggctgacgcgccgtcggcgcatcaggaactcgccggctacgccagcattccctatcagctcgcggaaggcggcctggtggaaaacaaagacagcatcaacagctggagcgtttcggacgccatcacgcccagcctgtatagcctggatgactacgattttcgcaagccgcgcgcgcggttgctggaggcgcggcagaatcccgcctcgttcgcgcaggacaaagccgaggtgttcgactggcccgggcgttataccgatcacgcccacggccagttttacgtcaaggttcgccagcaggagttcgaagcgcagcacgagcagatgagcggcgaaggcagttcgcagggcattgcgcccggctaccgttttcaactgatccaggcgccgcgtatggaggacaaccgcgcctacctggtggtcagcgcgcattacttcatgcaggaaaacagctacgcaagcaatgataacgacgtcggcgagcagcgtaccgaatttcaggtcgttccggcggacatcaattggcgcccggcacgcatcacgccctggccgaaaacccacggcccgcaaactgccgaagtggtggggccggaaggcgaaagcatctggaccgataaatatggccgggtgaaactcaaattccgttgggatcgccacggcagcggcaatgaaaccagttcctgttgggtgcgcgtctccagcgcctgggccggctggaaatacggcgggatccagatcccgcgcgtgggcgaagaagtggtggtcgactttatcaacggcgatccggatcgccctatcatcaccggccgcgtttacaacgaagacagcatgccgccgtgggatctgcccggcgacgccaccaaaatgggctttatgagccgcagcaaaggcggcggcgccgacaacgccagcttcctgttcctggaagactcgcccggcaacgaatctttcgacatgcacgccgaacgcaacatgaacatgacggtggaaaacgacaagaacgtcaatattgacggcagccgcaccaccaccatcggccgcaagcaggacgacaccgtcaccggcgacgccacgttcctgtacaaagcgaaacgcaccaccaccgtcgatgggctggaaaccgccaacctgaacgcccaccagacggtgaacatcaaaggcggccgcgacctgacgattatcgacggcggcgataaaatcgacatcaccggcaatcagtccttcaagcttgacggcgcacagacgcaaaacattacgcagacccaacacgtcacggtgaagggcaatcagaccctcgacattaccgaagggcaacaaaccagcaccatcaagcaagggcaaacggtcaacatcacctccggcgggcagcacaccaccatcaccgccggcgggcaggaattgacggttaaaggcggcggccaaaccgctaccgtcaccgggaatgtcaccgagacctacaaaaacgatcagagcacgacgatcaccggtacgctgaccatcaaagcgaaaacgatcaacatcaccagcgcagacggcgtgtcggtgcagacaccgagctggaaagataactgccacggttggaaatgggtggcgaccggggccaacttcgccttctacggctccaatcttgcgttgacaggagccagcctgaaacacacgatgctggatatctcgcacaatccgctggcgatcagcaaaaccaatttcaagctcagtaacgatccaatgacgttcactcagcttggcgcgctggtgaccaacggcgccttacggttgagcaccaaggcgctggcgatctttttataa

SEQ ID NO: 423381 - DNA, 933 bp, Serratia marcescens
atgaatttggccaacgtcgatctcaacttgctggtggtgttcgaggcgttatatcagacgcgcaacgtcaccgccgcaggccggcgtcttaaccgcgcccagccctccgtcagcaatgccttggcacggctgcgcacgctgctgaacgatccgctgtttgttcgcagcggcggcggcatggcgcctacgccacgcgcccatcagcttatgccgcagatacagcaggtgcttgaacagatccatctggcgttggcgccccctgcccgtttcgatccggccaccgccgggcaacggcgctttacgctggcggccggcgactatgccgatatcctgctgctgcccgctatcatcagtcggttacgtcagacagcacccggcatcgatattcgcgtttcgcgcctggatcgccacaatatttaccggcaactggatcgcggcgaggtggatatcgcgctgggagggcacctttccggagcggaaagccactatgtgcgcacgttgtttgaagaacatctggtgtgtatcgccagccgttcacacccacagttggcggatggccgctgggatctggcacgctacctcagcctgccgcatgggctgtacgcaccggcagacgacggctctgccaggggattggtcgaccggcgcctggcggaaatcggcggtcaacggcgcgtcgccgtaaccttttcacatattgccgctctgccggctgtggtcgccgacagcgatctgatcgccaccctggccgccagcgcggcccggcatttttccgatccgcaacgcgtacgcattctcccgctgcccgacgagttggccatcgcgcctttccccattgagctgatcgccggcaggctggcgcaacgcgacccggcgttaatctggctctgtgagctgataggccaactctccttcgccccctccctacgttaa

SEQ ID NO: 423382 - DNA, 648 bp, Serratia marcescens
atgaacaaagtcttgatcaccggcattgagccgttcgatggcgatgcggtgaatccttcctggcagattgcgcaggcgttggccggtgaacatattgccggcgcggagatcgcggcgctcgagctgccttgcgtgttgggcgaggccaatcagcaattgatcgcggcgattgaggcgctgcagccgctggcggtgatttgtctgggcctggccggcggccgggccgagatatcgctggaacgggtggccatcaatctgatcgatgcccgcattcccgacaatgccggtaaacagccggtcgatataccggtggtggccggcgggccggtggggtatttcagcacgttgccggtcaaggccgcagtgcagcagctgcgccgacaggggatcccggcggcggtctcttatacggcaggtacctataactgcaaccatattttttacggtctgcggcactatctcgagacgcagcacgcgaggggcaggggcggattcgtgcatgtcccgtacagccatgcactggcggcggcgcatccgggcaagccgagtatggcgctggcgacgatggtggaagcggtgcgcactattgtgcaggtgacgctgacggtcgaggaagatgtgcgattcggcgacggcgccatacattaa

SEQ ID NO: 423383 - DNA, 1035 bp, Serratia marcescens
atgtccccttcttctcaacagaaccgccgcttcctgctggcctcgcgtccgcacggtgaaccgacggcggccaacttccgtctcgataccgtccccgcaccgcagcccggcgccggacagctggtgctgcgcaccgtttatctgtcgctggatccttatatgcgcgggcgcatgagcgatgccccctcctacgcgccgccggtggagatcggtcaggtgatggtgggcggcacggtatcgcgcgtagcggcttcacagcatcccgatttcaacgtcggcgattgggtgttgggttatgacggctggcaggattacgccctgtctgacggcagcggcctgcgcaacctcggcccgcacctgccgcagccttcccgcctgctgggcgtgctgggcatgccgggatttaccgcttacatggggctgctcgacatcggccaaccgcaggcgggagaaacgctggtggtggccgccgccagcggtgcggtcggctcggtggtcggccaaatcggtaagctgaaaggctgtcgcgtcgtcggcgtcgccggaggggcggaaaaatgccgctatgtggtggaagagttgggtttcgacgcctgcatcgatcaccgcgcccctgactttgccgaacagctggcggccgcctgccctaaaggcatcgacatctattacgaaaacgtcggcggggcggtgttcgacgccgtactgccgctgttgaacaccaaagcgcgcattccggtgtgcggcatcatcgcccattacaatgccaccgggttgcctgcggggccggaccgcttgccgctgctggaggggctgatcctgcgcaaacgcatccgtatgcagggctttatcatcttcgacgactacggctcacgctttgacgagttcttgcaacaaatgagcagttgggtcgaggaggggaaaatcaagttccgcgaggacatcgtcgacgggctggagcaggcgccgcaggcgtttatcggcctgctgcagggcaagaacttcggcaagctggtgatccgcgtcgccgacgagtaa

SEQ ID NO: 423384 - DNA, 420 bp, Serratia marcescens
atggggtatcaaaacgttctggtcaccgtcgccgttgcccctgacagccaccgcctggtggaaaaagccgtctccatcgtccgcccttacggcggcagcatcaccttgttaagcaccctcgccaacccggaaatgtacaataatttcgccgggccgatgctgggggatttgcgctcgttgatggaggaggaaacccggctgtttatggaggaactgcgtcaacgcgccggttacccgatcgccgatgcgctgatcgtgcacggcgagctgggtgacagcctggaatacgccagccgccgtcagccgttcgacctgctgatctgcggcaatcatcgcgacggcatgatgaataaggtctcctgttccgccgcccgctttatcaatatcagccatatcgacgtgctgatcgttccgctctaa

SEQ ID NO: 423385 - DNA, 216 bp, Serratia marcescens
atgaccgatacgctcgaatatctgctgacattccgtaaatgctcctctttggacagcctggagaaggtgtacgacaaactgaactactccattgaaaatgataaagaaattagcaacatgtaccgcgccgccgaccaccgtcgcgccgagctggttgccggtaaattgttcgatctgggcaaggtgccgaaaacgctgtgggcgcaggtgctttaa

SEQ ID NO: 423386 - DNA, 351 bp, Serratia marcescens
atgggtacgtctgaattacttaagcatatttatgacatcaatctgtcatatttacttttagcacagcgtttgatcaacgatgaaaaagcctccgcgatgttccgtcttggtattgatgaagccatggccgatgcgctggcgcagctgactttgccgcaaatggttaaactggccgagaccaaccagctggtttgccacttccgctttaacgaaagccagaccatcgaacgcctgaccaaagagtcgcgcgtcgacgatctgcaacaaatccataccggcattttgctatcaagccatttactgcaagagctatcgagtaaagacgctagcccgacgaagaaaagagcctga

SEQ ID NO: 423387 - DNA, 582 bp, Serratia marcescens
atggttgagaaaagtatcgttcaagaagccaaggacattcagctcgccatggagctgatttcgctgggagcccgattgcagatgctggagagcgaaacccagctcagccgcgggcgcttgattaaactttacaaggagttacgcggcagcccgccgccaaaaggaatgttaccgttctcaaccgactggtttatgacctgggaacaaaatattcactcgtcgatgttttacaacgcctacctgtttctgatgaaaagcgggcagtgcagcggagtggaggcggtgatcaaagcctatcgcctctatctcgagcagtgcccccagcaggccggcgaggcgccgttgctggcgctgacccgtgcctggacgctggtgcgtttcgtcgacagcggcatgctgcagctctctgcctgcagctgctgcggcggcgcatttatcacccacgcgcaccagccgctgaacggtttcatctgcagtttatgccaacccccatcccgcgccgtaaaaagacgtaaactttcgccgcaactggccgatattattcctcaactgctggacgagcaggtcaaacgcgccatttga

SEQ ID NO: 423388 - DNA, 891 bp, Serratia marcescens
gtgctagttattttgggttatctggtggtattgggtgcggtgtttggcggctacctgatcgtgggcggccatctcggtgcgttgtatcagccggcggagtttctgattatcggcggggcgggggtcggcgctttcatcgtcggcaacaacggcaaggcaatcaaagccacgctgcgcgcgctgccgcggctgatgcgccgttccaaatacaacaaagatctgtacatggatctgatggcgctgctgttccgcctgctggccaaatcgcgccagcagggcatgctgtcgctcgagttcgatatcgataatccgcaagaaagtgaaattttttctaattatccgcgcatccttgccgataacaccctggtggagttcattaccgactatttacggctgatggtgagcggcaatatgaatgcgttcgagatcgaagcgctgatggacgaagagatcgaaacctacgagcaggaaagcgaagtgcccgccggcagcctggcgatggtgggcgactccttgccggcgttcggtatcgtcgcggcggtgatgggggtggtgcacgccctggcttcggccgatcggccggccgcggaactgggcgcgctgatcgccaacgccatggtcggtactttcctcggcattctgctggcctacggcttcatctcgccgctggccacattgctgcgccagaagagcgccgaaaacgtcaagatgatgcagtgcatcaaggtcacgctgctgtcgagcctgaacggctacgcgccgcagatcgccgtcgagtttggccgcaaaacgctgtataccaccgaacgtccttctttcgttgagctggaagaacacgtgcgccgcgtgaaagcgccggcgcagcaggcgacggaagaagaagaagcatga

SEQ ID NO: 423389 - DNA, 1071 bp, Serratia marcescens
atgaaacagaatcatccggtcgttctggtcagaaagcgcaagtcgcatcatgccgcccatcacggcggctcctggaagatcgcttatgccgactttatgacggcgatgatggcgttcttcctggtgatgtggctgctggcgatcgccagcccgcaggagctgacgcaaatcgccgaatatttccgcacgccgctcaaggtggcactgaccagcggcgacaagagcagctccgaaagcagcccgatcccgggcggcggcgacgatcctacccagcagcacggcctggtgagaaagcaggtcgattcgccggacaagcgcgccgaagagctgcgcctgaacaagctgcgcgaaaagctggatgagttgattgagtccgatccgcgcctgaaggcgctgcgcccgcatctgctgatcaacatgatggacgaggggctgcgcatacagattatcgatagccaaaaccggccgatgttcaaaaccggcagcgcgcaggtcgagagctacatgcgcgatattctgcgggcgatagcgccgatcctcaacgatttgccgaataagatcagcctgtccggccacaccgatgatatcccttacgccagcggcgagcgtggctacagcaactgggaactgtcggccgatcgcgccaacgcctcccggcgcgagctgatcgccggcggtctggcggaaggcaaggtgctgcgggtggtgggcatggcggccaccatgagcctgaaacagcacggcgccgatgacgcgattaaccgtcgcatcaccgtgctggtgctgaataagcaaacgcaagaaggcatcgaacatgaaaatgccgaaagcaacgcgatggatatcgcccagccggacagcctgaaacagctggcgccgtcggcgactgcgccggccagccaaacgccggagccctcggcggcagccctggagccggcggcgtcaacgccagcgccgagcgtcccagcgcaggtatccccggcgatagccccggccgatcaggcgcaggaacaaccggcggccgcacccgcaccgactaaccgcgactcacagccagaggtgaccccgtga

SEQ ID NO: 423390 - DNA, 2022 bp, Serratia marcescens
gtgagcatggacattagcgatttttatcagaccttctttgatgaggcggacgagttgctggccgacatggagcaacatctgctggagctggatccgctggcccccgatatcgagccgttgaacgccatcttccgcgcggcgcactcgatcaagggcggcgcggcgacctttggcttttcggtgctgcaggaaaccacccacctgctggagaacctgctggacggtgcaagacgccaggaaatgagcctgagcaccgagattatcaacctgtttctggaaaccaaagacattatgcaggagcaactggacgcctataaaacctcgcaacagcctgacgccgaaagctttgaatacatttgccaggcgctgcgccagctggcgttggaggcgcaacagcagcaggaggcgcctgcggctcaaccggccgttcagcagcctgtcgtgaagccggtggctgcgccggcggcgatcgaaggcggcatgcgcatcagcctgaacgggctgaaagccagtgaaatccccttgatgttggaagagctgggcaacctcggcgaggttaaagaccctcatcagacggaacacagtctggacgtgacgttgctcacctccgccagcgaagacgacatcagcgccgtgctgtgcttcgtgctggagccggaacaaatcagcttctcgacgccgacgcagagcgaaccggccgttgcagaagcgagcttaccggcagcggtcgccgcgccggaacctgcgccagcgccggtcgcgaacgccgcgccgcctgccgccaaaccggccgccgctccggcggaagcgccgaaagcgcgcgccaaggcgagcgagtccaccagcattcgcgtggcggtggaaaaggtggatcagctgatcaacctggtgggcgagctggtgatcacccagtcgatgctggcgcagcgctccggcacgctcgatccggtcaaccacggcgatctgctgaacagcatgagccagctggagcgtaacgcgcgcgatctgcaggagtcggtgatgtcgatccgcatgatgccgatggaatacgtcttcagccgctacccgcgcctggtgcgcgatctggccggcaagctgaacaagcaggtggagctgacgctgcagggcagttccaccgaactggacaagagcctgatcgaacgcatcatcgatccgttgacgcacctggtgcgcaacagcctcgatcacggtatcgaagaaccggccacccgcgtcgccgccggcaaatcggcggtgggcaatctggtgctgtcggccgaacatcagggcggcaacatctgtattgaggttatcgacgacggcgccggcctgaaccgcgaaaaaattctcgccaaggccgcgtcgcaagggctggcggtgagcgacagcatgagcgacgaagaagtcggcatgctgatcttcgcgccgggcttctccactgccgagcaggtgaccgacgtttccggccgcggcgtcggcatggacgtggtgaaacggaatattcaggagatgggcggccacgtcgagatccgttcgcaggccggcaaaggcaccaccatccgcatcctgctgccgctgacgctggcgatcctcgacggcatgtcggtcaaggtgaacgacgaagtctttatcctgccgctgaacgcggtgatggaatcgctgcagccgcaggcggaagacttgcacccgctggccgggggcgaacgcgtgctgcaggtgcgcggcgaatatctgccgctggtggagctgtatcgggtatttgaagtggacggcgccaaaaccgacgccacgcagggcatcgtcgttatcctgcaaagcgccggccgccgctatgcgttgctggtggatcaactgatcggccagcatcaggtggtggtgaagaatctggaaagcaactaccgcaaagtgccgggcatctccgccgcgaccattttgggcgacggcagcgtggccttgatcgtcgatgtctcggcgttgcaaaccttgaaccgtgaaaagcgtctgacggacgccgccgcataa

SEQ ID NO: 423391 - DNA, 501 bp, Serratia marcescens
atggcaggattggcagccgtcagcaaattggctggcgaaacggtagggcaagagtttctgattttcaccctgggcaatgaggagtacggcatcgatatcctcaaggtgcaggaaattcgcggctacgatcaggtgacccgcatcgccaacacgccggcgttcatcaagggcgtcaccaacctgcgcggcgtgattgtcccgatcatcgatctgcgggtgaaattctcgcagcaaagcgtgtcttacgatgaaaacaccgtggtgatcgtgctgaactttggccagcgcgtggtgggcatcgtggtcgacggcgtttccgacgtgctgtcgctgaccgccgagcagatccgcccggcgccggagttcgcggtgacgctggcgaccgaatacctcaccggtctcggttcgctgggcgagcgcatgctgatcctggtggatatcgaaaagctgttgagcagcgaagagatgtcgctggtcgacagcgtggcgaaaagcgtctga

SEQ ID NO: 423392 - DNA, 1671 bp, Serratia marcescens
atgttaaatcgtatgaaggtggtcaccagcctgttgctggtgttggtgctgtttggcgccttgcagttgatttcgggcggactctttttctcctcgctcaagaatgataaagagaactttgccgtactgcagacgattcgtcagcagcagtctgaattgaacgaaagctgggtcaacctgctgcagactcgtaataccctgaaccgagcgggtattcgttacatgatggataccaacaaaatcggcagcggtgccaccgtcaccgatctgttgacttcggcgaagagcatgctgacggtcgcggaacagcattacgccgcctatgaaaaaatccctctcgatccgcgtcaggacgtgcagtccgcggaaaaactcaagcaacagtatgacatcttgcacggtgctttgaccgaactgattcagctgttgggcgaaggcaaaatcaatgccttcttcgatcaaccgacacaaagctatcaggacggcttcgagcagatctacaacacctacctggcacaaaacgacaagctgtaccaaggcgcggtagaagacagcaacaagtcgttctcctcggccatttggacgctggtgatcgtgttgctggtcgtgttggccgtgatcgtgctcgtttggaccggcatccatcatatcctggtgcgcccgctgaaccgcatgattgaccacatcaaacagatcgccgccggcgacctgactcagcagatcgtcgtcaccagccgcaacgaaatgggcgtgctggcggccagcctgaaacacatgcaaagcgaactgatcgaaaccgtcagcggcgtgcgtcagggcgcggacgccatctacagcggcgcgtcggaaatcgccgcgggcaacaacgatctctcctcccgcaccgagcagcaggccgcttcgctggaagagaccgccgccagcatggaacagctgaccgcgacggtgaaacagaacgccgaaaacgcccgtcaggcttcacagctggcgctgagcgcctccgaaaccgcgcagaagggcggcaaggtggtggccaacgtggtgcagaccatgcacgacatcgccggcagctcgcagaaaatcgccgatatcaccggcgtgatcgacggcatcgccttccagaccaacatcctggcgttgaacgccgcggtggaagcggcgcgcgccggcgagcagggccgcggcttcgcggtggtggccggtgaagtgcgcaacctggcgcagcgcagcgcgcaggcggccaaagagatcaaaggcctgatcgaagactcggtcagccgcgtcgatatgggttccgtgctggtggaaagcgccggtgaaaccatgggcgacatcgtcaacgccgtcacccgcgtgaccgacatcatgggcgaaatcgcctcggcgtcggacgaacagagccgcgggatcgatcaggttggccaggcggtagcggaaatggaccgcgtgacccagcagaacgcctcgttggtggaagaatccgcctcggcggcggcggcgctggaagaacaggccagcatgctgacccagtcggtggcggtattccgcctgagggcggaaggccaggaagagtttaaagcgcctgtcaccagcaaggcgacggtaacaccggtaatcaatcataagaaaatgaacgccagcgatctgcaggataactgggaaacgttctga

SEQ ID NO: 423393 - DNA, 1617 bp, Serratia marcescens
gtgtttaaccgaatccgtatctctaccagcttgttcctgttgttgatgaccttctgcgttctgcagctggccagcagcggcctgtcgtattccgcgtttcgctccgataaccacaacctcgacatcatcaccctcggcagccagcagcgcgattcgctcagcctgagctgggtgtcgctgttgcaggcgcgcaatacgctgaaccgcgccggcacccgtgcggcgctgaaactgccgcaggagcaggtgaacgaattgatgagcagcgctcgcagttcgctgcagaaggccgatctttatttcaatcagttcatggcggttgagcgcagcagtgagcaacagagtcagcagacggcaaccaccaaggccagctacgagcggctgcgcggcgcgctgcgcgagctgatcggctttctggagaaaggggagctgcaggcgtttatggaccagccgacgcagaaaacccaggacttgttcgaagccgacttcgtgcagtacctgcagttggtcaacggcgacatcagcgaagccagagacgccaaccagttctccttcaagctggcgggcctgatgctggcgggggcggtcttgatgctgatcgtggtgaccggcagcgccatgtggtggttacgcaccatgctggtacagccgctgaaccagatccgcagccactttgaacgtatcgccgccggcgatttggcgacgccgattcaggtgtatggccgcaatgaaatcagcatgctgttcgccagcctgcaacgcacgcagcagtcgctgatcggcaccgtcggcgcggtgcgcgacggggcggagtcgattctgatcggcctgcaggagatcgccgaaggcaacaacgatctctcttcccgcaccgagcagcaggccgcgtcgctggaacagaccgccgccagcatggaacagctgaccgccacggtgaaacagaacgccgacaatgcgcggcaggcttctcagctggcgcgcgacgcctcggccaccgcggccaagggcggcgaactggccggcgacgtggtgaccaccatgcacgatatcgccaacagttcgcagaaaatcggcgccatcaccagcgtgattgacggcatcgccttccagaccaacattctggcgctcaatgcggcggtggaagcggcgcgcgccggtgaacaggggcgcggtttcgccgtggtcgccggcgaagtgcgcaacctggcgagccgcagcgcgcaggcggcgaaagagatcaaggtgctgatcgatgaatcggtcagccgcgtcaaacacggctcggtgctggtggaaaactccggcgccaccatgcaggacatcgtgcgttcggtgacccgcgtgaccgacatcatgggcgagatcgcgtcggcttcggatgaacagagccgcggcatcgagcaggtgacgcaggcggtgacccagatggatcaggtcacccagcagaacgccgcgctggtggaagagtccgcttctgccgccaccgcgctggaagagcaggccattaccctggctgacgcggtcgcggtattccgtctggcggacgataacttcgtcgcgccaggtaacagcaacaacgcagtttcacccgtggtaaaggaagcccaagattgttaa

SEQ ID NO: 423394 - DNA, 831 bp, Serratia marcescens
atgttgacgcaaatggtgcagcgcctgccgctgtcggacgtgcattttcgccgtatcagccagttgatttatcaacgcgccggcatcgtgctggcggagcataagcgcgagatggtttacaaccgtctggtgcgccggctgcggctgttgggactgcacgatttcggcgactacctggcgctgctggaaagcgatccgaacagcgcggagtggcaggcgtttatcaacgcgctgaccaccaacctgacggcctttttccgcgaggcgcatcacttcccgatcctggcggaacacgcgcgctcgcggccgaacggctacagcgtgtggagcaccgcagcctcgaccggcgaagagccgtattcgatcgccatcacgctgagcgatgcattgggccagcgggccggcagttgccaggtctgggccagcgacatcgatacgcaggtgctggaaaaagcggaagcgggcgtttaccgccaggaagatctgcgcaccctgacgccgacccaaatgcagcgctatttcctgcgcggcaccgggccgcatcaggggctggtgcgcgtgcggccggaactggcggcgcgggtgaactttcagccgctgaacctgctggcgccggagtgggcgctgccggggcagttcgacgccattttttgccgcaacgtcatgatctatttcgataaggcgacgcaggagcgcatcctgcgccgcttcgttcccttgcttaagccgggggggctgatgttcgccggccactccgagaatttcagccagatcagccgggatttctacttgcgtgggcagaccgtgtatgggctgaccaaggagaggtaa

SEQ ID NO: 423395 - DNA, 1050 bp, Serratia marcescens
atgagtaaaatcagagtgttatgcgtagacgattcggcactgatgcgccagctgatgacggaaatcgtgaacggccacgccgacatggagatggtggcgaccgcgccggatccgctggtggcgcgcgatctgatcaaaaaatttaatccccaggtgctgacgctggacgtcgagatgccgcgcatggacgggctggatttcctcgagaagctgatgcgcctgcggccgatgccggtggtaatggtctcttcgctgaccggcaaaggctcggaaatcacgctgcgcgcgctggagctgggcgcggtggacttcgtgaccaaaccgcagctcggcattcgcgagggcatgttggcctacagcgagctgattgccgagaagatccgcaccgccgccagggcgcgcctgccgcagcgttccaacagcccggcgccggcgatcctcagccacgcgccgctgctgagcagtgaaaaactgatcgccatcggcgcttccaccggcggcaccgaagcgatccgccaggtgctgcagccgctgcctgccaccagtccggcgctgctgatcacccagcacatgccgcccggtttcacccgttcgttcgccgagcggctgaacaagctgtgccagatcacggtgaaagaagcggaggacggcgagcgcgtgctgccgggccatgcctacatcgcaccgggggatcgccacttggaactggcgcgcagcggcgccaactatcaggtgaagctgcatgacggcccggcggttaaccgccatcgtccgtcggtcgatgtgctgttccgctcggtggcgcaatatgccggccgcaatgcggtgggcgtgatcctcaccggcatgggcaacgacggggcggcggggatgctggagatgcaccgcgccggggcctataccctggcgcaaaacgaggcgagctgtgtggtgttcggcatgccgcgcgaggcgatcgccggcggcggcgtcagcgaagtggtcgagctggacaggatgagccagcgcatgttggcgcagatcgccggcggccaggcattgcgcatttga

SEQ ID NO: 423396 - DNA, 390 bp, Serratia marcescens
atggcagacaagaacctcagatttctggttgtggacgacttttccaccatgcgtcgcatcgtcagaaatctgctcaaagagctgggcttcaacaacgtcgaagaagctgaagacggcgcggatgcgctgaacaagctgcgcgccggcggtttcgacttcgtggtgtccgactggaacatgccgaacatggacgggctggagctgctgcaaaccatccgcgccgatagcgcgctggccgcgatgccggtattgatggtgacggcggaagccaagaaagaaaatatcatcgcggcggcgcaggccggcgccagcggttatgtagtgaaaccatttacggcggcgacgctggaagaaaagctcaacaagatttttgaaaaattgggcatgtaa

SEQ ID NO: 423397 - DNA, 645 bp, Serratia marcescens
atgagagacattccaatgcctgccagcgatgcagcgaccgcgggagagatcatttcccgcatcggccaactgacccgaatgctgcgcgacagcatgcgcgaactggggctcgatcaggcgatcgcccaggcggcagaggcgatcccggatgcgcgcgaccgtcttgactatgtcgtaaccatgacggcgcaggcggcggaacgggcgttgaactgcgtggaggcggcgcaaccgcgccaggcggagctggaatccggcgcgaacgcgttgaaggggcgctgggacgagtggttcgccaatcctatcgaactggacgacgcgcgttctctggtcaacgacacgcgccagtatctggatcaggtgccgagccatacggccttcaccaacgcccagctgctggagatcatgatggcgcaggacttccaggatctgaccggtcaggtgatcaagcgcatgatggacgtggtgcaggagatcgaaaagcagctgctgatggtgctgatggaaaacatgccggagcagcctgtgaaggaaaaacggccaaacgacagcctgctgaacggcccgcagctcgaccagaacggcgtcggcgtgatcgccaaccaggcgcaggtcgatgatctgctcgacagcctcggtttctga

SEQ ID NO: 423398 - DNA, 1152 bp, Serratia marcescens
gtggctgaagacagcgatctggaaaaaagcgaggcccccacgccccataggctggagaaggcgcgtgaagacggccagatcccgcgttcccgcgaactgacctcggtactgatgctgctctcgggcctggcgatcatcctgatgtccggcagcaacatggcgcaacagctggcggcgatgctcacgcagggcttgaacttcgaccacggcatggtcagcaacgataaacagatgctgcgccagctgggcatgttgctgcgccaggcggtgctggcgctgttgccaatcatggcggggctggtgctggtggcgctcgccgcgccgatgctgttggggggcatcctgttcagcggcaagtcgatcaagttcgacttgaaacggctgaacccgttgtccgggttgaagcgcatcttttccagccaggtgctggccgagctgctgaaagggatcctgaaagcgacgctggtcggctgggtgaccggtctttatctgtggcacaactgggcggcgatgctgcatctgatgacccagcagccgctcgacgcgctgggcaatgcgctgcagatgattctgttctgcggttttctggtggtgctgggattgacgccgatggtggcgttcgacgtgttctaccagctgtggagccacttcaaaaagctgaagatgaccaagcaggatattcgcgacgaattcaaggatcaggaaggggatccgcacgtcaaggggcgcattcgtcagcagcagcgggcgatcgcccggcgccgcatgatggccgatgtgcccaaggcggacgtgatcgtcaccaacccgacgcactacgccgtcgcgttgcagtacaacgataaaaaaatgagtgcgccgaaagtgctggccaagggcgccggtgaaatcgccttgcgcatccgcgagctcggcgcggaacaccgcatcccgatgctggaagcgccgccgctggcgcgtgcgctatatcgacacagcgagattgggcaacatattccggccaccctgtatgccgcggtcgccgaagtgctggcctgggtgtaccaactgcgccgctggcggcgcgagggcggcttgatcccgaaaaaacctgaacgtttaccggtgccggaagcactggattttgcaaaagagagtgactctgatggctaa

SEQ ID NO: 423399 - DNA, 2079 bp, Serratia marcescens
atggctaatttggcctccctgcttcgtttgccgggcaattttaaagatacgcagtggcaggtgttggccggcccggtgttgatcctgctgatcctgtcgatgatggtgctgccgttgccggcgtttatcctcgacctgctgtttaccttcaacatcgcgctgtcgatcatggtgctgctggtggcgatgttcacccagcgcacgctcgaattcgccgccttcccgaccattctgctgttctccacgctgctgcgtttgtcgctcaacgtcgcgtcgacgcgcatcatcctgctggaagggcacaccggttccgccgccgccggccgtgtggtggaggccttcggccacttcctggtgggcggcaacttcgccatcggtatcgtggtgttcatcatcctggtgttgatcaactttatggtgatcaccaagggggcggggcgtatcgccgaagtgggcgcgcgcttcgtgctggacggcatgccgggtaagcagatggcgatcgacgcagacctgaacgccgggttgatcggcgaggacgaagcgaagaaacgccgcgccgaagtcacccaggaggccgatttctacggctcgatggacggcgccagtaaattcgtgcgcggcgacgccatcgccggcctgatgatcatggtgctgaacgtggtcggcggcctgttggtcggcgtggtgcaacacggcatggagctgggggcggcggcggaaagctatacgctgctgaccatcggcgacggcctggtggcgcagatcccggcgctggtgatctccaccgccgccggcgttatcgtcacccgcgtcgcgaccgatcaggacgtcggcgagcagatggtgggccagctgttcaacaatccgcgcgtgatgctgttgagcgccggggtgctcgggctgttgggcctggtgccgggcatgccgaacctggtgttcctgctgtttaccgccgctttgctgggcttggcctggtggctgcgcggccgtgaacaacaggcgccgagagcggttgaagagccagtggtgccggacaacccgcaggccgccgaagccagctgggccgacgtgcagttggaagatccgctggggatggaagtaggctatcggctgattccgatggtcgattttcaacagaacggcgagctgctgggccgtatccgcgggatccgcaagaaattcgcgcaggacatgggttatctgccgccggtggtacacattcgcgacaacctggaactgccgcctgccagctaccgcatcctgatgaaaggcgtcgaaatcggcagcggtgaagcgcagccgggccgctggctggcgatcaaccccggcaatgccgtgggcgagctggcgggagacaaaaccgtcgatccggcctttgggctcgaggcggtgtggatcgacagtgccttgcgcgagcaggcgcagatccagggctttaccgtggtggaagccagcaccgtggtggcgacacacctcaatcacctgatcggccagttcgccagcgagctgtttggccgccaggaaacccaacagttgctggatcgcgtgtcgcaggagatgccgaagctgaccgaagacttcgtgccgggcgtggtatcactgaccacgctgcacaaggtgctgcaaaacctgctggccgagcgcgtctctatccgcgatatgcgcaccattgtcgaaacgttggcggagcacgctccggcgcagagcgatccttatgaactgaccaccgtggtgcgggtggcgctgggccgggcgatcacgcagcagtggttcccgggcaacggcgagattcaggtcatcggtctggatacccaactggagcgtctgttgctgcaggcgttgcagggcggcggcggtctggagccggggctggccgatcgcctgctggaacaggcgcgccaggcgctgcagcggcaagagatgctcagcgcgccgccggtgctgttggttaaccatgcgctgcggcctttactggcgcgcttcctgcgtcgcagcctgccgcagctcgtggtgctgtccaacctcgagatcaacgacgatcgccagattcgcatgacctcgaccatcggagccgcctga

SEQ ID NO: 423400 - DNA, 405 bp, Serratia marcescens
atgaaacgctgtctgttcgtgctgtgtttgctggccccgttgactgccggcgcggtgtccggctcttgggtggccgaaggggcgggcgtgacgttggaacagggcggcatgcgcgatgagtccgccggtttgcggccgccgaacgcgctgccggacgccaatgcgcgcatcacccgcgtcagctggcgctaccgtttgctggggccggagccggccgggctgcaggcccagctctgcacggtaaaccgttgcattgcgctcggcggcggcagcggcagcagcaacggtttgcagggcgaaccggccaatgcggaattgcgctttgtctattacgtgcagtcgcaaggcgggctgaacccgccgctgcgggtgattggcaatcaggtgatcgtcaattatcagtag

SEQ ID NO: 423401 - DNA, 303 bp, Serratia marcescens
atgagcaagatgctgaaatcgatccaccaggaagttcagggcctgcaccgcgccggtttcgtcgacgacgtgaccatgcgcaccttcgacatgctgtgcctgcggccggtaaaacagttcgggccggccgagatccgcgcattgcgcgaacgcgaaaacgtcagtcagccggtgtttgcgctgtatctcaacgtcagcaaaaaggcggtgcagaaatgggagcgcggcgaagcgcaaccgaactccgccgcgatgaagctgttgacgctggtggaacgcaacggcctgcaaattctggcctga

SEQ ID NO: 423402 - DNA, 372 bp, Serratia marcescens
atgaccgacatttatctcacaaaagccttccagacatttgccggcgacgaacgcatcagtgacgccacgatagtgaaagcggcgcgagagatgcaaaatcagttgtacgacgccaatctcggtggttgcgtttacaaaaaacgcatcgcccggatggggagtggaaaacggcgcgggtatcgggtcttaatcgcaacggcagatgaaggcaggatctttttcatgtatggctttgccaaaaacgaaagagacaacatcaatcaggatgagttaatttcctggcggcatttggcggcgctgtatctggattattcaccattcagactgtatcagctggtcaactgcggggaattaataaggttacaactatga

SEQ ID NO: 423403 - DNA, 435 bp, Serratia marcescens
atggaaaacctggcacaactgctggataaactgttggaaacgctgcaggcgctcaatggcgtgctggaggaagagcacgacttgctgtgttccggccagttgcccggcgtggcgctgcagcgcgtaaccgatgccaaaagccagctgctggcgacggtcgcctacctcgagcaacagcgcctggggcaggaaagagcctgcgggcaacgcgcgccctacgccagccatgcgcccctggccgatcgctggcaacgcgttcaactgctgagccaaacgctgcgcgaaaagaatcagcacaatggcctgctgctcaatcagcagatcgaccataacgctcaggcgctggcgatcctgagcaagaacaataaatcgctgtatggcccggacggccagtcgcacgccggcagcctgctcggcagaaaaatcggcgtctga

SEQ ID NO: 423404 - DNA, 312 bp, Serratia marcescens
atgagtatcgatcgcacccagcggttacagccggtttccactgtgcaaccgcgtgaaaccccggccgacaacccgctccaaccgcgtaagaccgccgtggccgaaacggccgtcagcggcacgcaggtcaagctgagcgaggcgcaggcgcgcctgatgcagccgggcacccaggatatcgatatgggccgggtcgaggccatcaagcaggcgatccgcagcggcgaactgaagatggacgccggcaaaatcgccgacgcgctgctgcaagacgcgcagagcgacattcaatggatcgccgggcgcgactga

SEQ ID NO: 423405 - DNA, 660 bp, Serratia marcescens
atgacgatgaaaggtaaaatgctgctgcttatcggcctgctgtgcagtctgaacgcgcgcgccgacgatctggcgacgcaaatcgaaagcttcatccaaggcaagttcagcggcgaaccggtgcaggtgaaagtgcgggtgcgcacgccgccggcccagtggcccgcctgcgaactgccgcagctgtcgctgccgcccaacgcgcggatcggcggcaacgtcagcatttcggcgcgctgtggccaggagcggcgttttatccagacgcaggtgcaggtgttcggccgctatctggtttcggcgcgcggcatcagcgccggcagccggttgaccgcggcggatctgacgttgaaagaaggccggctcgataccctgccgccgcgcgcgctgaccgaagcgggcaaagcgttgggcgccgtcagcctgcgcaacatcagccccggccaaccgctgaccctcgccatgctgcgccgggcctggattatcaaggccgggcaatcggtacaggtcaacgcgcagggcgaaggattcaacatcagcggtgcgggcaaggcgatgaacaacgccgccgccgaagacagcgtgcgggtgcgcatggcgtccgggcagatcgtcagcggcgtggtcggagacgacggcgcgatccgcattacgttataa

SEQ ID NO: 423406 - DNA, 414 bp, Serratia marcescens
atgctcgacaaactggacgcggctctgcgctttggccaagaggcgctgaacttgcgcgcccagcggcaggaaattctggccgccaatatcgccaacgcagatacgccgggttatcaggcgcgggatatcgatttcgccagccaattgaacaaagtgctggaacaagggcgagtcaacggcaacggcatgtcgctgaacctgacggcggcgcgccacatcccggcgcagaccctgcagccgccgcagctcgatctgttgtaccgggtgccggaccagccatcgatggacggcaacacggtggacatggatcgcgaacgcaccaactttgccgataacagcctgaaatatcagaccgacctgacgctgctcaacgggcagatcaaagggatgatgtccgtgctgcaacaaggataa

SEQ ID NO: 423407 - DNA, 405 bp, Serratia marcescens
atgtctttactgaacatttttgatatctccggctcggcgctatcggcgcaatcccagcgcatgaacgtcagcgccagcaacatggccaacgccgacagcgtgactggcccggacggcgagccttaccgcgccaagcaggtggtgttccaggtcgcggcggcgcccgggcagccgaccggcggcgtgcgcgtcgcccaggtggtggacgatccggcgcccgaacgtctggtgtatcagccgggcaacccgctggcggacgccaagggctacgtgcgcatgccgaacgtcgacgtggtgggggaaatggtcaacaccatctccgcttcccgcagctaccaggccaacgtcgaggtgctcaacaccaccaagtcgatgatgatgaaaaccctgacgctgggtcagtaa

SEQ ID NO: 423408 - DNA, 678 bp, Serratia marcescens
atggctatcgccgcaaccaccaacgagtcgttggacaacaccgtcatcggtaacaacagcaaaaataccaacagccaggatctgcacaacagcttcctgacgctgctggtggcgcagttgaaaaaccaggatccgaccaatccgatgcagaacaacgaactgacttcgcagctggcgcagatcaacaccgttcagggcatcgaaaagctcaacaccacgctggggtcgatctccggccagatcaacagcaatcagtcgctgcaggcgactgcgctgatcggtcacggcgtaatggtgccgggcaacaacattctggtcggcagcaaggacggcaaggtcagcaccacgccgttcggcgtggaactggagcgcgccgccgatcaggtgaccgccaccatcaccaacgccagcgggcaggtggtgcgcaccatcgaaatcggcggcctgaccgccggcgtacacgccttcacctgggacggttcgctggatgacggcaccaccgcgcctgacggcgcctacaaagtggcggttaacgccaaaggcaacggcgagcagctggtggcgcgcagcctgcacttcgggctggtcaacggcgtgatccgcgacggcaacggcgccaaattggatctcggcctggcgggcaacgccaccctggaagacgtgcgacagatcttataa

SEQ ID NO: 423409 - DNA, 1224 bp, Serratia marcescens
atggccttttctcaggcagtcagcggcttgaacgcggcagcaaccaatctggacgtgatcggtaacaacatcgccaactccgcgaccgcgggcttcaaatccggcagcgtctccttcgccgacatgttcgccggttcgcaggttgggctgggcgtcaaggtgtccggcatcacccagaacttcaagggcggcaccaccaccggcaccagccgtgcgctggatatcgccatcaacggcaacggcttcttccgcatgcaggataaagacggcggcatcttctatacccgcaacggccagttcaagctggacgagaaccgtaacctgaccaacatgcagggcctgcagctgaccggttatccggcggccggttccccgccgaccatccagcagggcgccaacccggtgccgctgagcattcctgaaggcatgatgaatgccaaggcgtccacttccggcgagatggtgaccaacctgaagtccacccataaggtgccggagaacaagaccttcgatccgaccaaacaggacagctacaactacgttaacaccatcaccgcttacgactcgctgggcaacgcgcacaacatcaacgcctacttcgtcaagaccgacgacaacaagtggcaggtctatacccaggatggcagcgccgcgccagtgaacgccggcaccatggagttcagcaccagcggcaacctggtgaaaaccaccagcaccaacggcgcgccgggcgagttcagcatggtgatcccgatgactgccaaagacggcgcaccggcgcaaaacttcaccctgagcttcgccggcagcatgcagcagaacgtgggcagcgactcggtgagcaaagtggcgcaggacggctatgccgccggtgaatacaccaacttccaaatcaacaacgacggcaccgtcgtgggcatctactccaaccagcagacccaggtgctgggccagatcgtcatggccaacttctccaacccggaagggctggcgtcgcagggcgataacgtttggcaggaaaccggcgcgtccggtcagccgcgcgtcggtctgtcgggcggtggcggcttcggtaagctgaccagcggcgcgctggaatcttccaacgtcgatctgagccaggagctggtgaacatgatcgtcgcgcagcgtaactaccagtccaacgcccagaccatcaagacgcaggactccatcctgcagacgctggttagcctgcgctaa

SEQ ID NO: 423410 - DNA, 756 bp, Serratia marcescens
atggatcacgcgatttataccgcgatgggcgcggcgcgccaaacgctggagcagcagtccattaccgccaacaacctggccaacgcgtcgacgccgggctttcgcgcccagctcgccgcattgcgcgcggtgccggtcgacgggccgagcctggcgacgcgcaccttggtgaccgcgtcgacgccgggcgccgacatgagccagggggcgcttaactacaccgcgcgcccgctggacgtggcgctgcagcaggacggtttcctggcggtgagcctgccgggcggcggtgaagcctatacccgcaacggcaacattcagatctcctccaccgggcagttgacggtgcaggggctgccggtgatgggcgacggcggcccgatcgaggtgccgccgtcggcggagatcaccatcgcggccgacggcaccatttcggcgctgaacgccggcgatccgccgaacaccatcgcgcagatcggccgcctgaagctggtgaaggccgatgcgcgcgaagtgatgcgcggtgacgacgggctgttccgcctgacgccggaaacccaacagcagcgcggcaatcagttgcaaaacgatccgcaggtgcgggtgatgccgggcgtgctggagggcagcaacgtcaagccgatggagaccatggtcgacatgatcgccaacgcccgccgttttgaaatgcaaatgaaggtcatccacagcgtggatgaaaacgaacagcgtgccaactcactgctctcattgagttaa

SEQ ID NO: 423411 - DNA, 783 bp, Serratia marcescens
atgattccatccttatggattgccaaaaccggtctggacgcgcagcagaccaacatggacgtgatcgccaacaacctggcgaacgtcagcaccaacggcttcaaacgccagcgtgcggtatttgaagatctgctgtaccagaccatgcgtcagccgggggcgcagtcctccgagcagaccacgctgccttccggcctgcagatcggcaccggcgtgcgtccggtggcgaccgagcgtctgcacagccagggcaatctgtcgcagaccaacaacagtaaagacgtcgccatcaaggggcagggtttcttccaggtgatgctgccggacggcacccaggcctatacccgcgacgggtcgttccagatcgatcagaacggccaactggtgacctccagcggtttccaggtgcagccggcgatcaccattccggctaacgcgctgtccatcaccgtcggccgcgacggcatcgtcagcgtcacccagcaggggcaaaccgccgcccagcaggtgggccaactgacgctgaccacgttcgtcaacgacagcggtctggagagcgtgggcgagaatctgtaccaggaaaccgaaagctcgggtgcgccgaacgagagcaccccggggctgaacggcgccggtttgctgtatcagggttacgtggaaacctccaacgtcaacgtggcggaagagctggtcaacatgatccagactcagcgcgcgtacgagatcaacagcaaagcggtatcgacctccgatcagatgctgcaaaagctgacgcaactgtaa

SEQ ID NO: 423412 - DNA, 654 bp, Serratia marcescens
atgctgacgctgagcggctgcgcctatatcccgcacaaaccgctggtggacggcgcgaccacggcgcaaccggcgccggccagtgcgccgatgccgaacggctcgatcttccagacggtgcagccgatgaactacggctaccagccgctgttcgaagaccgccgtccgcgcaacgtcggcgataccctgaccatcgtgctgcaggaaaacgtcagcgccagcaaaagctcctccgccaacgccagccgcaacggcgccagcaagttcggcgtcgccacctcgccgcgttaccttgacggcctgctgggcaatgcgcgcgccgatatggacatttccggcgacagcaccttcggcggcaagggcggcgccaacgccaacaacaccttcaacggcaccattacggtgacggtcaaccaggtgctggccaacggcaatctgcacgtggtgggggaaaagcagatcgccatcaaccagggcacggaattcatccgcttctccggcgtcgtcaacccgcgcaccatcagcggcaacaactcggtgacctcgacgcaggtggcggacgcgcgtatcgaatacgtcggcaatggctatatcaacgaagcgcagaccatgggctggctgcagcgcttcttcttaaatgtttcaccgttctaa

SEQ ID NO: 423413 - DNA, 1101 bp, Serratia marcescens
atgctgaaaaaatggtttatcgcgctgtgcgtcgggctggtgtgcttgccggcggcggcggagcgcatccgcgatctggtgacggtgcagggcgtgcgagacaacgccctgatcggctacggcctggtggtggggctggacggctccggcgaccagaccatgcagacgccgttcaccacccaaagcctgagcaacatgctgtcgcagctgggcatcaccgtgccgccgggcaccaacatgcagctgaaaaacgtggcggcggtgatggtgaccgccaaactgccgccgttctcgcgcgccgggcagaatatcgacgtggtggtttcttcgatgggcaacgccaagagcctgcgtggcggcaccctgctgatgacgccgctcaaaggcgtggataaccaggtttatgcgctggcgcagggcaacgtgctggtcggcggcgcgggcgcggcggccggcggcagcagcgtgcaggtcaaccagctggcgggcgggcgcatcagcaacggcgccaccatcgagcgtgagctgccgaccaccttcggcagcggcggcgttctcaacctgcagctgaacgacgaagatttcacgctggcgcagcagatcagcgacgccatcaaccgccaacgcggcggcggcaccgcgacgccgctcgacgcccgcacgatccaggtgctggtgccgcagggcaacagctctcaggtgcgcttcctggcggagattcaaaacattaccgtcaacgtcggcgcgatggacgccaaagtgatcatcaactcgcgcaccggttcggtggtgatgaaccgcgatgtgatcctcgactcttgcgccgtcgcccagggtaatctgtcggtggtggtcgatcggcagaacaccgtcagccagccgacgacgccgttcggcggcggccagacggtggtgacgccaaacacccagatctcggtgcaacagcagggcggatcgctgcagaaagtgaacgccagcgccaacctgaacaacgtgatccgcgcgctgaacgcgctgggtgccacgccgatcgacctgatgtcgatcctgcaggcgatgcagagcgccggctgcctgcgcgccaagctggaaatcatctga

SEQ ID NO: 423414 - DNA, 945 bp, Serratia marcescens
atggccggcgatctgatggcgatgtcgggcgcggcctatgacgcccaggcgctgaacggcctcaagcgcgacgcggcggccgacccgcagggcaacctcaagcaggtggcccagcaggtggaaggcatgttcgtgcagatgatgctgaaaagcatgcgttccgccttgccgcaggacggggtattgagcagcgatcaaacgcggctctacacctcgatgtacgaccagcaaatcgcccagcagatgtcgcaaaaagggctggggctggcggacatgatggtcaagcagatgagcaacgccaacacggtgccgagcgaaacggcgggcctgtcgccgatggcgctggataacgaggtgctgcaaacgctgccgaaccaggcgctggagcagatggtgcgccgcgcgatgccgaaagctccgccggccgccgcgccgctgtcgctcaacaacggcaacttcgtcgctcgcctgtcgataccggcgaaggtggccagccagcagagcggcattccgcatcagctgatcgtcgcgcaggcggcgctggagtccggctgggggcagcgcgagatcacgacctcagacggcacgccgagctacaacctgttcggcatcaaggccggcggcagctggaacgggccggtgacggagatcaccaccaccgagttcgaacagggcgcggcgaagaaggtgaaggcgaagttccgcgtttacggttcgtatgtcgaagcgatcgctgattacgtcaaactgctgaccaacaacccgcgctacgccgacgtggccgccgcgcgcagcccggagcaggcggcgcatgcgctgcaacgcgccggctacgccaccgacccgcagtacgccagcaaactggtcagcgtgattcagcagatgaagaacgcaggggaacaggcggtcaaagcgtatacccacgatttgaaagatttgttctaa

SEQ ID NO: 423415 - DNA, 1650 bp, Serratia marcescens
atgtccaatagcttaatcaataccgcgatgagcgggctgaatgcggctcaggtggcgctcagtaccgtcagcaacaacatctccaactacaacgtggcgggctataaccgccagaccgcgatcctggcgcagaacggcggcatggccaccatgagcggctttatcggcaacggcgtgaccgtcaccagcgtcaaccgcgagtacaaccagttcatcaccaaccagctgcgcggtgcgcaaagcgccttcggggcgcaaaacgcctattacgagaagatttcgcagatagacaacctgctggcgagcaaaaccaacccgctgtcgaccaacatgcaggatttcttcaccaacctgcagaacctggtgagcaacgccggtgacgacgccgcgcgccagacggtgttgggcaaggccaacggcctggtgaaccagttcaacaacaccgacaaattcctgcgcgacatggacaacggcgtcaatcagcagatcagcgatacggcgcagcagatcaacagctacggccaacagatcgccaagctgaacgacgagatcacccgtttgcgcggcagcgccggcggcgagccgaatgcgttgctggatcagcgcgatcagctggttaccgagttgaatcagctggtgggcgtgcaggtcacgcagcaggatggcgacgcttataccgtctccttcgccaacggtttgaccctggtgcagggcagcaacacttatcaggtggaggcgatgccttccagcagcgatccttcccgcctgaccatcggttataaccgcggcaatggcgccagcgaagtgccggaaggccagatcaccagcggcagcctgagtggcgtgctgaaattccgcagcgagacgctggacggcgtgcgcaatcagctgggccagttggcgttggcgatggcggacagctttaaccagcagcatcgcgccggtttcgacctgaacggcgacgcaggcggcgacttcttcagcttcagcggcggccgggtggtggataacacccgcaacaccggcgacgcgtcgctgtcggtcgcttacaccgacaccggcaaggtgaaggccaacgattatcgcgtcgagttcgacggcagcaactggcaggtcagccgcctgccggacaacgtgaaagtcaacgccacgccgggcaccagcgccgatggcaaaccgacgctgaacttcgatgggctggaagtgagcatcgacggcaatgcgcaggctaaagacagcttcaccgtgaagccggtcagcgacgtggcgggcaacctgaaagtggccatcaccgattcgtccaagatcgccgccgccggtaaagacgacagcggccgaggcgataacgaaaacgccaagaagctgctggatctgcagaccaaaaacctggtggacggcaaggcgaccttgagcggcgcttacgccggcatcgtcagcggcgtcggtaaccagaccgctgccgccaaggccatcgccacttcgcaggccaagatcgtgacgcagctgggcgcgcaacagcagtcgatgtccggcgttaaccttgacgaagagtacggcgagctgctgcgtttccagcagtactacatggccaacgcgcaggtgatccagaccgccagctcgctgttcgacgcgctgctgaatattcgttga

SEQ ID NO: 423416 - DNA, 960 bp, Serratia marcescens
atgcgcatgagcaccagcatgatgtaccaacagaacatgaacggcatcacgggcaaccagtcgctgttcatgaaggccgccgagcagctttcctcgggcaagcgggtgatcaacccgtccgacgatccgctggcggcgtcgcgcgcggtgatgttgtcgcagtcgcaggcggaaaacagccaatacacgctggcgcggactttcgctcgccaaagcgtgtcgatggaagaaacggtcttggccggcgcgacgtccaccatcgcggacatgaaggcgctgatcgtcagcgccggcggcacggaaagcgataacgaccgccagtcgttggccacccagctgcaggggctgaaagatcagctgctgaaccaggccaacagcaccgacggcaacggccgctatatgttcggcggatacgtgaacgacaaggcgccgttcgtcgacaacggtggcaccgtcagctatcagggcggtgacaagacggttcagcagaaagtggacgccaaccgcaccatgaccatcggccataccggcaacgcggtgttcatgtcgttgaccagcaacccgaagcctgagccggacggtagcgcgccggtcagcaacgtattcgagagtatcgatatcgcgctgaacgcgctgaaaaccccgctgcagggcgccgatgaggccaccaagcagcaggtgaacgatgcgctggcgaaagccaaccgcggcctggacaactcatacaacaacgtgctgagcgtgcgcgccgagctgggcagccagctgcaggagatggatcagttggacagcatcggcaaagagcgcgacatgaccaaccaggtccagatgagcgcgttgacggatgccgacctggccgagtctatttcgtcttactttatgcagcaggcggcgctgcaggcgtcgtataaaaccttcagcgatatgcagggcatgtcgctgttccagatgaatcgttaa

SEQ ID NO: 423417 - DNA, 135 bp, Serratia marcescens
atgattaaagcgaaaagcaaccgcaaagcacgccggttattcggtttgacccactggaaaagcaacaagtttagagtttcttttaccgagacggccgacggcggaaaatggaaagtagagaagaaaaagaaatag

SEQ ID NO: 423418 - DNA, 783 bp, Serratia marcescens
gtgctcaccttcgacagcgcccagctcaccgtctggctcagccactatttttggccgctgctgcgcattctggcgctgatcagcaccgcgccggtattcagcgaaaagcaaatcagcaaaaaggtcaaaatcggccttggcgggctgatcgtcatcctgatcgcgcctacgctgcccgccagcaatatcccgatcttctccgccgccggcctgtggctggcgattcaacagattctgatcggcgtggcgctgggattgaccatgcagttcgccttcgcggcggtgcgcctggcgggcgaagtgatcggcatgcagatgggcctgtcgttcgccaccttcttcgatcccagcggcggcccgaacatgccggtgctggcgcgcctgctcaacctgctggcgatgctgctgttcctcagcttcgacggccatctgtggctgatttcgctgctggcggacagcttccacaccctgcctgtccaaacgcagccgctgaacggcaacggcttcctggtgctgacccaggtcggctcgctgatcttcatcaacggcatgatgctggcgctgccgctgatctgcctgctgttgacgctgaacatggcgctcggcttgctcaaccgcatgacgccgcagctgtcggtcttcgtgatcggtttcccggtcaccatgaccttcggcatcatgacgctgggcatgatgatgccgatgctggcgccgttctgcgaacatctgttcggtgaaatcttcgatcggctggcggcggtgatcggcggcatgactttctga

SEQ ID NO: 423419 - DNA, 270 bp, Serratia marcescens
atgacacctgaatcggttatggcgctcggcaccgaagcgatgaaagtggcactggcgctggccgccccgctgctgctggcggcgctgatcagcggcctggtggtcagcctgctgcaggccgccacccaaatcaacgaaatgacgctgtcgttcatccccaaaattctggcggtggtggccaccatcatcatcgccggcccctggatgttgaacctgctgctggactacatgcgcaccctgttcagcaacctgcccaccctgatcggctaa

SEQ ID NO: 423420 - DNA, 762 bp, Serratia marcescens
atgacctcgactcttcataccctcgtccgccgtccggcggtttggctccctgccgccctgctgttcatcagcccggcggctttggcgcaactgccggggctgatcagccagccgctggccaacggcggccaaagctggtcgctgccggtgcagacgctggtgctgttgacctcgctgaccttcctgcccgccatgctgctgatgatgaccagcttcacccgcatcatcatcgtgctcgggctgctgcgcaacgcgctgggcaccccgtcggcgccgccgaatcaggtgatgttggggctggcattgttcctcaccttcttcatcatgtcgccggtgttcgacaaagtctatcaggacgcctacctgccgttcagccaggacaagatcgggttggaggtcgcgctggataaaggcgcgcagccgctgcgcgaattcatgctgcgccaaacgcgcgaaaccgatctggcgctgtacgccaggctggccaatcagccaccgctggccggcccggaggcggtgccgatgcgcatcctgctgcccgcctacgtcaccagcgaactgaaaaccgccttccagatcggctttacggtgttcattccgtttctgattatcgacctggtggtcgccagcgtgctgatggcgctggggatgatgatggtgccgccggccaccatctcgctgccgttcaagctgatgctgttcgtgctggtcgatggctggcagctgctgctcggctcgctggcgcagagtttctattcgtaa

SEQ ID NO: 423421 - DNA, 405 bp, Serratia marcescens
atgaccgtcgcggcgcccgttaccgtccaaagcagccaaccacccgccgcgccggccttgccggccggttcggtgttgatgcaggtcagcagcgcgctcggcggcattctgctgctgatcctgctggccggttggctgttccgccggctgggcttcgccccgcaggcgcgcaacaacaagctgctcaacctgcgcgccagttgccaggtcgggcagcgcgagcgcgtagtggtggtggaagtcgacgataccttgctggtattgggcgtcaccgcccagcagatcaccccgctgcacaccctgcccgccccgccgaaagacgaaggcgcggccgacgcggcgacgccggcggacttccgccaactgatgcaaaaagttctgaaacgcccggaaaaatcggcatga

SEQ ID NO: 423422 - DNA, 417 bp, Serratia marcescens
atgagtgatcctaagcaaccgtctggcgaaggaaaggaatccgtagacgatctgtgggctgatgcgtttaacgagcagcagtcctcagagaagtccggcgcgagcaccgaaggggtgttcaagtcgctggaagctcaggatgcgctcggcagcctgcaggatatcgacctgatcctggatattccggtcaagctgaccgtggaactggggcgcaccaagatgaccatcaaagagctgctgcgcctgtcgcaaggctcggtggtagcgctggacggcctggccggcgagccgctggacatcctgatcaacggttacctgatcgcacaaggtgaagtggtggtggtggccgacaagttcggcgtgcgcatcaccgacatcatcaccccgtccgaacgcatgcgccgactgagccgctga

SEQ ID NO: 423423 - DNA, 1005 bp, Serratia marcescens
atgggcgacagcattctttcacaggcagagatcgacgccttgctcaacggcgacagcgcgggtgatgaacccgaagcgatagtcggcaaagagagcgaggtcaagccttacgatccgaccacccagcgccgcgtggtgcgcgagcgtctgcacgcgctggaaatcatcaacgaacgttttgcccggcagttccgcatggggttgttcaacctgctgcgccgcagcccggacattaccgtcggcccgatcaaaatccagccgtatcacgagttcgcccgcaacctgccggtgccgaccaacctgaacctggtgcatctgaacccgctgcgcggcaccgccctgttcgtgttcgcgccgagcctggtgttcatcgccgtcgataacctgttcggcggcgacggccgcttcccgaccaaggtcgaaggccgcgagttcaccccgaccgaacagcgggtgatcaagcgcatgctgcgcctggcgctggacgcctacggcgacgcctggagcgccatctacaagatcgacgtggagtacgtgcgcgccgaaatgcaggtgaagttcaccaacatcaccacttcgccgaacgatatcgtggtcaccacgccgttccaggtggagatcggcgcgctgaccggcgagttcaacatctgcattccgttcgcgatgattgagccgctgcgcgagctgttgaccaacccgccgctggaaaattcgcggcaggaagacagccactggcgcgaaaccctggtgaagcaggtgcagcactccgaactggagcttatcgccaacttcgtcgatatcccgatgcggctgtcgaaagtcctgaagctgcagccgggcgatgtattaccgatagacaagccggaacgcctgattgcccatgtggacggcgtaccggttctgaccagccaatacggcacgttgaacgggcaatatgccctgcgtgttgaacatttgattaaccctattttgaatgctctgagtgaggaacagcccaatgagtga

SEQ ID NO: 423424 - DNA, 486 bp, Serratia marcescens
atgtctcagaacacccttcccgcagcaccgaaacgctcccttctggtcatcctgctggtgttgatcagcgtcgtcgcctgtggcgccgcgggctacagctggtggctgctgcaacagcataaaaacggcgccgaaccggccgccgccaaacagcaaccgccggccgcgccggtgttcatgccgctcgacacctttaccgtcaacctggtgacgccggacaacaatccggatcgcgtgctgtacatcggcctcacgctgcgtctgccggacgaaagtacccgccgtcagctgaacgactttctgccggaagtgcgcagccgtctgctgatgctgctctcccgtcaggaagcgagccagctggccaatgaacaagggaagcaacggttggtggcgcagattaaggacgtgctcagcccgccgctggttaagggacaaccgaagcaggtggtcagcgacgtgctgttcaccgccttcatactgcggtaa

SEQ ID NO: 423425 - DNA, 1233 bp, Serratia marcescens
atgaatctgaacgccctgcccggcctggccttacccggcgacgccggcggcctggccgaactgacgtcggcgctggatgagagccagctgtcgtccgctttcgcccagctgctcggcgcccgtttcgcgcccgccgccgacggcaaacagccgccggtcgcgctgagcgcggacgaagaacgcgccccggccctgagccgcaaccagctcaatcagctgctggccaccttcggcgagcgcggcggcctgctgccgggccagacggcctcagccgacgcgctttcacctgagggcgccgagggcgaagcgcccgccgccggcgacaaaccggcgcagccgcctatcgccgccgccaaagagctggatgccgcaacgctgcaggcgctgtacgccatgctgccggccgcgatcgtcgcccagactcagccagccgacggccaacgctcgctgccggtggatagcgctgatgaggcgactgcgctgcagcccggcaatggcctgctgaacatcgcagcggccggtgataaaaccgccgcgcgttcatcggcatcccccgctccgtcgctgacgggggcgaaaacatcggctaccgacggcgataatgccaaggcggcgctcccgcaaccagccaacggcgaacgcgcaagtaccgcacagccgctgccggcgagcgatgcacagcagccgccgacgctcaaccacgccgtcgccctggccgccgccagcccaacgcaaacggccgctcctgccagcgcactggtgaccgcaccgcctgcgccgcagctcaacgcgcagctgggcagcccggagtggcagcaggcgttgaaccaacaggtgctgatgttccaccgcaacggccagcagagcgccgagctgcgcctgcacccgcaggaactgggcgccctgcagatcacgctgaaactggacgatcagcaggcgcagctgcacatcgcctccgctcacggccaggtgcgtgcggcggtggaagcggcgatgccgcagctgcggcacgcgctggcggagagcggtatcaacctggggcaaagcagcgtgggcggcgagtccaccccgcaatggcagcagcaggcgcaacagcaggcttccaacggccaggggcgttccagctatgctgaacatcatggcggtgacgacgcagccgccgagggcgtcagcgcaccggcggcgctgcagcgtatggccagcgcggtcaacggcgtcgatattttcgcctga

SEQ ID NO: 423426 - DNA, 447 bp, Serratia marcescens
atgaaatcacaatcccccctgattaccctgcgagatctggcgcaagatgcggtggaacaggccgcgcaacagctgggtcaggtacggcaggcgcagcaggcagcagagcagcagctgtcgatgctgctcaactatcaggacgaataccgccagaagctgaatcatacgctctgcgacggcatggacagctcacgctggcaaaactaccagcagtttatcggcacgctggaacaggccatcgaccaacaccgccagcagctgctgcagtgggggcagaaagtggatcatgcggtgaagcaatggcaagacaaacaacagcggctgaacgctttcgagaccctgcatacccgcgctctgacggcggagcagcagcaggagaacaaacgggatcaaaaactgatggatgagttcgctcaacgcagtgcacaaaggaatatcaacccatga

SEQ ID NO: 423427 - DNA, 1362 bp, Serratia marcescens
atgaccgcgcgtctcggccgctggctgagctctctggatacgctggaaaaacgcatcgcgcgcgcgccgacggtgcgccgctacggtcgcctgacccgcgccaccggattggtgttggaagccaccggcctgcagctgccgctcggcgcgacctgcctcatcgaacggcacgacgccggtaaggtgcaggaagtggaaagcgaagtggtcggcttcaacggccagcggctgttcctgatgccgctggaagaggtggaaggcatcgtgccgggcgcgcgggtttacgcccgcatcgcgccggaaggccaaagcgccggcaaacagctgccgctcggcccggccctgttggggcgcgtgctggacggcagcgccaaaccgctcgacggcctgccttcaccggaaaccggttaccgcgcgccgctgatcaccgcgccgttcaaccccttgcagcgcacgccgatcgagcaggtgctggacgtgggggtgcgcaccatcaacggcctgctgaccgtcggccgcggccagcgtatgggcctgttcgccggctccggcgtcggcaagagcgtgctgctcggcatgatggcccgttatacccaggcggatgtgatcgtcgttggcctgatcggcgagcgtggccgcgaggtcaaagactttatcgagaacattctcggcgccgaaggccgggcgcgctcggtggtgatcgccgcgccggcggacgtctcgccgctgctgcgcatgcagggggcggcctacgccacccgcatcgccgaagatttccgcgatcgcgggcagcatgtgttgctgatcatggattccctcacccgctacgccatggcgcagcgtgagatcgccctggccatcggcgagccgccggcgaccaaaggctatccgccgtcggtcttcgccaagctgcctgcgctggtggaacgcgcgggcaacggcatcagcggcggcggatccatcaccgccttctacaccgtgttgaccgaaggggacgatcagcaagacccgatcgccgactcggcgcgcgcaattctcgatggccacgtggtgctgtcccggcgcctggcggaggccggccactacccggcgatcgacatcgaagcgtcaatcagccgcgccatgacgtcgctgatcgacgaagagcattaccgccgggtgcgcaccttcaaacagatgctggccagctatcagcgcaaccgcgatctgatcagcgtcggcgcctacgcggcgggcagcgatccgttgctggacaaagcgatgacgctgtatccgcagatggaagcctacctgcaacagggcatctttgaacgcagcggctacgatgaagcctgtcaacagctgcagcagttgattgtttaa

SEQ ID NO: 423428 - DNA, 705 bp, Serratia marcescens
atgtctgatcgcattaacaccctgccctggcagccctggtcgctcaacgatctgggcgaacagaaaccggcgatcgaactgccgcagttgccggatctcgaacttgacgatccgtcaccggacgcacaggccgaattgcagcagcagttggcgacgctgcgcctgcaggcggagcaacagggccagcagttgggctatgccgacggccagcaaaaaggctatgaggccggttttcagtccggactggaggaaggccgccagcaagggctgctggaagcgcaacagcagcaacagccgctgaccgcccactggcagcagctggtcaccgaattccagcacacgctggacgcgctcgacagcgtgatcgcttcgcggctgatgcagctggcgctgaccgccgccaagcaggtgctgggccagccgccggtgtgcgacggcaccgccctgctggcgcagatccaacagctgatccagcaggaaccgatgttcaacggcaagccgcagctgcgggtacacccggacgactactcgcgcgtcgagcagcagttgggggtcaccctcagcctgcacggctggcgcctgctggcggacggcgagctgcacccgggcggctgcaaggtcagcgccgaggaaggcgatctcgacgccagcctggcgacgcgctggcatgaattgtgccgcctggcggcaccgggagaagtctga

SEQ ID NO: 423429 - DNA, 993 bp, Serratia marcescens
atgagcctgaccggaaccgacaaaagcgccatcctgctgatgacgctgggtgaagatcgcgcggcggaggtgttcaaacacctctcctcgcgcgaagtacagctgctgagcggcaccatggccggcatgagccaggtttcacacaaacagctcggcgaaatactgaccgagttcgaagacgacgccgagcaatacgcggcgctgagcgtcaacgccagcgactacctgcgttcggtgctggtcaaggcgctgggcgaagagcgcgccgccagcctgctggaagacattctcgaatcgcgcgagaccaccaccggcatggaaacgctcaactttatggagccgcagagcgccgccgatctgatccgcgacgaacacccgcagatcatcgccactatcctggtgcacctcaaacgcggccaggcggcggatatcctggccctgttcgacgaacgcctgcgcaacgacgtgatgctgcgtatcgccaccttcggcggcgtgcagccggcggcgctggcggagctgaccgaagtgctgaacaacctgctcgacggccagaacctcaaacgcagcaaaatgggcggggtgcgcaccgccgccgagatcatcaacctgatgaaaacccagcaggaagaggcggtcatcgacgcgatgcgcgaatacgacggcgagctggcgcagaagatcatcgacgagatgttcctgttcgaaaacctggtggaagtcgacgatcgcagtatccaacgcctgctgcaggaagtggaaggcgagtcgctgctgatcgcgttgaaaggcgccgagcagccgctgcgcgagaagttcctcaagaacatgtcgcaacgcgccgccgacatcctgcgcgacgatctggccaaccgtgggccggtgcgcatgtcgcaggtggagaacgagcagaaagccatcctgctggtggtgagacgcctggcggaaagcggcgaaatgatcatcggcggcggcgaggacacctatgtctga

SEQ ID NO: 423430 - DNA, 1707 bp, Serratia marcescens
atgagtgcttcgataaccgccggcgaaagccgcgacaacggcctgcaggccatctggaatcgtctgcgcgccaacccgaaaattccgttgctggtcgccgcctccgccgcgatcgccatcgttgtcgcgctgctgttgtgggtgaaaagccctgactaccgcgtgctgtacagcaatctgaacgaccgcgacggtggcgccatcgtcacccagctgacgcagatgaatatcccttaccgcttcgccgagaatggcgcagcgctgctgatcccggcggaaaaggtgcatgaaacccgcctgcgtctcgcgcagcaagggctgccgaagggcggcgccgtcggcttcgaactgctggatcaggaaaaatttggcatcagccaattcagcgaacagatcaactatcagcgcgcccttgagggcgagctgtcgcgcactatcgaatcgctggggccggtgcaaaacgcccgcgttcacctggcgctgcctaaaccttcgctgttcgtgcgcgaacagaaatccccttccgcgtcggtgacgctgaccctgcaacccggccgtgcgttggacgacggccagatcaacgccatcgtttatatggtgtcgagcagcgtcgccggcctgccgccgggcaacgtgaccgtggtcgatcaggccgggcgcctgctgacgcagtccgacggcaccgggcgcgatctcaacgcctcgcagctgaaatacgccaacgaagtggaaaacggcttccagcgccgcatcgaagcgatcctcgccccggtggtcggcagcgccaacgtgcgtgcgcaggtcacggcacagatcgacttcgccactcgcgaacaaaccgatgaacagtaccagccgaaccagcagccggacaaagccgctatccgctctcagcaaaccagcctgagcgagcagatcggcgggccacaggtgggcggcgtgccgggcgcgctgtccaatcagccgagcgcgccggccaccgcgccgattgagaccgccaagccggccaccgcagcaggcaacaatgccaatgccaacgcgaccgcgcaaaatgccgcgaccacccgcagcgcggcggccaacggcgtgccgcaaaatacccgtcgcgacgcgaccaccaactacgagctcgaccgcaccattcgtcacacccagcaaaaagccggcaccgtgcagcgtctgtcggtcgccgtggtggtcaactatctgggcaccgataaagacggcaaaccgcagccgatgagcaaagagcagctggcgcagatcgaagcgctggtgcgtgaagcgatgggctactccagcagccgtggcgacaccctgaacgtggtcaacacgccgtttaccgacactcaggtgaccggtggcgaactgccgttctggcaaagccagtcgtttatcgatcgcctgatcgacgcgggccgctatctgctggtgctgctggtggcctggctgctgtggcgcaaactggtgcggccgcagctgcaacagcgccaggcggcgcaacaggccgccgtcgccgccgccaacgcccctgccgccaaagcggtcgacagcagcaaaccgagcaacgaggagctggcgcagcgtcgtaaatcgcagcagcgcgtcagcgcagaagtccagagccagcggatccgcgatctggctgacaaagacccacgcgtggtcgctctggtaatccgccaatggatgagtaacgagatatga

SEQ ID NO: 423431 - DNA, 315 bp, Serratia marcescens
atggcgattcagggcattgaaggggtgctgcagcagatgcagaccatggcggttcaggccggcaagatggggcagaatacggcgccgcagggcgtcagcttcgccagcgaactgactgcggcgctcggcaagatcagcgagacccagcaaacggcgcgcaagcaggcgcaggatttcgaactgggcgtgccgggcatcagcctgaatgatgtgatggtcgatctgcagaaatcatcggtctcgctgcagctgggcgtgcaggtgcgcaacaagctggtcgcggcctaccaggacatcatgaatatgccggtgtga

SEQ ID NO: 423432 - DNA, 201 bp, Serratia marcescens
atgtgcaaatcgctgtatcttgctgtgggcatcatggcgctgtctggatgcgccgggcaaaacgatgactattcatcggcccataaaaacgcggctcatcaggaagcaggcaaggaatggaaagcgtttgttgcgccgctgtccgtcaaaacgcagtcgcccggcgagcgagaaatgaaacgcgctgcccgccacgattga

SEQ ID NO: 423433 - DNA, 600 bp, Serratia marcescens
atgaaaaaaatactggtgctcaaatccagcattatgggaaacgactcgcagaccagcaacctgattgaccgctatctggcggagcgtcgggccaaaggatatgaagatcagatcgtcgaacacgatctgacggcgttggatctgccggtattggacggcgagctgttcagtgcgctgcgcggcgcagataacatcagcccacgcgccaaagcggcggtggcgctttccgatcggttgatcgccgaactgaaagggagcgatctgctgctgatcggcgcgccgatgtacaacctcaacgtcccgacccagctgaaaaactggttcgatctggtggcccgcgcccggctgacgttcaactataccgccgcctacccggtcgggctggtggaaggcgtcaatgcagtggtgttcagttcacgcggcggcgtacacgccggccagccgaccgacgccgtgacgccctacctgcgctcggtactggggctgatggggatcggcgaggtgcagtttatctatgccgaagggctggatatgaaaccgcacggcctcactcaggggctggcgaatgcccaccagcggatcgtggccttggtgggctga

SEQ ID NO: 423434 - DNA, 918 bp, Serratia marcescens
atgaaaagcgatctcagcgcgctgccggcctttgtcgccgtggcggaaggcggcagcttcgccgccgccgcagaaaaactgcatctgacacgctccgcggtcagcaaaatcgtgtcgcggctcgaggcgcggcttggcgtgatgttgtttatgcgcaccacccgcagcctgagcctgacggatgaaggggcgctgtactatgagcactgtcggcaggcgttggcgaacgttcaggcggcggaaaaccagctggacagcggcaagatgcaggtcagcggccggcttaggatctcgatgccggtgttgttcggccatctgtgcattgcgcccttgatgacggcgctggcgaatgagcatccgttactgtcgttggaaatttcgttcagcgaccgcaggatcgatctgatcgacgaggggttcgatctggcggttcgcatcggcgaactggcggacagcggcagtctggttgcccgacgcctgggcgaacacggcatgctgctgtgcgcttcgcccgactacgtgcagcgctgcggcgcaccgaattcggtggaggcgttaagccggcatcaggcggtggggtatctgcacgccggcgccgtgttgccctggcagcttcgaggtgaaaacggcgagctgcggccgttcaggccaccggccaagatgatgatggatgacatgcaggggatcgtcgatgccgtttccgccggcgccggtattgcctggctgccggagtggctggtacgcgatcggctgatggccgggacgctggtggagatcatgcgcggtgagcccagcctcagttttccggtgaatgcagtgtggccctatatgccttaccaaccgctcaaagtgcggctggcggtggacaaactggtggcggagctgccgggcaggctgacgcggctcgcgtcggcctga

SEQ ID NO: 423435 - DNA, 930 bp, Serratia marcescens
gtgtggggcaataacaacatcaagcaactgattctaatcacgctgaacctgataacgctgtatgtcatttacgtcaagcggcgtgaaatcacgcctgaatacgctctgaaaaccatcatttttacgacgttggttttctccgcttactgcctgatttggctccttgccaggccgctggcgaatgcgattcagattttgatgtataacagcatgcataacgccaatgccatttttgaatccagactgagcggtaccttcggtgaaccgtcattcgccggtatctttatcggcgcaacgatcgtgcctcttttggttgccaaagggttgcgactgaagttagtggccctattgatgatgctgctcttggttaaaaacggctctacatcaggctattttaccctgcttacgtcgctgtgcggcacattcattttcagtccgcgttttagcctgatacagaaagctctattttctctgtctttggtcatcgcatcaaagctcacatttatctttttcctagataaaataaccgattacgcggacaaaaaagcgcaaacgatctctcacctcgtgcgttccgcctccaactacaatgcccttgaaattatgtataatacctttggcttgggcgtcggtatcggtagcgcaagaatatcttctctgcctctgtccctacttgctaacttcggaataatggggacgatactgttagtcggttttatcgtatccaagcttattcgttcgcaatataacgtcgccggcaacgaagccaattccatgcttaaatttatgcttttctccgcatttttgggctcctgcgccgccaaccctgattactcttacgggttcatttgggttcttattttcagttgcctgttgacagggaaaacacaaccgtcactgccacgatcaacgcaacagcgcacgctctga

SEQ ID NO: 423436 - DNA, 849 bp, Serratia marcescens
atggaacgtacaattaatctctgtccaggaattggcgcctcagcgcacatcattcagcatactgaattattattcccttcagtctattttgagcaaccacatctgtatctgatacaacagggccataagcgcgtacgctggcaacaacgcgaggtggtggctcatgccggcgagctgttgataatcgacggggggcaaacggtggatattattaacggcccatccgaagaaggcgttttcagttgccagttgctgacctgcgacccactgctgctcaccgttcagcctccggccgaggacgcgccggcgccgatgccgtttgatgccgtcctggcgctgcgcagcctgccctgcgccctgaagcacagtttcgagaccaccagcctggcgctggcgctccggcagcggtttcccaccatcatcgtgcggcacaaaatgctggaaattctgctgtggctggcccagttcggcattcgcttcatccacaacgaagccaaagacctcacccaacgtgtgcgtcgctgcctggcaaccgatccgcacagcatttggacggcggccaaagtggcggaaagcctgtcgatgagtgaagtgatgctgcgccgcaaactgtcgatggaaaataccgcgttgcgcaacctgatgatcgacgtgcgcatgagtagcgcactggccctgctgcagtcgaccgactggccgatttccgccatcgcgcaacatgtcggctatgaaagcgcgtcacgtttcgccgaacgttttcgcaaacgcttcggtttcgccccgaccgccattcgcggtcaccaaaggattatggagccggcctttgaacagcattacggttccagctaa

SEQ ID NO: 423437 - DNA, 369 bp, Serratia marcescens
atggaacgtcaacagcagctgttagccgcttatcaacaaatttacagcctgagcagccagatgatcgcgctggcgcaaaccgggcgctgggaggagctcgtcgagctcgaattcgcttacgtaacggcggtggaaaaaaccgccgcctttaccgggcaagccggcccttccatggcgttgcaggagatgctgcgcaataagctgcaacagatcctcgacaacgaaaccgagctcaaacgtctgttacagcagcgcatggatgagctgaaaatgctgatcgaacagtccacgcgccagaacgtggtcaacaatacctacggccagtttcatgaccgtgcgctgttgctgggggagccacaggtccgataa

SEQ ID NO: 423438 - DNA, 411 bp, Serratia marcescens
atgtataacagaagcggcactcaggcctatgcacaggtcagtctggaaagcggcgccatgagcgccagcccgcaccagttaatcgtgatgttgttcgacggggcgctcagcgccctgcttcgcgcacgcatcctgatgaaccagggcgatatcgccggcaaaggcatggcgctgtccaaagccatcaacatcatcgacaacggcctgaaaggcggcctggaccctcaacagggcggcgaaatcgccgaaaacctggcggcgttgtacgactatatgaagcggcgcctgatgcaggccaacctgaacaacgacgaagcggcgatcgccgaagtggtcaaactgctggaaaacatcgccgatgcctggcgccagatcggccccaactaccaaccttcgcaggacgccgtgtaa

SEQ ID NO: 423439 - DNA, 1416 bp, Serratia marcescens
atggcatcgatcagttcattaggcatcggctcaggactcgaccttaacggtttgctggacaagctgaccaaagcggaacaacagcgtctgacgccgtacaccacccagcagaccagctataacgcccagttgaccgcttacggtacgctgaaaagctcgctggagaagtttgacaatctgagcaaagacctggccaagccagagttcttcaacaacactaccgccaccaagcacgatcagtttaccgtgaccaccaccgacaaatcggtgccgggcaactactcgatcgaggtgttgaagctcgcgcagccgcaaacgctgaccactcagacgccgattgccgaccagcaggccaaactgggcacgccgggcagcagcgatcgttccatctctattacggcaggcaatccgccgaaagagaccaagatcccgctcggtgacgatcagacctcactggtcgagatgcgcgacgccatcaataaatcgaaatccggcgtcaccgccagcatcatgcgcgtcggcgacaatgactatcaactggcattaagctccaccacgccaggcgaaaaaaacaccatttcggtgcaggtcaataacgacgacaagctcggcgccatcctcaactacgatcctaaaaatccgcctaaagatggcagcgccgcgatgaagcaaaccgtgcccggccaggatgcggaaatcgtcgtcaacggcacgaaaatcaagcgcagcaccaactcgatcgccgatgctctgcagggcgtaacgctcgatttgaaaaccaccaccaagcccggcgaaccgcaaaacctggtgatcggcatcgacaagagcggcagcgccgacaagattaaagagtgggtagataactacaactcgctgctggacaccttcaattcgctgaccaaatacacgccggttaaaagcggtgaagcgcagaatgccaaaaacggcgctctgctgggcgacaacaccctgcgcggcatccagtcctcgatcaagagcgccctcagttcggcacaggacaacccggagttgaaaggcctgggcaacctcggcatcaccaccaacgtcaaaaccggtaagctggaaatcgacagcaccaagctgaacaaagccatcgacgaaaaaccggatcaggttgccaacttcttcgccggcaacggtaaagacaccggcatggccaccgaaatccacaacgagatccagaactacgtcaaatccggcggcatcatcgagaactcgaccaagagcatcaacaccaacctcgatcgcctgaacattcagatcaccacggtcacggccagcattcagaacaccatcgaccgctataagcagcagttcgttcagttggataccatgatgtccaaattgagcagcacgggtaactatttacaacagcaattctcgacaaagtga

SEQ ID NO: 423440 - DNA, 1242 bp, Serratia marcescens
atggcacaagtaatcaacactaacagcctgtcgctgatggcgcagaacaacctgaacaaatctcagtcttctctgggcactgcgattgagcgtctgtcttccggtctgcgtatcaacagcgcgaaagacgatgctgcgggtcaggctatctccaaccgtttcactgcaaacatcaaaggcctgactcaggcttctcgcaacgccaacgacggtatctccctggcgcagaccactgaaggcgcactgaacgaagttaacgacaacctgcagaacatccgtcgtctgaccgtacagtctcagaacggttccaactctgccagcgacctgcagtccatccaggacgagatctctcagcgtctgtctgaaatcaaccgcatctccgagcagaccgatttcaacggcgtgaaagtgctgagctcagatcagaaactgaccatccaggttggcgcgaacgacggcgaaaccatcgatatcgaactgaaagacatcaacgctaaaacgctgggtctggaaaagttcagcgtggctgatggcattgatacgactaaagttggtgcaaaagcgactaacgtacaaacaggcaaagatctcaccatcaccaacaccacgaacaaacaagcaaatggtgctgcgccagccagcttcctgaaggacaatgctaccggtgatatctatgctgttggtaccgatggtaagaactataaagcaaccatcgacaaaacctctggtgacatcactgcaatcgctgctgctgaaaccactggtctgaccgataccagcgcgacaacaactgtgaaggaagaagttgctgcaagcggcccagatgcggctaacctgcactcttacgacaacggtaaatcttacgtgatccaggaaggtaccggtgccgatgccaaatatttcaaggcgagcgtagacgctaccggtaaagtgaccaagggcgctgagcagtccaccgagccaaaaactgccgacccgctggcgaccctggacaaagcgctgtctcaggttgactccctgcgttcttccctgggtgcggtacagaaccgtttcgattctgttatcaacaacctgaacagcaccgttaacaacctgtccgcttctcagtcccgtattcaggatgccgactacgcgaccgaagtgtccaacatgagccgcgccaacatcctgcaacaggctggcacctctgttctggcacaggctaaccagtctactcagaacgttctgtccctgctgcgttaa

SEQ ID NO: 423441 - DNA, 723 bp, Serratia marcescens
gtgagcgatctgtataccgccgaaggcgtgatggacaaaaattctctctggctgcgctacgtcccgttagtgcgccacgaggcgttgcgcctgcaggtcaggttgcccgccagcgtggagcttgacgacctgctgcaggccgggggaatcgggctactgaacgccgttgagcgttatgacgccctacagggaaccgcctttaccacctatgcggtgcagcgcattcgcggcgcgatgctcgacgagctgcgcagccgcgactgggtgccgcgcagcgtgcggcgccatgcgcgcgaggtcgcgcaggtgatgcggctgctggaacagcgttacggccgcccggcgagcgagacggaagtggcgcagacgctgaatatctcgctggatgagtaccgtcaaattctgttggacaccaataacagccagcttttctcctacgacgaatggcgcgaggagcatggcgagaacgcggaaccgatgctggaagggcatgaagaggccaacccgctgcatcacctgttggaaggcagcctgcgccagcgagtgatcgacgccatcgaggcgttgccggagcgcgaaaaaatggtgctgacgctgtattaccaagaagagttgaatctcaaggagatcggcgccgtgctggacgtcggggaatcccgcgtcagccaactgcacagtcaggcgatcaagcgcctgcgcgcgcggctggcgaacgatacctga

SEQ ID NO: 423442 - DNA, 510 bp, Serratia marcescens
atgccaggaatactgttgaagaaacggccgcttagccgttacctgaaagattacaagcacagccagacgcattgctcccagtgcggtaagctgttggaccgcatggcgctggtgtttcgcggcaaaatcatcaataaagaagccatcgcgcgcatggatcagccgatcgacgatgcggtctggcaaaacgtgcagcatgagctgaccgcactgtgccgcttttgcagcgagatttcctgcaacagccacccgagctatttcgacatcatggcgttcaagcaatatctgttcgaacagaccgagatgagccacagcaccattcgcgagtacgtggtgcggctgcgccggctggatgaaatgctggtggcgcgcaattacccggcggacaaattcgccaactgtgccagccatcagcgcatcattgacgatctgcctagcgcggcgcacaacaactaccgcattgcgctgcgcaaatacgatcagtatctcgcctggcagcgcagctactga

SEQ ID NO: 423443 - DNA, 993 bp, Serratia marcescens
gtgaacctgcaacaacaactggcgcaatttccgcgtctggatctggttggcaccgccacaccgctcgaaaaactgtcccgtctctccgattacctcggccgtgaaatttacctcaaacgtgacgatgtcacccctatggcgatgggcggcaacaagctgagaaagctggagtttttggccgcagatgcgctgcgtcaaggcgctgatacgctggtcaccgccggcgccattcaatccaaccacgtgcgccagacggcggcggtggcggcgaaactgggcctgcactgcgtcgcgctgctggaaaatcccatcgatacccgtgcggaaaactacctgaccaacggcaaccgcctgttgctcggcctgttcaacgccgaggtggtgatgtgcgaagcgctgcacgatccgcagcagcagttggcggaactggcgacgcgcctcgaggcgcagggcttccggccttacgtggtgccggtgggcggctccaatgccctgggcgcgttgggatatgtgcagtgcgcattggaaatcgccgaacagagccaacgcagcaacgtggcgttcagttcggtggtggtggcgtccggcagcgccggcacccatgccgggctggcggtggggctgcaacagctgctgcccgaaaccgagttgatcggcgtgacggtctcgcgcaccgtgatcgatcagctgccgaaggtggagcagatccagaaagccctggcctgttcgctgaatatcgacgaactggcgccgatcgcgctgtgggacgattacttcgcgccgcagtacggcatgccgaacgaagagggcatggcggcggtgcagctgctggcgcagcaagaaggcgtgttgctggatccggtatacaccggcaaagcgatggccggtttgatcgacggcatcgcccagcggcgtttccgcgacgaagggcctatcctgttcgtccacaccggcggtgcgccggcgctgttcgcctaccatccgcaggtgtaa

SEQ ID NO: 423444 - DNA, 801 bp, Serratia marcescens
atgatgtttgcgaaagttcgtcgtcaatggctgttgggcgtggtgggcgtcgcgttggccgccggtttggcgactcaagcctacgccgccgacaatctgctgcagcaggtgaaacagcgcggcacgctgatcgtcggtctggaaggcacctatccgccgttcagcttccagggtgaagacggcaaattgaccggtttcgaagtggatttcgccaacgcgctggcggaacatttgggcgtgaaggccaagctgaacccgaccaagtgggacggcatgctggcttcgctggaatcaaaacgcatcgatgtggtgatcaaccaggtgaccatctctgatgagcgcaagaagaaatatgatttctccaccccttacaccgtttccggtattcaggcgctggtgaaaaaaggcaacgaaggcaccatcaccaagccggaagacctgaagggcaagaaggtcggcgttggcctgggtaccaactatgagcaatggctgcgcgcgaacgtgcagggtgtggacgtgcgtacctacgacgacgacccgaccaagtatcaggatttgcgcgtcggccgcatcaacgccattctggtggatcgcctggcggcgctggatctggtgaagaaaaccggcgatacgctggcggtagccggcccggcgttctcccgccaggagtccggcgtggcgctgcgcaagaacaacccggagctgctggccgcgattgaccaggcgatcgccgagatgcaaaaagatggcacgctggcgaagatctccgagaaatggtttggcgcggacgtaactaaataa

SEQ ID NO: 423445 - DNA, 663 bp, Serratia marcescens
atgcacgaaagtattcaactggcgctggattcagcgccatttttattaaagggcgcaatactgacgcttcagcttagcctgggcggtatggcgttcggcctgttgcttggttttctgctggcgctgatgcgcctttcgccgctttggccgctggcgtggctgtcgcgcatttacgtgtcgctgttccgcggcacgccgttgatcgcccagctgtttatgatctattacggtctgccgcagttcggcatcgagttcgatcctttcccggcggcgctgattggcctgtcgctcaataccgccgcctacacctcggaaacgctgcgcgcggcgatttcgtcgatcgacaaagggcagtgggaagccgccgccagcatcggcatgacccgttggcaaaccctgcgccgggtgatcctgccgcaggcggcgcgcaccgccttgccgccgctgggcaacagcttcatcggcctggtgaaagacacctcgctggccgccaccattcaggtgccggagctgttccgccaggcgcagctgatcacctcgcgcacgctggaagtgttcaccatgtacctggcggcatcgctgatttactgggtgatggcgaccctgctttccgcactgcaaaaccgcctggaagcccacgttaatcgccaggatcaggagtag

SEQ ID NO: 423446 - DNA, 753 bp, Serratia marcescens
atgagtgccattgaagttaagcaattgaccaagcagttcaagggtcagacggtgctgcatgggatcgatctggcggtggacgccggtgaagtggtggcgatcatcggccctagcggctcagggaaaaccaccttgttgcgctgcatcaacctgctggaggagccggattccggcaccattcgcgtcggcgacatcctgatcgacggcagcaagccgttgagcaaacagaaaaatcaggtgcgcgcgctgcgtcagcaggtcggtttcgtgttccagagcttcaacctgttcccgcatcgttcggtgctggaaaacatcatcgaagggccggtggtcgtcaagggcgaggcgaaagccagcgcggaacagcgcgcccgcgcgttgctggccaaggtggggctgagcggcaaggagcatgcttatccgcggcggctgtccggcgggcaacagcagcgagtggctattgcgcgcgcgctggcgatgcagccggaggtgattttgttcgatgagccgacgtcggcgctcgatcccgagctggtaggggaagtgctcaataccatgcgctcactggcggaagagaaacgcaccatggtgatcgtcacccatgagatgagtttcgcccgcgacgtggccgaccgggttatctttatggatcacggccgcatcgtcgaacagggcccggccaaagcgctgttcgccaacccgcagcaccagcgcactcagcaattcctcgacaagttccggaatcaataa

SEQ ID NO: 423447 - DNA, 3972 bp, Serratia marcescens
atgggcactaccacaatgggcgtgaaactcgacgaggcaacacgcgaccggatcaagagcgccgcgcagcgcatcgatcgcacgccgcactggctcatcaagcaggccatctttaattacctcgagcgtctcgagagcggtaccgatattcctgaaattccagcgctggccgctgcgggccagcctgaagcggacgacattatgccgcaagcgcaggaagagtcacaccagccattcctcgatttcgccgaacaaattctgccgcagtcggtcacccgcgccgccatcaccgccgcctatcgtcgcccggagaccgaagcggtgccgatgttgctcgaacaggcgcgattacccgccgatcttgcacaggccactcacaaaatggcctatggcatcgccgagaagttgcgtaaccaaaaaagtgcaaacggccgcgccggcatggtgcaaggcctgctgcaagagttctccctctcctcgcaggaaggcgtggcgctgatgtgcctggcggaagcgctgctgcgcattccggacaaaccgacccgcgatgccctgatccgcgacaagatcagcaacggcaactggcactcgcacctcgggcgcagcccgtcgctgttcgtcaacgccgctacctggggcctgctgttcaccggcaaactggtgtccacgcataacgaagccaatctgtcccgttcgctgaaccgcattatcggcaagagcggcgaaccgctgatccgcaaaggcgtggacatggcgatgcgcctgatgggcgaacagttcgtgaccggcgaaaccatcgccgaagcgctggccaacgcgcgcaagctcgaagataaaggcttccgctactcttacgacatgctgggcgaagccgccctgaccgaggccgacgcccaggcttacctggtttcctaccagcaggcgatccacgccatcggcaaagcctccaacggccgcggcatctatgagggccccggcatctccatcaagctgtccgccctgcacccgcgctacagccgcgcgcagtacgaacgcgtcatggaagagctctacccgcgcctgctgtcgctgaccctgcaggcacgccagtacgatatcggcatcaacatcgacgccgaagaggccgaccgcctggagatctcgctcgatctgctggagaagctgtgcttcgaaccgcagctggccggctggaacggcatcggcttcgtgattcaggcctaccaaaaacgctgtccgttcgccatcgatgcggtgatcgacatggcgcaacgcagccgccgtcgcctgatgatccgtctggtgaagggcgcctactgggacagcgaaatcaaacgcgcccagatggacggcctggaaggctacccggtctacacccgcaaggtctataccgacgtttcctacctggcctgcgcccgcaagctgctgtcggtgccgaacctgatttatccgcagttcgccacccacaacgcccataccctgagcgccatctatcacctggccggcaacaactactaccctggccagtatgagttccagtgcctgcacggcatgggtgaaccgctgtacgaacaggtggtgggtaaagtggccgacggcaaactgaaccgcccttgccgcatctatgcgccggtcggcacccatgaaacgctgctggcttacctggtgcgccgcctgctggaaaacggcgccaacacctcgttcgtcaaccgcatcgccgacgccaccctgccgctcgacgagctggtggccgatccggtcagcgccgtggaagcgctggcggccagcgaaggccagattggcctgccgcacccgcgcattccgctgccgcgcgagctgtacggcgagaagcgcaccaactccagcggcctggatctgtccaacgaacagcgtctggcttcgctctccagcgccctgctcaccagcgccagccatccgtggcgcgcggagcctatcatcgacgccgaattggatcagggcgtggaacagccggtgatcaacccggccgagccgggcgatgtggtcggctacgtgcgcgaagccaccgaaggcgaagtcagccgcgcgctcgacgccgccgcggccgccggcccaatctggttcgctacgccgccgacggagcgcgccgcgatcctcgaacgcgccgccgagctgatggaaagccagctgcaaagcctgctgggcattctggtgcgcgaagccggtaaaaccttcaacaacgccatcgccgaagtgcgtgaagcggtcgatttcctgcactactacgccggccaggtacgcgacgatttcgccaacgacagccaccgtccgctgggcccggtggtctgcatcagcccctggaacttcccgctggcgatcttcaccggccaaatcgccgccgcgctggcggccggcaacagcgtgctggccaaaccggccgagcaaacgccgctggtggccgcgcaggcggtgcgtattctgctggaagccggcattccgcaaggcgtgctgcagctgctgccaggccagggtgaaaccgtcggctcaacgctggtcaacgacgcccgcgtacgcggcgtgatgtttaccggctccaccgacgtcgccggtattctgcagcgcagcatcgccggtcgtctggatccgcagggccgcccgacgccgctgatcgccgaaaccggcggcctgaatgccatgatcgtcgactcttccgccctgaccgagcaggtggtgaccgacgtggtggcctccgccttcgacagcgccggccagcgctgctccgcgctgcgtatcctgtgcattcaggaagacgtggccgagcacacgctgcaaatgctgcgcggcgcgatggccgaatgccgcatgggcaatccggagcgcctgtccaccgacgtgggcccagtgatcgacgccgacgccaaaaccggcatcgaacgccacattcaggcgatgcgcgccaaaggccgcaaggtataccaggccgccaaaggcagcgcgcaggatgagaaagagtgggcgcgcggcaccttcatcaagccgacgctgatcgaactcgacagcttcgacgaactgcaaaaagagatcttcggcccggtgctgcacgtggtgcgcttccagcgcaacaatctggacgcgctggtcgatcagatcaacgccgccggttatggcctgacgctgggcattcacacccgtatcgatgaaaccatcgcccgggtgaccgaacgcgccaaggtcggcaacctgtacgtcaaccgtaacatggttggcgcggtggtcggggtgcagccgttcggcggcgaaggtctgtcgggcaccggcccgaaagccggcggcccgctgtacctgtaccgtctgctggccaaccgcccggacgacgcgctgcaacgtacgctgcaccgtcaggacgaagagcgcccgatggaagccaccgcgcggccgcagctgctgggcgcgctgcaatcgctggagaaatgggcggtcaccagccaacaaggcgaactggcggcactggcgcagcgctatgcggaactgggccagggcggcaccgtacgcccgctgccgggcccgaccggcgagcgcaatacctatgccctgctgccgcgtgaacgcgtgctgtgcctggcggataacgaagccgacgcgctgatccagttggccgccgtgctggcggtcggcagcagcgcgctgtggccggaagcggaactgcagcgcaatctgttccgccgcctgccgaacgatgtgcaggcgcgcatcgccttcagcaaagactggcagcaggacaaggtcgagttcgacgccgccatctaccacggcgatgccgaccagctgcgcaccctgtgcgagcagatcgcgcagcgcggcggcgccatcgtctcggtgcaaggcttcgcccacggtgaaaccaacatcctgttggagcgcctgctgatcgaacgttcgttgagcgtcaacaccgccgccgccggcggtaacgccagcctgatgaccatcggttaa

SEQ ID NO: 423448 - DNA, 1485 bp, Serratia marcescens
atgacaatgagcacacctatgctggtgaccttcctggtgtacattttcgggatggtgctgatcggcctgcttgcctaccgggcaaccaacaactttgatgactatattctcggcggccgcagtttgggcagcgtggtgaccgcgctgtccgccggcgcttccgacatgagcggctggctgctgatgggcctgccgggcgccatcttcctctccggcatctccgaaagctggatcgccatcggcctgaccatcggcgcttacctgaactggaagctggtggcaggaaggctgcgcgtgcataccgaagccaacaacaacgccctgacgctgccggactatttcaccagccgctttgaagacaacagcaagctgctgcgggtgatctcggccatcgtcatcctggtgttcttcaccatttactgcgcctccggcatcgtggccggcgcgcgcctgttcgaaagcaccttcggcatgagctacgaaaccgccctgtgggccggcgccgcagcgaccatcttgtatacctttatcggcggtttcctggcggtgagctggaccgacaccgtgcaggccagcctgatgattttcgcgctgatcctgacgccggtgatcgtgatcttcgccgtcggcggcatcgatacctcgatgctggtgatccaggcgcagaacccggcgaacctcgacatgctgaaggggctgaacttcgtcgccatcctgtcgctgctgggttggggcctgggctacttcggccagccgcacatcctggcgcgtttcatggcggcggattctcaccgcaccatccgcagcgcgcgccgcatcagcatgacctggatgatcctgtgcctcgccggcaccatcgccgtcggtttcttcggcatcgcttacttcgccaataacccggatcaagccggcaacgtgtcgcagaacggcgaacgcgtgttcatcgagctggcgatgctgctgttcaacccatgggtggcgggcgtgctgctgtcggcgatcctggcggcggtcatgagtacgctgagctgccagctgctggtgtgctccagcgcgatcaccgaagacctgtataaggcgttcctgcgcaaaggcgccagccagcgtgagctggtgtgggtcggccgcgtgatggtgctggtggtggcgttgatcgccatcgcgctggcggccaacccggagaaccgcgtgctgggcctggtgagctacgcctgggcaggtttcggcgccgccttcggcccggtcgtgctgatctcggtgctgtggtcgcgcatgacccgcaacggcgcgctggccggcatgctggtcggcgcggtgacggttatcgtctggaaacagtacgaatggctgggcctgtatgaaatcatcccgggcttcatcctgggcagcctcgccatcgtggtggtgagcctaatgggccgccggccttccgccaccatgaccgagcgtttcgatcaggcggaagccgagtataaaacggtataa

SEQ ID NO: 423449 - DNA, 846 bp, Serratia marcescens
atgttcgttccctttcttatcatgttccgtgaagggctggaggccgcgctgatcgtcagcctgatcgccagctacctgaaacgcacgcagcgcagccaatggctgggcgcggtgtgggtcggcgtgattgtcgccgcggcgctgtgtctggcgctcggcatcttcatcaatgaaaccaccggcgagttcccgcagaagcagcaggagctgttcgaaggcatcgtcgcggtggtggcggtggtgatcctcacctatatggtgttctggatgcgcaaagtgtccaagtcggtcaaggtgcatctggaaggggcgatcgatcaggcgctcagcgccggcaaagggcagggttgggcgctggtggcgatggtgttcttcgccgtggcgcgcgaagggctggagtcggtgttcttcctgctggcggctttccagcaagacgtgggcgccgcggcgccgatcggcgcggtgctcggcctggcggccgccatcgtgctgggcatgatgatttactggggcggggtgaagctgcacctggccaaattcttcaaatggaccagcctgttcattctgttcgtcgccgccgggctggccgcgggggcgatccgcgccttccatgaggccggtctgtggaaccacttccaggacatcgccttcgatttcagcagcaccctgtcgacccattcgctgttcggcaccctgctggaaggcattctcggttatcaggaagcgccgacggtcagcgaagtggcggtctacttcctgtatctgatcccggcgctgattttctttttcctgccgcagcgcgcggagccggcagcggctccggcgcaacgtaaaatcaatcattaa

SEQ ID NO: 423450 - DNA, 1137 bp, Serratia marcescens
atgtctactccgttatttcgccgcaaggcgttgcacgcagcattactggctatcccggcgtttgcgctgagcatcgatgcgctggcggcggacgtgccgcaggtcaaagtcacggtcaacgacaagcagtgcgaaccgatgcagctgacggtgccggccggcaagacgcagtttgtggtgcataacaccagccagaaaaacgtcgaatgggaaatcctgaaaggggtgatggtggtggaagagcgcgagaacatcgcgccgggcttcacccagaaaatgaccgccacgctggaagcgggcgaatatgacatgacctgcgggctgctgagcaatccaaaaggcaaactgaccgtcactgcggcggccaacggcgccaccgacggcaagccgagcgcgctggatctggttggcccgatcgccgaatacaaagtctacgtcaccaaagaagtcgacgggctggtgaaacagaccaagctgttcaccgacgcggtgaaggccggcaacgtggagcaagcgcgcaagctgtatgcgccgacccgtcagcactatgagcgcatcgagccgatcgccgagctgttctccgatctggacggcagcatcgacgcccgtgaagacgactacgagaagaaatcggcggaccctaacttcaccggtttccaccgtctggagaaggcgctgtttgccgacaactcgaccaaagacatggataaatacgccgatcggctgtatcaggacaccgttgagctgcaaaaacgcgtgggtgaactgaccttcccgccgagcaaggtggtgggcggcgcagccgggctgatcgaagaagtggcggcgagcaagatcagcggtgaagaagaccgctatagccgcaccgacctgtgggatttccaggccaacgtcgacggcgcgcagaagatcgtcaacctgctgcgtccgctgctggtcaaggccaacaagccgctgctggacaagattgacgccaacttcaaaaccgtggacaccattttggcgaagtacaaaaccaaagagggctatgagtcctacgagaagctgagcgaagccgatcgcaacgcgttgaaagggccgatcaccacgctggcggaagacctttctcaactgcgcggcgtgttgggcctggactga

SEQ ID NO: 423451 - DNA, 789 bp, Serratia marcescens
atgggtagacagaaagcagtgatcaaagcacgtcgtgaagcgaaacgcgttattcgtcgtgacgctcgtagtcatcgccagctggaagaagagtctgtgacctcgctggtgcaaatggggggagtcgagtctatcggcatggcgcgagacaagcgcgatagctcacccatcgaggctagaaccgaagctcagggtcattacttatcagccatagagaataagcagctgatcttcgccaccggcgaagccggctgtggcaaaacattcatcagcgccgccaaggcggcggaggcgctgattcataaagaggtggatcggattatcgttacccgtcctgttttgcaggcggatgaagacctcggtttcttgccgggggatatctccgagaagttcgcgccttatttccgcccggtgtatgacattctggtacgtcgtttaggatcttcctttatgcagtactgcctgcgcccggaaatcggcaaggtagagattgcgccgttcgcttatatgcgcgggcgcaccttcgaaaatgcggtcgttatcctggatgaagcccagaacgtgaccgccagccaaatgaaaatgttcctgacccgcctgggagaaaacgtgacggttatcgttaacggcgacgtgacccagtgcgacttgccgcgcggcgtgaaatccggcctcagcgatgccctggagcgcttcgaagaggacgagatgatcggcgttatccgctttgaaaaacaggactgcgtgcgttccgctttgtgccagcgcacgctcaacgcttacagttaa

SEQ ID NO: 423452 - DNA, 903 bp, Serratia marcescens
atgaaatacatcgttctgattttgcttattttatgcgtcgtctatgtgcattaccgcggacgggtgcgctacaacgtgtggcggcagctgtctgaccattccacctttaccgcaccattgaacgtcttcatgtatctgttttcccgcgtgccgaccacgccgtacctgaagccggagcagtttcctgagctggcggtgttgagagataactgggaaaccatccgcgacgaaggacagaagctgatggagatccagcagatcaaggcgtccgatcaattcaacgacgccggtttcaactcttttttcaagaccggttggaagcgcttttatctgaaatggtatgaagacagccatccctccgccatgaccctgtgcccgcagaccacggaactgctgcgcaacctgccttcggtcaaggcggcgatgttcgccgaactgccggacggcagccgtttgccgcgccaccgcgacccttacgccggttcgctgcgttatcacctggggctgattacccccaatgatgaccgctgcttcattgaggtggacggcgagcgctacagctggcgcgacggggaaggcgtgatgttcgatgaaacctatctgcactacgcggaaaaccagagcgggcagaaccgtctgatcctgttctgcgacatcgaacggccgatgcgctaccgctgggcgcaggcggtgaaccactggctggggcgcaatctgatgagcgccgccaccgcgccgaatgaagagggcgatcgcaccggcggcgtcaacaagatgttcaaatacatctatgcgatacgccgggtggggaaacgcctaaaggcctggaatcgcaccggttactacatcatcaagtggattttgttcggggggatcgccgcggcgatattcttctcggtataa

SEQ ID NO: 423453 - DNA, 1104 bp, Serratia marcescens
atgaagtcgcaacacgatcctggccgatccaccaaatctcgccacaccgaatactcgctgatcttccccatcgccgcgctggtggtgttgaacctgtggagcagcaccgctaactttccgctgatcgtcggcatcaatattctcgcgctggtggggatcctcagcagcgccttcagcgtggtgcgccacgccgacgtgctggctcaccgattgggcgaaccctacggctcgctgatcctcagcctgtcggtggtgatcctcgaggtcagcctgatctcggcgctgatggccaccggcgacgccgcgccggcgctgatgcgcgacacgctgtactccatcatcatgatcgtttccgctggcctggtcggcttcgcgctgctgctcggcgggcgcaaattcgccacccagtacgtcaatctgggcggcatcaaacagtacctgatggcgattttcccgctggcggtgattgtgctggtattcccgagcgcgctgccgggcggcaacttcagcaccgggcaagcgctgttggtagcgctgatctccgccgccatgtatggcgtgttcctggtgatccagaccaaaacccaccagagcctgttcgtgtacgagcatgaagacgacgacggcgacccgcatcacggcaagccttcttcccacagcagcgcctggcatgccgcctggctcatcgtgcacctgatcgcggttatcgccgtcaccaagttcaacgccaatccgctggaaggtctgttgaccaaaatgaacgcgccggcgcagttcaccggtttcctggtggcgctgctgatcctgtcgcctgaagggctgggcgcgctgcgcgccgtgttgaacaatcaggtgcaacgcgccatgaacctgttcttcggctcggtgctggcgaccatctccctgaccgtgccggcggtcaccatcatcgccaccctgaccgggcagacgctgatcttcggcctgcaaacgccgcatatcgtggtgatgctgacggtgttgctgctgtgccagctgtcgttctcgaccggccgcaccaacgtgctgaacggcaccgcccacctggcgctgttcgccgcctacatgatgactatcttcgcctga

SEQ ID NO: 423454 - DNA, 819 bp, Serratia marcescens
gtgactaccgaagcccctcgctcacgcgccccctacctgatcgccgtcagcgccgtacaggacattacgccgcacctgcgccgcatcacctttaccgcgcccgatctgcgctactacccggccaacgccgccgctgcgcacatcaaagtctttttgccgctcgccgaccaaactcagccggatctgccgacgctgaccgaaaacggcccgcgctgggccgcggacgccgtgcgcccgatcgtgcgcacctattccattcgcgccgtgcgcccggaacaggcggaagtggacatcgaatttgcgattcacgatcaccgaggcccagcggtcgactttgcgcgccaggcgaaaatcggcgataaaatcggtatcagcaacccgggcggccccaaaccgatgctgccggcggccgatttctactgcctggcgggcgatccttcctcgctgcctgcgctggccgcgctgctggaaaacctgccgccgcacagcgccgggcgcgctttcgtccgcgtcgacagcaccgctgacatgattgacctgaaaaaacccgctgatgttgaagtcaattggatcgtcggcggcacggagaaaaccgacgaactgatcgctcagttccgcgcacagtccctgccgcagggcgaagcgcacttctggctcgccggtgaagatcgcctggtggtggggttgcgccgctacctgcgccgtgaacgccaatgcgatcgcaatcgtctttatgccgtaccttactggcgtgaggggctaaatgaagagggttaccacaataaacggcatgaaatcatggataatattgatgactga

SEQ ID NO: 423455 - DNA, 228 bp, Serratia marcescens
atgccataccaagacacgaacgacttgccggacaatgtgaagcatgtgctgccggcccatgcgcaggcgatctataaagaagcgttcaacagcgcctggcaacaatatcgggatcctgaagatcgacgcggtgacgccggccgggaagagacggcgcacaaggtggcctgggcagcggtcaaacaaagctatcgcaagggcgacgatgagcgctggcacaaaaagtaa

SEQ ID NO: 423456 - DNA, 741 bp, Serratia marcescens
gtggcgagggaggacgagaaatcgtattcccgggaggttgtaacagtgttaacgcgagattttctgcaaaaagcggattgcaaaaccgcctttggcgctattgaggagtcgctgttgctgacgcctgaacagcgcgcagcctcgttggcgtgcacattatcgcgccggccggatcacagcccggtatgggtattcggttacggttcgctgatgtggaatccggttttcgaatcggaagaagtgcggccagccatactgcagggctggcatcgggcgttctgcatgcgtttgaccgccgggcgcggcacgctgcatcagccggggcgcatgctggcgctgaaagagggcggccagaccaccggattggccttccgtctgccggaaagcacgctgcgcgaagagctggagttgctgtggaagcgcgagatgatcaccgattgctacgtgccgacctggtgtgagctgcagctggagggcggtgaggccgtcacggcgctggtgttcgtgatgaacccgcagcatccgttgtttgaagcagacaccagccaccaggtgatcgcgccattgatcgccagcgccagcggcccgctgggcaccaacgcgcaatacctgtttgcgctggataacgagctgaagcaccacggcatgcaggatgattgcatcggcgatctggtgcgttacgtgcagcaatggttgcagcagaaccgccccggcgctttcggggccgaggccacggcctga

SEQ ID NO: 423457 - DNA, 954 bp, Serratia marcescens
atgaactttcaacaattaaaaattattcgcgaatcggcgcgctgcaactacaacctgaccgaggtcgccaataccttatttacttcgcagtccggcgtcagccggcatattcgcgagctggaagaagagctgggcattgaaatattcattcgccgcggcaaacggctgctgggcatgaccgagcccggcaaagagctgctggtggtggcggaacgcattctcaacgacgccaacaacatccgtcgcctggcggacgtcttcagcagcaacgattcggggcagctgcatatcgcgacgacgcacacccaggcgcgctacagcctgccgggagtgatcaaagagtttcgcgcgctttatccacgggtgcgggtggtgctcaatcagggcagccccgaagagatcgtctcgatgctggccgccggcgaagccgatatcggcatcgccagcgaacgtctgatgagcgacgagtcgctggcggcattcccgtactaccgctggcatcacaccattttggtgccggaagggcacgagttgacgcgccagccgcaggtgacgctggagatgctcagcaccttgccgctgatcacttaccgccagggcattaccgggcgcgcgaagttggatgcggcgttcaaagcggcgggtctgacgccggacatcgcgctcagcgcgcaggattccgacgtaattaaaacctacgtcgaactgggattgggcgtgggcgtgctggcggacatgtcgtatgaaaaagagcgcgatcgcgggttggtgagcctcaacgccgagcacctgtttgaacccaatacggtatggctgggcctgaagcgcagccagctgcagcgcaactatgcctggcgctttatccaactgtgcaacccgacgctgtcgctgaccgaaatcaaggacaaggtcttctcgtcgcagctggatgcggtgattgactaccagatttaa

SEQ ID NO: 423458 - DNA, 1569 bp, Serratia marcescens
atgaaagcgctcgttccttctttgctgtttttagccgtggcggccagcgttaacgcgcaggcggcgacgccggccaacacgctggtgatcgcgcagtctatcgatgacgtggtcagctttgacccggcccagggatttgagttaaccacggtgcagtcgttcaacagcctgtatcaacgtctgatccagtccgatccgcacaaccctatcgatctcaagccaaccctggccagcagctggcaggccggcgccgacaatcgcagcctgactttcagcctgcgcccggacgccaggttcgccagcggcaatccgctgcggccggaagacgtgatcttctcgctttcacgggtggtaaaactgaatctggagccgtcgtttatcctgacgcagctgggctggaacgcgaagaacgtggagcaacacctgagcaaggtggatgaccaccaggtaaaaatcagctggagtgaaaacgtcagcccagccttcgtgctcagcctgctgtcggcgccggtatcgtcgatcgtcgacgccaaagaggcgctggcgcaccagcagggcgacgatctggggcaccaatggttaaaccgccactccgccggcagcggcccttacaaaatccgcacctatgtgccgcacgaggttgtggtgctggacgccaaccccggttcgccggaaggggcgccgacgctgaaaaccatcctgatcaaaaacgtgcccgatccggccgcgcgccgtttgctgatcgagcagggcgatgccgatatcgcgcgcaacctgggggcagaccagatggcggccctgaagggcaagccgggcgtcaaaccgttggccattccttacgcctcactttatttcctgcagttcaacgccaaggcgtcgccggcgctcggcaatccggcgttctgggaggcggcgcgctggctgttcgattaccaaggcatcgccgacgatctgctgaaagggcagttccagagccatcaggcattcctgccggacggttatctgggtgcgctcaaggatcagccgtacagcttcaatccgcaaaaagccaaagaaatactggccaaagcggggctcagcaacgtcagtttccgtctggacgtcaacaaccagccgccgtacctggatatcgcccaggcgctgcaggccagttttgcccagggcggcgtgaaggtggaactggtgccgggcatcagctcgcaggtctccaccaaggtgaaaacgcttaactacgatgcgacgctgacttcctgggggccggattatttcgaccctaacaccaacgccgcagccttcgcctacaacccggaagacggcagcaagacgctggcctggcgcgccaactggcagatcccggcgctgagcaagctgacgctggccgccaccgcggaaaacgacaccgccaaacgggtggccgactaccagcaactgcaaaaacaggtgcagcaaagctcgccgttcgtcatcggcctgcaggcgcgcagcctgattgcggtgcgcgacaacctcaagggctatgtgcagggcatcaaccctgacatggtgttctacagcaaggtcagcaagtaa

SEQ ID NO: 423459 - DNA, 1056 bp, Serratia marcescens
atggccgctgaactgtccgcctccgccggggcggcccggcggtattggcgctggggcgggcggctgctcggcggcgcgctgtcgctggcgttgacgttgcttggcctgctgctgttcaccttcatgctgtcgcatctggcgccgatcgatccggcgctgcaggtggcgggcgatcatgccagcgaagccacctacgcacaggtgcggcatgagttggggttggatcagccgttgccggtgcagttttggcgttatctggtgcacctggcgcacggcgatttgggtatttcgcgcatcaccgcccagccggtgttgagcgatctgctgcgtaccttcccggcgacggtggagctggccacctgcgccattatcctcggcgccctcggcggcattacgctggcgtttctggcggtgctcaaaccgggcagctggctggataacgcggcgcgtttgctgtcgctgatcggttattcggtgccgattttctggctgagcctgctcgggctgctgctgttctacgccacgctgcactggtcggcggggccggggcggctggacgacatctacctgtacagcatggagccgcgtagcggtttcgtgttgatcgacagctggctgtctggcgatcgcgacatgttctacaacgccatcggccacctgtggttgccggtagtggcgttggcgctgttgtcgatggcgggcattactcggttgctgcgggcggcgatgctggaagagtgcaacaaggaatacgtgacgctggcgcgttccaagggggccgggcgcctgcgcattctgctgcgccatgtgtttcccaacgtgctgggcacgctgatcaccgtactgtctctctcctacgccagcctgctggagggcgcggtattgaccgaaacggtgttcgcctggcccggcgtcgggcgttacctgacctcggcgctgtttgccgccgatacgccggcgatcctcggtgccacgctgctgatcggcacctgtttcgtgctgttgaatgcgctggccgacgccttgacctatttagtggatccgcgaacccgatga

SEQ ID NO: 423460 - DNA, 843 bp, Serratia marcescens
atgggcactgataacaccttattgaccgtcgaacggttggcgatcggcgtgccggggccacagccggtgacgttggtgaagcatatttcgttcagcatggggcgggagcggctggcgctggtcggtgagtccggttccggcaaatcgttgaccgcgcgtgcgctgatggggctattgccgccgccgttgcagctgcaggcgcagcgcctgacgctgggcgatgaagacttgacgcgcctgagcgagcgccagtggagccggctgcgcggcgaccgggtggcgatggtgatgcaagatcccaagcatgcgctgaatcccaatcagccgatcggccgtcaggtggaggagccgctggtgctgcatgcgaagctgagccgcgccgagcggcgtgaaaaagtgctggagatgctggcggcggtgggcttgcccgatccggctgcgctgtgccgccgctatccgcatcagctctccggcggcatggggcagcggctgatgctggccattgcgttgatcaacgatccgcagctgttgattgccgatgaaccgacttcggcgctggatcaccagatgcgcgatcaggtgctgcagctgatagaaaacctggtggcgcaacgcaatatggggctgatcctgatcagccacgatttgcagcaggtggcgcaccactgcgagcgggtgctggtgatgtacaaaggcgagctgttggatcagctgccggcagcagagctggcgcaggccacgcatccttatacccgcacgctgtgggcgtgtcggccgagccgcgagacgcgcggcaaaccgctgccggtgctggatcgcgcgctgttggagacgttgaaatga

SEQ ID NO: 423461 - DNA, 672 bp, Serratia marcescens
atgagcgtgatcgcactggagaacctgagcgtcagtcatcgccagggttacgaactgcgcaccgtggtgcatgaggttaacctgcgcatcgaaccgggcgagtgtttcgggctggtggggccttccggctgcggcaagtcctcgttgctgtgggtgctggccgggctgaatggcagttggcagggcggctttgagttgctggggcggcgcctgcagccgggccaggcgtttaccggcgagctgcggcgcgaggtgcagatggtgtttcaggatccctatgcttcgctacaccccaagcaccggcttttgcgtacgctgtcggagccgctcaaactgctgcaggaaagcgacattgaacgtaaaatcagcgcgggctttcgccaggtggggttggatccgcgcctgctggagcgctacccgcatcagctgtcgggcggccagcgtcagcgtgtggcgatcgtgcgcgcattgttgctgcggccgaagctgctgttgctggatgagccgacctcggcgttggacatgtcggtgcaggcggagatcctcaacctgctcaacgagctgaaacaggcgggcgatctgacgatggtgctggtcagccacgatgcggacgtgattgaccacatgtgcgatcgttcggtggcgatggcgcacggccgcatcatcgtttga

SEQ ID NO: 423462 - DNA, 525 bp, Serratia marcescens
atgaaacggttaatcccaaccttattgtatggcgcgctggtggccgcgttcggtgcgcaggccgccaccccgcaggacaccttggtggtggtcagttcgctggagggcattatcagcctcgatccggcggagagttttgaaaccgtcagctcggctaatctggtcaacctctatcagcgcctggtggcgccggatcgcggtgcgccgcaaacgctggcgccggacgccgccgccagttggcaagcgggcgccgatggccacagcctgatctttaccctgaaaccgcagcagcgcttcgcttccggcaatcccctgcggcccgaagacgtgattttctcgctggttcgcgcggtgaagctgaacaaggcgccgtcgtttattctcggtgagtttggctggacgccggataacgttgagcagcagctgaagaaggtgggggataaccaggtgcaactcagttggcccgccaacatcggcagcgagttggcgttgcggctgctgacggcgaatgtggcctcgatgtag

SEQ ID NO: 423463 - DNA, 909 bp, Serratia marcescens
atggctatcgctctcaacaccggtaaggtttatgcaggctttcgggagcctctcgatttgtcgtcggacattcttgatgccaccgcgttatttaatgcctacaaagcccgcgtgcaggccgatggtggcatcatcccgaatgcggcaggctgcaaggaacgctttgagtttttggtcaataacggcatgtatgagaatgccgtgatgtgtgccgctcccgcatttggcgtcaaactgggcggcacagatggcaacgatgttctgaccgtatacagcctgctgggcgaaagcaccgacctgattccggcagcccagggaaccggtgatgccgttcggtatgactcaacgaataagacggccacggtacggatcacctccagcggcggcacctatctgcgcacacgcgagaatgtccgtgttcagattggccgcagctatatgattgccggtcggctcagtgacgcgagcaatgccgatgtgctcgggatgactatcggcatctcgttatcaaacctgccgctggcgtacatgcgcacgatgataacgaaccagcaggccatcacggaggcctggcgttttggcacccgtgacagcgcctggacggggcctgtcgccggtggggctgtgggtgctgcggcaacgacgtatgcggattatgtgcctgctgcaggcctgttcaaagtggatgagggggttgtttacgggtatacacgcgggaagctggacaagacggctacggccaccacgggcaagttggcagacctggtgaactttaccgtgccgatcgttgttggtggcggtatggcatccggcactgtatctccctgctacggctcgttgcttgatatgttgttcctgcatacggcatcagaaccggatgccgtgctggcatcacgctttggtatgtag

SEQ ID NO: 423464 - DNA, 2343 bp, Serratia marcescens
atgccgaagacgttacctgaaagccctgagtgggtagacggtatttaccaggtagaattagacacccccgtgctcggcggggatggcgggcctgacaactggcaggctcaacaactggctaaccgcactgcctacctcaaacagcgcaccgacatgattgatgaccgcctgcaatcggcaacaggggattatatctctgttgccgaggcacaggccgccatcgatagtggtagcgaaacacgccgttattttaacgtgatgttgtttgataataactgggttgagcgttatgaaaatgtcaatggcgtggcaacgccaaccggcattcgcttgccaagtagccaggccgttgatgaattaagcgtgtcccttgatgaggctaacgcgcttattgcgcgattaacgctactgacggccccgctgcgtaaatacatttccactaaatataccttttcggtcaataccgccgaaggcccggtatctaccggacttgcactcgacagggatatggggctatggcttcctgggttgaaagcggaattgcagcaatatgtacagcagttaatcccgtcgtcaattgcgaatcgctatcctggctatcaattaatgttcacggatgtgaccgggaaaaaagggattgtttcgattgatgataatggcgatgtgcgcgtgctcggtatcgatgacgttttgcaagagcgtctggccgcgctgtgctcatcgacatttgcacgacgcattaacgggttccagttcgttattttttcatccgacctcaaatcggcgctgtttgccattgatgatgatggcggcgtgcatattccgggcatcaaaggtgcgctgcaggataacctgggccaacagcctgcacgcattacgccgtatcagggcttgcctgccgtgtattggaatgatgcgttgctgtggcatgaacgtcccgttctgagcgtaaaccaggtgtcggccaccggcctgtcgatgacctacatccccggcggtcaaatcagcaaaggttacggcatgatgtattaccggggtggcgctgaaatctcgccggaggcaatgaaagcgctcatcttatgcagtgatggccagtcactgggtgtgccgagtgatgccggtaaccggccgaatccgaatacctggaacaaggttaactacgaccccaaatggcgcgcctatgcgctggccatcgctgggggcaaacccgagggcagccaggacacgccgatcaccgaggccatgctggatttactggccaatctgatttacccgctttaccgccaggggcaacagctgccgtttgtctatgcgctgctctattcgcatgaaaacgccggcttgaatctgccggtcatgtttagcgcggtcgccaacagcggcggcaagtcctttgcgcaaatctggaaaggcaccgtgccttacagcaacggcctggcgatggtggagcggtatgtgaaaattgcccaggcgctgggtaaacccgccagcgttgatgtggtgtcgctggagcatggcgagacagataacgacaacggcacctcgcagaacgtcggggattatcgtgtgcgcatggaggcgtattacgcgctgcgccgtgcggattacaaagcgctgacagggcaaaccaccgagattctggcggttatcggccaggtcggcagccgtatcaacacgaaagccggtggcgtcgatgaacaagggaaccccacgggcgaaagcgtggttgttaagccgttctctgtggtcgcggttgaccagctccagttcgttaaaaataacccgaccaacgcgatcatgtacggcccgaaatatccgctgaattggttgtattcggacggctcgctgagtcacctggacaactgggggaaagtcctgcagggcgaatatcaagagcaggccatcttctggcacttatatgaccccgcgcgtaaaggcacctggacggggctaaaaattaaaagcgtcacgctgacggataatatcgctgatttactttgtgacgtgccgtttgcaccgattgttatcgacgcggaatttattgccgactgcctgaataaagggattagcctcgaaaataactcagccgccgttcaaagcatcactatcgtcgatggcaatatcatccgcgtcgtgtttgaccaggcaccggcggccacggatgcgttgctgatggggttcaccaacaccgcagaacattcaccagaaaatgactctgtttatccattgacctgtttccgtgactcttcgccacgcgtgtcgcggtgggtgacgcgcaacggttcaccattccctctctataactggatgtgcctcgaccgcatcccgctaacccaggagtaa

SEQ ID NO: 423465 - DNA, 663 bp, Serratia marcescens
atgtcgctgggtggtcggttgattgactcgcagcgctatatcacctctgcaagcgccaaagtgacatcaacatggcatgagtattcgacagaaaacttgcaattgctctttctttccaatgggtctaaccaggcatccgcaattgtgacgggcgaacttttacctaccgacattaaggcgggagataccatttcattacgccatcagaatgtattcagcgttgtcctgcattcgcttgtcgctggcgtggactatttaattgatccgctgtggggggttgttcgctttatcaaaacccccgcccagcaaccggttattgccgactatgctcatatcggttacgccacaatcccattactgaatgatgatgagccggagttttgtctgcgttatgagggcatcaaccttgccgaggaaaacgaaaatattttggttgaattatatcgcgttaaattcgacccggttgaaaagatggatttaatcaacaacgagcaagatttagcagcattggaaaccagtgccacgacgttgctcgatgcctcaaaaatgattgacccaaacttagggcagttggggcgaattgttaagtttagaaaaacaaatgggatcacccacaacggcaccattttacacaatggtttttatacccacgggggaaattaa

SEQ ID NO: 423466 - DNA, 2286 bp, Serratia marcescens
atgggcggcggtggcaaggggtcgaagaaagtcacggtgggctacagatattcctgggatatccaggctgggattggccgtggcccggtgaatgagattgtggccatcagcgccgacaagaaaacggtgtttgccggcacgcccggccaggttgccggcaacacgtcgctgtacatcgacaagcctaatctgttcgggggtgaagacaccggcggtgaaggcggtatccagggaacacttgaggtgatgatgggcggccctgaccaggtgccgtctccctcattattgacgttgctcacggggttagtgccgggttttcgggggctggtcaccaccttctttagcgggttggtcagttgctacagcgcctcacctaagccgtggtcttaccgcgttcgccgcaccacgcagggctgggatgggccggtgtggtatccggagaaggcgcttattctgctgcagaacaccgaggggcagcttgatgacgaggccgacctgaccactgaacagattgccaacctgcgtgcgatccacgccatgaacccggcgcacatcctggttgaatgcgcgctcaatcgtgactggggacgcgggctggtgctgggtgacctagacattgacagctatcgcattgcggctgaccggctctatgacgaaggatttggcctctgttttcgctacaaccgccaggacgacctgaacacgtttgtgcagcaagtcctggatcacatcggcgcagcccaatacggtgacctgagcacgggcaaactgacgctcaagctgctacgtgatgactacgaccccaataccttgccgctgtttacctacgacaacggcatcgtgggcgtgcaggacgacgacagcaccagcgccgatgcggccccgaatgaaattgtggtgacgtaccgcgacccggtgaccaacagcgaaggcgaagtgcgcgcgcagaacctcggggcgatccagaacgtggggttgatatcggagagcgttgaatacaaagcggtgccgacccatgcgctgggcgcgaggttggcgcagcgtgaccttgaaacccgcgctgccggattgaccaggctgataatcaatttcgaccgacgcggcggcgtgctgacgccggccggcgtttttcgcatcagcttgccagagcgcaacatcggcaacatggtgatgcgggttggaaagattgaagaacaggacaccggtgagttgaaggtgacggccattcaggatgtgttcgggatgccgagcacgtcgtacagtagcggcgaacaaggcagcacatggtcaccgccggacaagacggcacgccccgttactgatagccagctcattgagctgccctatatcgtcctggctgccaccgtcgggccggcggagctggcggccattcccccggaggccggttacctgggcgtgatggccagtgcgcccagcagcgcctccatcaactacctgcttcagacgcgcgccgacggcgtgaactggcgcggtaatcttaacggcgactggacaccggccgttacgctcacacagcctgcaggtcgctttgataccacctttaaggcgtcattaaccacgctgccggcagtgggggccggagcaattatcggtgatgagattgttcgtatcgatgccgccgatctggcgaccggggcgttgaccgtcgggcgtggctgtgccgatacgttgccggctggccatctggccggcgcgcagctgcgtttcttccaggatgcgattgaaagtgatgggttggaatatctggagggagaaacgatagacgttcgtttgttgacgcgaacggcacaagaaacactcgctgccggcgctgcacctgttaaccatttgacgctacaggctcgccaggcaaaaccctatttgccggcaaatattcgtttaaatgacgaaccttatcccctcgttgcagaaccggcagcggaatatattttaacctggtctcaccgtgacaggcaattacaagctgaccggttaattgattatctcgatagcagtattggcccagagtcgggggtggtttatgtaattacactcgttcgccctgatacgggggatattgtttggacgacaaatactgttgaagcaacattgacgctaccgtattcgtccgcaacctccccattaaatcgggttcacacggtcagtatagaagccaggcgcggcgatattgcatcgctgagcaattggatcatcacattaccaacaggccactatgttgaacctactccggagccggagccgcaaccggaagaacctgcggcataa

SEQ ID NO: 423467 - DNA, 204 bp, Serratia marcescens
atgttgattacgatggaagatattcgcgccggcggcggttgtgcgcctggtctgcgcgccttctttgcccgctatgggctagacctgaaagccttcatccgtgatggcggtatcgatgccgagctgctggccggcaccggcgacgccctggccatcaagattgtgcgcctggcgcaatccaaagctgagccggaggccaactga

SEQ ID NO: 423468 - DNA, 234 bp, Serratia marcescens
atgtggtgggctgttgcgaaattcgttgcggtaattgtggcgtcctacgtgctgaatacggcgttggctccgcgtcagaagagtaacacgccggaagcggcgacagaggatgactggaacctgcctcaaccgaccgaaggcacaccgcaatgcatcttctttggcgattgctggagcgaggactggtttgttctggcctatggcaattaccgctatgaagccattaagaaataa

SEQ ID NO: 423469 - DNA, 816 bp, Serratia marcescens
atgagctggagtgattttgagtattccaccgccaacggccagccggtcacgctctatgagttcgtgcggggcgatacgcagtttttccgctacaccaacgccgatcaggatatcaccgccgccggtgccgtctggcagcagcaggcgatcagtgatggcggtctgagcgtcggtgccggcgacagcatggacattacgctgcctaccaccaacccggtggccatgctctttcgcggtctgccaccgtcccagccggtgcgcgttcgtattcatcgctggcacgtcggcgacagccagggcgagttccgcaccgtctggatcggctccattaccgaggtcaagcgcgaggcgatagaccgcactcggctggtcaccgccagtctggccagcacattcacccgcagcggcctgcgcctgacctgggggcgcgcctgtccgtattcgctgtatgaccacaattgcaaggtgtcgccggcagcgttcggcgtcggcggcctggttatcagcgcgctcgatggggtgagtatcaccgtcaatctgccggccggctcgcctgacggttggttttctggtggctatctggaatggctggcggatggcgtgatcgagcggcgcgggttacgcgcgcagagtggcaacgtgctggggttgtttggcggctcggctgggctggccgttggccaggtggtggcggtttttcctgggtgcgatcgcaccataacgacctgtaacgataagtttaacaacgtcctgaactacggcggccagcctcacatgccgggcaagtcgccgtatcagatcatcaaactgttttga

SEQ ID NO: 423470 - DNA, 1176 bp, Serratia marcescens
atgatgaccgttcgtctcccatggttgatggagcctgactgggccgagggtgtcagtgaaaccctgtcctggaaaacggacgtcctgatctccccgtccggggcagaacagcgcattgcccgacgtctgtcgccgcgccggctgtatgagtttaccgtgcttgccggcaatgccgacgcccgcgcgttggagacccaactttttcatgccggcggcgtcacctgggatatgccggtgtttcctgacgttgcggttttgtcggcccccatcgcggccggcagccaggttatcgcgctgccagcggccggccgtgattttgtcgcgggcgataacctgctgcttaagcagggtttcgggatgttggccaatcagaccgtcgcgcagatccagagcatcgatgccggcagcgtcaccgttacggccccgttaggcgcgtggccagccggcacatgggtttatccgctacggccggccgtcttcaccgatacgccggcaatcacccgtcacagtgacagcctgatgcgtctgcagctgcgctttcgcctggcggcacataacccgtttgcgccggcgatgaataccgctatctatcgcgggcatcccgtgctcgaacaagacgccgattgggttgacgacctgacggccgagtatcagcgacagctcctggagctggacaacgaggtgggcattccctaccgcaccgacaccgccggccgggcctttatcatgcagcagcatgtgtggtctgaaatcggtcgccagacccaggcaaggctgcgcggccagctctattatctgcgcggtcgccagcgtgcgatgtgggtcgccagccaggcgcaggacttcatccctgtgcgaactgtcggcaatgcgctggttgtggcggtcgccggctttagtgagtttggtgtggtgcctggccggcgtgacctgcgtctgcagttggtcgatggcacctgcgtttaccgccgtatcctcaccgcctcgcgccagagtgattacgagctgctggcgctggacggtgacgttccgccggcggattccatcagccaggtgtcattgatggcgctttgccgccagaacactgacgacatcacctgggaacactcgaccgatgcggacgggtttgcccaggtatcaaccacattccgagggcttcgcgatgagctggagtga

SEQ ID NO: 423471 - DNA, 3717 bp, Serratia marcescens
atggcaagcggaaacggcaacctggaattgcgcctgcgtattcaggcggatttaaaaagcgcccaagcctccctcaaacaactgcagtcctccctggacagcgccagccaaagcggcacccggttaggcagtgccggcggctcggcagcgtccggtctcgatcgggttggtggtgctgcagacagcgccaaccgaaagctcgataaaaccgccgctaacgtcgatggtctaagcagccaactgacccggctcaagccgctggcggcggccatcggcattgccctgggcggtggtctgatagccaacctggccagcacctcagatgaatacaccaacctggcggcgcgcattcgcctggtctccacatccaacgaacaggcggccacgacctttaaatcggttatcggtgtggcaaatgaaaccggtcaacgcatcgcctcgaccgctgaactttatacacgtatggctcgatcgcttaaaggcagcgcaacccagaccgaactgctgcaggtgacgagcaccatcaacaaggccgcgatcgtctccggtgcgacggccgaagagtccacgaacgccatcatccagcttagccaggggttggcgtccggcaccttgcgcggggaagaattcaactcggtgtccgaacagatgccgcgcatcatggagatgctggagaaatccctgggcaaaacccgtggcgaactgcgcgcgatggctgagcaagggatgctcaccacgcaggtggtcttcaaggcgctgaaagacggtgccggcgacgttgaccgcgaatttgcgcagatgccgctgaccatcggccgcgccgccacggaaatggccaacgcctgggtcgagtttgtcggcggcaccaacgatgcgctgggcgcgtccaaggcgattgcggccgtcatttccggtctggccagcaacatgtccacgttgaccactgccgccattgccctggcggtggtgatgggcggccgtaaggtcgctgcgctggttgctgcgaccacggccgcgcgtgccgaccgcatcgagacgctgcagcttgccgaggcggaatatgccgaagccaaggccgccgtggcagccgcgcaggcgcaggccgcccgcgcgaaagtctccggcatcaccgcaccaggcgcgcgcgccaaagcggaagacctggtgaccgcttcgctggttcgccagactgctgcagagaaagcgctgggcgttgcccgcgcctctgcatcgacctttggtcgcctggggacgggattgatggggctgctgggtggcccgatggggctggccatcactggcgtgacgctggctgtcggcggcctgagcgccgcctatgcggccaaccaggagcatgaagccgcgctggcgcagcagcaccagcagaccatccagacgctggaagaccagcgccagaagaccgaggcgctgataagcgcccagggccgcctcaaagattcggtcagcacgggcgatgcgctgacgcagcagcgcaccaacgccgatgtgctcacccaggacagcaagaaactcagcgacctgcagagccaggcggcatcgcttaagcagcagattgacggcctgctgagcagcccggccccgagcgggatcggcatcgtttacctgactgacaaactggccgaggtgcaaaagcaaatcgatgcgctgacgccgaagttcgacaacctcagcgacgtgcaagacaagctgtccgatgagctggaaaaccgcctggcgcgcgcgatggatgcgccgaccgcaagcggcaagacgctgcgtgatgtgttgaccgatctgcagaacgccggccccattcgctggatggatgaggccgtggcgcagatggcgcaaagcgaggaatcctttaccgcgctgagcgccgaagccgacaagctgcggccgaagctggagaaagagctggccgatgcgacctacacggccgcccagcagttggagcaactgcgtgacaaaaccattgcggcggcgctggcggccggcaaggcaccggaagatatcgacaagctgcgcgaaagcctggaaaagctggtcaacctgcagaagcaaaccgaccaggccaaggagaacaagaagaactcagacgcggctgcgcgttcggccaagtcggccgcctcggccaatgagacctacgtcaaggggctggagaaacaggcctttgccgtcggcaagaccaaatcccaggtcgcggcttacgagctggcggaaaaaggcctgtccggggcgctgaaagcgcgggccgaagcggcgctggcggttatcgcagccggcgagcagaaagagaaatcggacgccaacgccaccaagaacgcccagctgcaggcgcaatatctgaaagccaccggagacgtgctcggaggcggcctggcggaagtgcgggccaacatcgccgagatgcgcaaggagttcacccagaccggcaacaccgaggggctggcctggctggacaagttgctgccggtacaggaagccaaagtgcgggcggacgcgctcaaaaagagtctggatgacctgcagacctaccgcagccagaaagagagcagcatccaggcgcaggtgcaagcgggcctcatctcagaactgcagggccgccggcaactggttgcattgcatcaggaagtcggcagcaaaatcaccgagagcctgccgcaactgcgtgaaatggcggcattgcctggtgaagccggcgaacagatgcgcgacctgctggccaacatggaaaacgagctgataacgctgaaatctaccacggacgacctgacggccgcgtttaaagacgggctgcaggatggcatggagagcacgcttaacgggctggccgatggcacgctaaacctcagtgatgcagtgttaaacctggctaaatcggtcgccaatgccatggcgcaagtcgcatcacgcaacctggccggcatggcgatggagggtctcggtagcgtgaccgatagcctcaaggggctgctgggtctcggggccagtacggccggcagtgccgccggcaccgctgttaacgcggccaccgataccgcgaccgatgccgccggtgcgaccacctacgcgacagccatcaccaccgcctccacggcgggggccaccgccatgggcacctcgatcactgccggcagcacggcgctgacgggcggtttcaccacggcgctgacaaccggcatcacggcactcaccacggcgttgacgacggcattcacgaccggtgcggccacactggcctcggccattgcgtctgccagcgccgccggcagcgcgtcctccggcctgggtgcggctgccagtgtggcggccgcgaccggtggccagatcaccggccccggcaccggcacctccgacagcatcgcggctcgcttgtcaaacggcgagtttgtcatgaaaaccgccgctgtccagcgctatggcgtggacttcatgcacgcggttaaccagggccgcctcggcgcgttcgccgatggggggctggtctccgaccccggttttaaccgcgcggccggggtgaatcaatccgttaaccctgatgcaccaggtgcgcaaggtgccggcggcggtacgaccaacctgcagcagtacctggtgctcgatccaaacgagatgctggacagagccgtgaaaagtgcgccaggtaaccgcgtcatgatgacctgggtcaaggccaataccgcgacgctcaaacagttgctggggggtaaatga

SEQ ID NO: 423472 - DNA, 474 bp, Serratia marcescens
atgacggatgagctgaacatcctgatacctgaccggacgctgactatctgcggcgtccaggtcacggtgcatgagtacacgctggccgagcagctgcagcaccgtcaaccgctcaaggcaatcagcgaagggttcatggatgcgatgaacgccaagccggatgccgaggtgtcgattgatgagctgtacgacgtactcggggcgaactgggatgcggtgctgcaggcggtagcggtctcctgtggccgcagcgtcgaatgggtcgccggtttgactggggacgatagcgaaagcctgctgctgatctggtggggcgtcaacgcggctttttttacccgcaacgccattcgcccggcactcaccaggctggtgcagcagctgcaaaacccgccccctggggagaggtcttcagctgtctcatcgaccacggccaccgattcggcgaactcagaaactacaccgcccgccagttga

SEQ ID NO: 423473 - DNA, 747 bp, Serratia marcescens
atgaccccagaaacttactactacggccagggcaaggtgttcctcggccgtcgcaatgcgcagggccaggcggtatcgctgcgctggattggtgacgtgggcgagctgcagattgcgctcaccacggactctttcacccacaaagagtcctatacgggccagcgtgcgcccgtgcgccgcatcagcaccggcaaggatggtacggtcaccgccacctggtatgagcattcgccggacaacctggccattctgctgtacggcgagaaagtggccgtccctgccggtaccatcaccggcgaagcgctgccggcaggcatccaggccggcgaacgtgtcacgctgaaccatcagaacgtcagtgccgtgacgattgccgatttggtcgaggggacggattacaagctcgacgccaagtttggcgcgctggagttcctgaccacgccagccacgcagccgcttagcgtcaactatacgcacgccagcagcgttaacacctcggtattcacccaaacgcccgatgaattgttcctgcgttacgaggggatcaacctggcagagaacggcgcggccgtcgtcgttgagctgtaccgcgtgcaatacgacccggcgtcggcgttgagcctcatcaataccgatacctcgttgcctgggctggaaaccaccgcgaccgtcctgttggacactgaacggccggatgacgcccagtttggccgttatgggcgcgtgatccacgtcgggagcgtctga

SEQ ID NO: 423474 - DNA, 198 bp, Serratia marcescens
atgaccaggcgaattgtactgaccggcccgcacacccatcagggcgaggcgcttgctgccggcaccgagattgaagtggacgacgcaacggcgcagtggctgattgagcacgccggcgcgaaaaaagcgggcgtgaaccgcaaaatcaaaaccgagaccggctccgccgactcaccgaccgaggaacaggaacaatga

SEQ ID NO: 423475 - DNA, 468 bp, Serratia marcescens
gtggtaaccgactatctcttttgcgagccgttgttgattggccggctgcgtgatgctgtcccggagtttgttgaggtgaccggcgtcgccgggctgtctcagatgaacgatgacaacccggtttgtccgatggcgtatgtgatgtacctgggcgataccgtcaacacttcgacggccgccaccggtggcagccagcgccgtctgcagttcgtgacgcagctctgggctgtggtggtctgcgtgtatttcgccgacggtcgcggcctcggcgcagatatcagcagcgaagccggcccgctgatgttgaaaaccgtcaaggccttggccggttggtcaccgctcgaaggggttgcccggacgctggccaggagcaatcagagcctgccggcacagtacgagtccggctatggctattaccctctggtgtttcaggtggacgttcccgccgctattggaggctatcaatga

SEQ ID NO: 423476 - DNA, 423 bp, Serratia marcescens
atggggtactgcacgcaggctgacctggtggacgacttcggcgagcaggaaatcatccgcatctccgaccgcgcccgcccggcaacggggcaaattgacccggccgtggtggagaaggcgattgcggatgcggacgccgaaatcaacatgtatctggaggggcgcggcctgttgccgctccccagcgtgccggacacgctgcggcgtatcgccagcgatatcacccgctattacctgtatcagaaccccagggacgattcacctgtaaccacacgttataaccagcgcatacgccagctcgaaaaagtggcgtcaggccgtttatcgctgggactggacaaggccggcgaggtgctggagccagatgacagcgtggtgtttgtgccagggcgcaacatgttccggagggatggactgtggtaa

SEQ ID NO: 423477 - DNA, 489 bp, Serratia marcescens
atggctaccccaacccaaaagaaagcggaagaaaaatacgtcaaggacgataaaaagccaggcgatggcaccgagaccgatgcgggttccgctgcaggtgatggcaccgagaccggcacgggttccgctgcaggcgatggcaccgagaccggcgcaggttccgctgttggtgacggcaccgagaccggcgcgggttccgctgtaggtgacggcaccgagaccggcacgggttccgctgcaggcgatagcaccgaggccggcgcgggttccgctgtaggtgatgacaccgaaaccggcaccgatgcgaaaccccattggttcaccgtccaggtggtgcgctcaccgagcgggcggcgtttccgtgctggtgttgagttcacctccgagccaaaaccttacgatttctcgctgtttagtgctgagcagctcaaagcactggctgcagatccgttcttgcgcataaagcggattgcgccggctgaggagtaa

SEQ ID NO: 423478 - DNA, 927 bp, Serratia marcescens
atggctatcgtcactcctgcgctggtgaaatcgctttttgtcagctttaacaaggcattccaggacggcctgaaagtcgccgattctgactacaccaaaatcgccacggtcatcaaatcgaccacggcaaccaacatttacgcctggttgggtcaattcccgcaaatgcgtgaatgggtcggcgctcgtatcatcaaggatatgaaaaccgacggttacggcatcactaacaagctgtatgaagccaccgtgggggtgcctcgcacggcgattgaagatgacagcgttggcgtctatctgcctgtgatgaccgaagccggccggtctgcgggggtttacccggatgagcatatctttgcgttgctcaaggccggtgagacctcgttgtgctacgacggccaaaacttctttgataccgaacaccccgttgcggcgaacgtggacggcaccggcgcgatcaccccggtcagcaacctgttgaccccggctagcggtgacccggccagtccggccccgtggtatctgatgtgtaccaagcgcgcattgaaaccgctgattttccaggagcgcatcaagcccgacctcaaggccaaaaccagtgacgacaccagcgatcatgtcttcatgaacgatgagttcctgtatggcgtgcgtgcgcggtctgcggtgggcttcggtttctggcagttctgcgtcaagtccaccaagccgttgacggcggagaactaccaggaagcctatacgctgctgcgcaacatggtggcggatggcggtcgcccgctgaacatcaaaggcgatctgctcgttgttccgccgacccttgcggaagcggcgcgcaagattgttggtgtggccaccatcaacggcggcgaagacaacccgaactacaagctgtccgacatcctggacaccgcctggctgatttaa

SEQ ID NO: 423479 - DNA, 1137 bp, Serratia marcescens
atgaaacgaaacgttgctgtcgcatccctggcctttgagctgaacctgaccggaaacacgatccagttgttcccggccggcgagttccgcgcaaatgatggccgccccgcagaatgtgccaactgggtactcaacgagagcctggcgcgccaggtcatcgagcacctgtcgtcacgtcaaaacaaaatcgtcatcgactacgaacaccagaccctgcggactgaaagcaacggtcaaccggcacccgctgccggttggtggaaaggcaccgataccgtctggacggatgccggcatgttcgcccagaacgtcgaatggacggaagccgcccgcaaaatgattgccggcggtgaatatcgctatatcagccccgtctttgcctacgacaagaaaaccggtgcggtgctgcaggtgttgaatgcagcgctcaccaacaaccccgccctggacggcatgaaccaagttgtcctggcggccgcctctcgtctcatcgtgcaggcatcaactcaaccctccccggagaagaccatgaacgaagagctgttaaagctgctgcgcaagctgcttggccttgccgatgatgcaaccgaggccgatatcctggccgcgctgcagcaggcggccggcgatatgccgaaagaaaatgaaggtgatgcggctgccgcgagcctcagtaagttgctggaaatgtttaccgccctgacggcgtcggtgaaaggcaaggacgacaaaatcgccgcgctgacggtcgccgctacagccaacaaaggcaacacggttgatccgaccaagtatgtgccgattgcggttgtcaccgacctgacgacccagttagccgcgctgaccgcgcgcgttgatggcggcgatctggacggtttgatcaccgaggctctgtcctccgggaagctgctgccgaccatggaagaatgggcgcgcgagatgggcaagaaagacattgccgctctgcgcagctacatcaaggcggctgcgccgatcgcggcgctgaccactcagcaatccggtggtaaaaagcctgccggtgaaactcatgggttaaccgcaactgagcttgaagttgctgcgttgactggcctcacaccggctgaatacgccgccgccaagaaggaaatgcaataa

SEQ ID NO: 423480 - DNA, 582 bp, Serratia marcescens
atggccaatatcaaagtcaccgtcgatgacaaatcggtaagccaacgtctgcagcagctgctgcaggtagtcgataagccccggccgctgatgctgcaggttgccgaaacgctccatgctcaaagcatggcgatgttcgagcagcagggttttcccgtcaacagctggccctcactcaggcccagcaccatccgctcacgttcccgcgccggccactggccagggaaaatcctgcaggtgaccggccgcctggcggcatcggtcacgccggcctccggtgacgactttgcgcagattggctctaacctggtctacgccgccattcagcacctcggcggcaccatcaagcgccagggccaggtgcggctgcgcaccgaccgccagggtaacctgatgaagcgcggcaacctggcgacgttcgccaggcgcagccacaagcaagccgtcgcgcgcgccgtcaattacagcatcgtgatccgtccgcgtccgttcctgccggtgacggataatcagcagctcaacaagccggcctttgaggcggtgatgggcgtgctgaatgatgcctttatgaagtcccgctaa

SEQ ID NO: 423481 - DNA, 1236 bp, Serratia marcescens
atgccaatatcgaaggcagaaatcagcgcgctgttcggcatgaagccggaagccgcgttgcgctacctcgaaaacaagggattgcgcatccgtactgatgccgacgccatgcaggcagtagatcatgcgcacgcattcggctttgccaatcttgcgcgcctggatattgcccaggatttggtgaacgggttgcgcgagggcctggccgccggccagacgccggagtggttcgtcaaaaatctggagccggtactgcgcaaaaagggttggtggggcagcgaggaaaatatcgacaccgataccggcgagatcaccacccgccagctcggcaacccggcccggctgagtaccatctaccgcaccaacacccaggcggcctacatgtcggcgcgccatgagtccatgttggccaacgccgaaaaccgcccatattggcggtatgtggcggtcatggatgcaaagacccgccccagccatgcccgactgcataaccgcgtcttccattacctcgatccgatttggcagtacatcttcccgccgaacggctttaactgccgctgccgcgttgaagcgctgaccgagcgagaagtgaaacaatggggttatgtaatttcgagtaccgacagcgaagttgtccagcaagtgatgaccggcgaggacgagaacgggcgtccaaccttcaccccggtgaatggcgtgcggttcagtggcccggacggccaggcggtgactttcttcccggacgtgggttttgatatcaaccccggcaaagaggtatggaaagccaacctggacaagtacgatgtggagttgtcgcgcccctatgtcagcgcgggattggccggcccggagttgactcacatgttaagcgatgtaacccagggcaaccgcaccggcgagattctggccgccggcgtgctggatgccggcgagatggcgacgctcggcacgtccggccgtaccgcctggctggctgagcaccagcttgccgcccaggccggtgccagcacgttgccgactcagcagcaatgggccagtgtgcagacggttatcgagtcatccaccgtcgcggtgcgtgccggcgagctgctgcacatgttccggcagcttgatgaggggcaatggtggctggcgacgctggatgcgggtctggtggtgaacagctttgcgcctgtgaaggcgtcaaccctcgattcaacaatacgccgtggcacggtcttgaaggatgcacgctga

SEQ ID NO: 423482 - DNA, 1521 bp, Serratia marcescens
atggtgaaaaaaatggttcaaattgtcgatatcaacgggaaaccgatccgccgcgaagtgctgcgcgagccgcaatcctcgcatgtggccgcactggccggcctgtatgccgagcaccccagccagcggttgacgccccagcgcctggagcaaattctcaacgaggccgagctgggcaacctgcaggcccaggccgacctgttcaccgatatggaagaacgggacgcccatttgtttgccgagatgcaaaagcgcaagcgtgcgctgctgaccattccgcacgaaatcacgccaccgcccaatgccacaccggcagagcaagcggatgcggcctggctggcggagtacatcaccgagcaagacggctgggaggatttgatcatcgatatgctcgacgccatcggccaagggttcagcaacatcgagattgaatggcaacagctcggccgcgagtggttcccgaaggcatttaaccaccggccggcgtcctggttcgaactggcgcgggacaatcaggatcagctgctgctgcgaaccgatgacggcatgggcgcaccgctgcaaccgttcggctggatacagcaccgccataagtcgcgcagcggctatgttgcgcgtgctgggctgctgcgtactctgtcctggccatatgtgtgccgtaacttcggcactcagagcctggcggagctgttggagatctacggtattccgctgcgcatcggtaaatacccggaaggcatcggcaagaaagagaaaaacgaactgatgcgcgccgtcaccgagctggggcgctatgccggcggtatcattcccaaggagatggagataacactgcatcaagcctccaacagctcgcatgagccgtttatggcgttggctgagtgggcggaaaagtccatgtccaaggccattctgggcggtacgctgaccacgcaggccgacggcaagacctccaccaatgccctgggcgtgatccacaacgaagtgcgtcacgatcttctttcgtcagacagccgtcagttagccatgacactgcgcagcgacctgttctggccgctgctggtgctcaaccgccgggcaaacgccgacccacgccgcacaccgcgcatcaaattcaaggtgcctgaaccccaggcacccgaacctgttggggcaagtcgcaccgtgcaggttaatttgggcgcgtcggcagcgccgacgccggcacgcagttatgattcccaggtcattgccgcgttagtggccgctttgacccgcaaacccggtgcggatgacacgcaaacagggattgatgaggcattaacggcactgttaagcggcaataaacccgctgaggggctgattgccatgttgcagccggctatcgctgcgttgtccggggaactggatgagcaaagcctactgggtgcgctggctgatgcgttccctcagctcgatccgaccttactgcaagctaacctcggtgatacgcagaccatcgcgcgcctgattggcctgtatgcccagcaggaggggcagtaa

SEQ ID NO: 423483 - DNA, 1785 bp, Serratia marcescens
atgagcaaattaagcagcagggattttctcaaagagctggcgatgctcaagcatgtgttgcgtgccgatatccaggcgcacagcaccgggcttgacacctcgccggaggccatcaacgcgcgccggcgcagggtactgtccggcgacttcacgtattttgcctacacctatttcccgcatcacatccggggcgagcaatccctgttccatgcgcatttttgcacgcgatttccgcagttgctgacgcgccccggcggcgcagtcgaatggtggattgccccgcgtggtgaagccaaatcctcgctgctgaccaaaatcggcccggtctggtgcgccgttcaggggttgcatcagcatgacgacgttcgcgcggcgctcggcttcaccgacgagcggccggccttcatcgactacatcatcttgcttggcgcggagaccaaactgccgaccaagctgctggaggtggtcaaaaccgaactgaccatgaacgcggcgctgatgctggattttccggaggtctgcggccgcagcggacaatggaagattggcgagttcaccacccgcaccggcgtgaaggtcgaggcgttcggtgccgagcaggctatccgtggtacgttccacggggccagccgccccaaattgctgctgggcgatgacctgatcaccgatgccgaggccaaatccccgaccgagcgcgaaaaccgctggaactggatttcaaaagcgatcgagtacctggggccgccggacggctcggtaaaatacctgggtgtcggtactgtgcttaataaagatgaccctatcagccgcgccaagcgcaccattggccatgtggttcaccacttccgcgccatcgtgacgctgcccacgcacatggatttgtgggaacagtgccaggagaagatgctcaacgacgacaagcgcgccgaggaacaggcggccgagctggggcttgatcttccccaggacaagctgccgtcttacaagttctacctggcgcaccaggtacagatggatgatggcgcggtcacgagctggccggcggtgcgtaccctctattggttgatgcgacagcgcgccaagaacggcaaggcatttgccaccgaaatgcagggcgacccgcgcacggacgaagaccggacgtttatcaatatccagttctttacccagcgctggcgcgactggctgattttcggtgcctgtgacccctctatgggccaaggtgagaccagcgacccctcggcaattcttgtgggcggctgggacaagcagcgcagccggctgcatgtgatggaggcggagatcaagcgccgtgtaccgtccaaactggaagccgacctgatagcgatgcagcggcaattcaggtgcctggccatcggctttgagaacaacaacgcctacgagcactcgcgctcgacgttcatcaaaaatgcgctgcgccaaagcgtggcgctgccgttggtgggtgtgacggccaaagtgccgttggaagtgcgcgtcgaagggctggagccgtacatcaacgaccagctcaacccctctattttgttcaatcccggtctgacgctgttgctgtcggagctggagacctggccagaaccgcagaccggtcaccactatgacgggctgtcggcactgcagctactttggatgattgccgttagccgcggcgcaggttcgttcgcctgggagccgataccgcgccgggaggcgtcccggtacggcggcgatcattttcttgatgatgacgacgagccggattacggcggtcgcggtttatggtga

SEQ ID NO: 423484 - DNA, 213 bp, Serratia marcescens
atgatccgcctggcaagcgaccattacgttgcctacagcgcaatcgacgatatgcacattgacagtaatcgccaggtcaaggtgctgttgagtgacgggcgcattgcgttggctgaacagagtcacggacagaccgcctgggcgcgcctggcgcagttggtggatgaggtgaatatcgccagcgcgagtgatgcgcctggcacactgcagtaa

SEQ ID NO: 423485 - DNA, 504 bp, Serratia marcescens
atggcatacccgccagagacgcgcgaccggttacgccgggcctatgtattcgacggcctctcactggaggtggcggccgtacagtgcggtgtttcttacgggacggcgcaacgctggaagaacgacagcaaagccgccggcgacgattgggagacgctgcgcggcgcgcgtatgctcgccggaggtggcctggaagaactgaccctggccatgttcaccggcctggtggtgcagttcaaaaccaccattgacaagctggcctatgacgatgtggacattaagcccgaagaccgcgtgaagcttctggccagcctgtcggatgcgttcaacaaagctgtggccagcagtaagcgggccatgccggaagtgtcccgccttgccatcgcgctggaagtgatccagctgctggccgcgtacatcaaagacaaccacccccagcagttgcagccgttcggcgacctgctggaggggttcggcaaagagatagagaggatttatggctag

SEQ ID NO: 423486 - DNA, 228 bp, Serratia marcescens
atgggccgacgcgcatcgcgctaccgccgggggccggcaacgtctgccgaaatggcgttgctgtctgaaatcaatcagcgcctggcgcgaatggagagcagcctggatgacgtgaagtcttcggccattcgccagggcgctatcgccggtgcgatcacaggcagcgtcagcggcggcctcgtgtacaccacgattatgttgatcaaggcaaaactgggggttggctga

SEQ ID NO: 423487 - DNA, 249 bp, Serratia marcescens
atgacccttgaaatggcgtttaacatcgcaatgaccctgttgatggggctgttcggttttctttttaaatatctgtttgccgagctgaaagacctgcggaatggcctccaggccatccgcacggaataccagcgccgggacgatgcacagcgaaacaatgaccagttactggacttgttgaaggatgtaaaacgcagtgtcgagcacatcgaccagaaactagaccgcaaagcggataaaaggagctaa

SEQ ID NO: 423488 - DNA, 621 bp, Serratia marcescens
atgccgttaaccctcagactggtgcttagtcacctgcaaacccattttctctcctatttgctggcgctcggcgtcggcgttggtgcgtatttcctggggcaatctgccggccgcgctcaactgcagggcgacctgacgaaagccaacaaaaccatcggccagttggctgcggataagtctgagctgaatgaaacgctgcgccagcaggccgagcagcacgccctggccatggctaaagcgctgcgcgagctgcaggcggcgcagcagctcggtgacaaactttcacgcgagctgcagcagagccaatctcacctgcaggcaacgaaggacaaactcaagaaggcgatcgacgatgcggttaaaaacgatgtgggctttaccggcattggccctcgcgggctgtgcctctacaacgccgccctcggctatgccgattgtggtcaacagttgcccaacaccgccggcggccttactggccattccgccgaagccgccggcagcgcaggcggactctccgccggcggtctcatccggcacagcgccgactatggagcctggtgtcagtccttagaggctcagctgcagcaacttaatcaatggtacgccgggagggaacaatga

SEQ ID NO: 423489 - DNA, 285 bp, Serratia marcescens
atgtccgcgctgatgagcatgctgttgcgccgcctgggcgaactcatcaccaatccggccacgggccgcttgtccacctcggacaccatggtgctgggcgcgttcctggtggcgtcgttcgttatcgtctgggttacggtgaccggtcacttagaagagtggcacctggccgcctacctgggcgcgttcgttttccagtctcaggcgtcgaaattcgtcgccatcaagcgagacaaggccaagctggaggtgggcgatgccgttaaccctcagactggtgcttag

SEQ ID NO: 423490 - DNA, 651 bp, Serratia marcescens
atgattacccccgaacagttacgccgtgcagccaggttaacccccgccaatgtgtcacgctggcacgcccccatcacgtcggcgatggcggagtttggcatcgatacccccaaacgccaggcggcgtttctggcgcaggttggccatgagagcaacagtttcacctcgctgtccgaaagcctctactacaccgacgcccgccgcattgcgaccctctttcgcaccggctttgatctcgatggcgacggtgtggttgatccggaagaaatcgagtttgcgcgcggctacgttcgccgcccggagaagctggccaaccgtgcctacgccaaccggggcggcaatggcccggagtcatccggggacggctggcgctatcgtggccgtggcctgattcaaaccaccttcaagaacaattaccgcgccgccggcaatgccctggggcttgatctgctcggcaatcctgacttgctgctgcagccgctgccggcagcgcgttctgccgcgttcttctggtggtcgaacaatctcaacaactacgctgacagcggtgatttcaaggggctgacgcgccggatcaacagcgggatgttggggatggatgaccgcctggcccgcctgaaagatgccgaggctgccttatgtccgcgctga

SEQ ID NO: 423491 - DNA, 450 bp, Serratia marcescens
atgaaatttaacgagatcaagcccgatttaagccaggttgaagcgctgttgccatcggtggtcattgagctgatctcactgattggctacgccaagaccgaggaaatgataagccatcttggcggcatcaccttcaaggtcggcaagtccgtgcgtaaaaaaggcaaccggcgcggcgaactgctgatcgagctgctcggcaaggagacggccgctatcatcgaaaaacacttcggcagtgaaccgctgtatattccgcgctgtgacagcgcgttgcgtgagtggcgtaatcgccgtttcatcgacgagcacaacgctctggtggcggccggtgaaagctcccgctttgcgcgcatcacgctttgccccaaatacggtgtgactgaccggtgggcgcaaaagctattggctgagcgacaggtatcgtcacagcaattagatctgttatag

SEQ ID NO: 423492 - DNA, 423 bp, Serratia marcescens
atgacacctaacgcgaaaggcctcatcggggccatcaaggccggccaggcgtttctggggatggatgacgacacctatcgtcagatgattgccagggttaccgacggtaaaacctcctgccggcagtgctcgctggacgagctgcagcgcgtccgggagtacctgcatcagcaggggttcccccgcaaaactgcccggcacggacgccggccgaaggttgcccgctcacgcgaagccatcctggccaagattgaggcgctgctggccgaggccaagcgcccctggaactacgccgaggggctggcggcgcacatgtaccagcagcatgtgctggagtggctgaccgtcgagcagctgtctgcggtgatgaaggcgctgatcatcgacgccaaacgccgcaaaaacaggagtaagccatcatga

SEQ ID NO: 423493 - DNA, 198 bp, Serratia marcescens
atgaagtaccccaagggcagcgtggttaagttgccgccccggcctggtcggggcgttgttctcaacgtgtttccaatgccggatgagcgatttcgttacggcgtgcagtgggacggcggcgcttaccaggtctacgacgagaaagagatccagtgggcgacggttgaccgccccaaagtgtacgggagtttgatatga

SEQ ID NO: 423494 - DNA, 249 bp, Serratia marcescens
atgaaaaatgtcctgcgcaaaaccagcgccaaagactttaaccggcgttttccggtgggttctcggtttcgctactaccccgttgtcggcgtgcctgactgcgaagaagtggtgacacgctcggtggcctggcacctgcagaacggtaagaccgtggtgcgggtcgagggcaagattggcggcgtctccgtctaccgtctggagcctctggaggccttgcatgaagtaccccaagggcagcgtggttaa

SEQ ID NO: 423495 - DNA, 765 bp, Serratia marcescens
atgagcaatgaaaacctgaacatacgtcagcagttcgccagcgcagctatgcaggcgctggtgattagcggcctaaataccggagcctgggccgattacgtcgatatggccaaatcagcctaccggatagcggatgaaatgctggatgccgatctgctgacgaactgcgccgagatcaagctgcattcggccaaactcccgtatatccgcactcacagcggccaccatttttattatcaggtcatcagcccggacgcgattgatatcgacgacatcgcgcaagcgctgtcgaacatctgccgctttgccggtcatttggatgatttctacagcgtggcgcagcattccgttctagtcagtcgcctggtgccgccggaattggcgctggaggctctgctgcatgatgcctcagaagcctactgccaggatatcccggcaccgctcaaggcactgctgccggactatcgcgacattgaggcatcggtcgataacgccatccgctctttgtttgggctgccgatggagcatagccccgaggttaagcgcgcggatctggtcatgctggcgaccgaacggcgcgacctgggcattgatgatggcgacaaatgggacattttggacggcatcgcgccgactgatgagtttgccatccatcctcttaacccacgccaggcgcgccaattgttcattgcccgatttaatgagctttggcgcgtccgggttgagcaacgccggcaagagatattcggggatacaacaccatga

SEQ ID NO: 423496 - DNA, 351 bp, Serratia marcescens
atgattgacgacaacagcattgaaattatcggccgcttcaccagtggcacctacattgcccgataccagggtaagcaagccagcaacaccgccagcgcaaaaggcgctgtccatcggctggcaggcaagatttttggccccctgcagcgggtgacggtcacccggatcagcgctggccgggaacatgcggccggcacctttcgggttacggtcgatgaaacccaaaaatgccgccgttgtggctgcacctggcgcaatgcgtgcgccggtggttgccactgggtcagccctgatttgtgcagcacgtgtgtcgattcaacaaattccccggaggtgaccaatgagcaatga

SEQ ID NO: 423497 - DNA, 225 bp, Serratia marcescens
atgtctaattatttgtcggtttcaggctgccagcaccaggatgatggcgctaagcgtatttatcacctgaccaataaggccacggtgatcgagtatccgcgtttgcctgtacgttctcgctttcagttctatgacccgcgcggcaacaaggttcacaccaatggcgagcgtgtcgcgatgaaacaggctgttgaacgccataaaaaactctggaggttcgaatga

SEQ ID NO: 423498 - DNA, 327 bp, Serratia marcescens
atgaaacggtttaccccagattgttcaatgcatatgtcgcatgaaatcgcgtttatgcgtgaaacgccagatggcgcatatatggaatatcaagaccatctgcccgtaaaaacgcagcgggataatttggcaattcgcgttactgaacttgagatgaagttattgatgaaacccatcttcagtgctgaagaactcaacctctttcgacagtggtttaactcgatggaagacactaaccctgagtatatacaacccagtgatcggtctttatatcgcaaggttttggcgctgttggcgtggccttcaaaggaggaaaaccatgtctaa

SEQ ID NO: 423499 - DNA, 555 bp, Serratia marcescens
gtgccgttgaaattaccggttctgaatattccgctgctgctgaggattataaaaatggaaaataaatctaaaagcgaacagattcgcttggcattggctgagcgcggcccgtccacggcggcggagttagccgaaggtgtagacattgagattaaaaacgttggggcgttgctggcttatgacttgaagcatggccgccttgtgcgtggctggcgtgggaaaattcgtatttatgggttgcctggcactatcgataatccgtcgccatcgccttcactggttcccttgcgtagagccaagccttatgtctcgcatcgtacccaacaaagtaaagctgttgagcgtatgcggatgcctgatattgaacctggcgacaattttacaacattgtcggaaaaagcccgtcaatgcgagcaggctaataacttcacagacgccgcaccactttggttaattgctgctgactttgccaccaaagaagcgaatcaattctggtgccggagtcgttctgatttctgcgtgcgtggttggaaatatccggaggtgaaccaatga

SEQ ID NO: 423500 - DNA, 630 bp, Serratia marcescens
atgactactgcagtcgcatcaaataacacaattcctgaaggctacatggcagaccgtaagggtcgcctggttcctgttgagcaggtatccccttttgatatcgaaatggacgcctttgttcgtgcccaggtcaaagaggcagaggatgaaagcgagcgcatcaaagcgtttaaaaataagtcttttgatgactgctatgcctggctcgatctggttgcggaaaagtacgaccgtcagcgcggcggcctgaaaggcaacgtcacgttctcctcgttcgacggtagccaacaaatccgcattgccgtgcaggactcgctgacgttcgggccggagctgcaggtggctaaggacattattgatgagtgcctgagcgagtggtcagagggtgccaataaaaacctgaaagccatcgtgaatgatgcgttcgccgttgaccaggaaggcaagctcaacaccggacgcatcttatcgctgcgtcgcatcaagattgatgatccacgctggcttaaagcgatggactgcatttctgagtccctgcaggtggcggtcagtaagacctatattcggttcttcaaaaaagacagtagcggtgagctgaatagcatccctattaatatcgcggcggtgtga

SEQ ID NO: 423501 - DNA, 234 bp, Serratia marcescens
atggaacaattaacggtaaacaataagaagattgcggcgaagttgaattgtctggcacgtgtggggttaaaggttgttgagtgccatgttaattttcgccgcccggttattgaagttgaagcaccactgcaagattgggtaaagggtgccgtggaaatcacggaaacacgaaacggaattaagcgtactgtcaaaatgacgatatggcatggcgcacacatcatctggtgttaa

SEQ ID NO: 423502 - DNA, 897 bp, Serratia marcescens
atgtcaaaaataagcgtacagcttgaagaaattatgagccgtaagggctacacgcaatcccatgtagcgcgcgccattggtcgcagcccggcggcgatcagcacgttcctgagtgggaaatacagcggcgatattaaaaccctggaatccgaactgtccggctttattcagcgtgaatctgataaagaccgtctgcaccatctaaatattgatttcgtgccgactattaccgccaaaagtggccttgaagtcattcgcatggcgcacctggaaaacgatatcaacgtgatctacggcgcggccggtttgggcaaaaccatgatgttgaaggagtacgcccgccgctatcgtgatgccatcttgattgaggccgaccccggctataccgcgttggtgctcctgcaggagctgtgcgaccgactgggtctcagcaagcgcggcaccatccatgagctgagcgagagctgcatcaccgcactgagcggcacaggacgtgctgtgcttatcgatgaggccgaaaacctgccgtaccgtgcgctggaggtcatccgccgcattcatgacaaggccggtgtcggcgtcgttctggccggtatgccgcgcttgatcctcaacctgaaaggcaagcgcggcgagtatgcacagctctatagccgcgttggctttgctctcgacttgcaggagaaactgccgcaggcagacctgcagcttatcctcaccaacatggtcgaggaagcgaacagcgacagtgttttttccgccttttacagggcatcaaagggtaatgcgcgccggttgttcaaattggcacgcggcaccatccgcgccagcgaaattaacgccacgccgattgatgaggcaatggttgataaagtcgccggcatgttaattagttaa

SEQ ID NO: 423503 - DNA, 2034 bp, Serratia marcescens
atgtttcttagcgtgaatgaactgatcggcttgccgggactgcccggcacagcgcaaggcttgcgcctcgcactgaaaaaacgggcagataattcacctgatctggtgcgcaagcgccaggggagtaaggctttcgagtatcacatcgactgcttgccggaagcggcgcgcgcggcagcgaccgagcggcattacaagtctgtgctggagcaatccggttgccagacgactgaaccgtcagttaagcgtgctgttgcaatcaaaccgcgccaggaactggagctgatgcgccaatgtcctgcgctggtcgagcgcgaggtttgcggcctgactgacgaccagaaagccatcgcggatgcccgtgcgttgctggcgtctgaggtggaacggctgcgcaatgcaggcctgtcccgcctctctgcagtgaattacatcgtgggtggttcgcgcgatggctcactgccagagaacttgatggcggcggcagacctggccaacgcccgcaagggttcgcgggttggcattagccgcagcagcctgcaggagtgggtttccatttttcaggcgacccagcccggcctggagcgtctggccatgctggcaccagggcagaacaagcgcaaaaagcccgaggatgcatcatggttttacggcatgttctggcctcactacgccaataggaacggccccagcgtacgcgaggcttaccgctctttccgtcgggaatggcacgaggtctaccacgcggagccagccatgcgtaaagcgataccgtcttactacgccgttttgcgccgggttaaccagttgccgctgtgctctcgcgtccagggacgtgtttccggctcggccaagaaggcttacgaggtgtattccaagcgcgactgggcgcagatgccggtcaatggcatctggatcagcgatggtaaatccatggatatgaaggtggcccacccgattcacgggcgaccattcacgccagagctgaccatggttattgatggccggacacgttttgtcgtcggctggagtttatcgctgtcagagaacgcgatgggtgttgcggatgcataccgctttggtatgaagcatttcggtaagccgttatttgtttattcggataatggcggcggtcagaaaaacaaaatgctggacgccgatattaccgggatattcccgcgcctgggtattgagcatatgaccggtataccgggcaacccgcaggcgcgcggcatcatcgaacgcctcaacgccgtcattccggagcgtatcgccaaacggacgatgacctataacgggcgatcggttgacccgaatgccgccaggatacaagggaaaaatctcatcagcctgtcggatgccctgcgcaacggcaacgagctgaccacccagcagcagcggacgttccgcgacctgccatcgtggcagtggttgatggatgctgtacaggacgaaattgataactacaacaatcaccatgaacacagtgagttaccaaaggttgacggcactcacatgacaccggcggcctatcgcgccctggtgttgcagcaggaaggcgatgaaatcgaatacatcaccgaaggcgagctgcgcgagatgtttatgccagaagttgagcgcgtagcgcagcgcggatgggtcagtgtcgggaataaccaatatttctccaaagaccttatcgaagtcgatcgccagtcagtgcgcgtgggtatggatattcacgacccggaggcagttattattcgccaaatggatggcacctatgtttgcacggccatttggaatggcaactctcattcccctgttcctcagtctcgcgttgagcaggccaaagagaaacgcgctaaacgcatgattaaacgggccggtaagattattcaagatgccaacgacgagctgcggccagtcttggaagttcaacggaatgactttagcagtctgtttgtggataccgcgccgcgagataacaaaccgctgttcttattagaaacagaacgcgaagaatattttaagaagaccaattcccgctga

SEQ ID NO: 423504 - DNA, 162 bp, Serratia marcescens
atgcgggagctgtcccgcgctgcgggcctttcccctgatacgctcaaaaatgcgctgtatcgctcttacccgaaaggcgaaaaaattattgccaaggcgctggatacacacccctctgccatctggcctagccgttatccacaacagcaacaggtggcatga

SEQ ID NO: 423505 - DNA, 567 bp, Serratia marcescens
gtgggactacacaaagaaacgaatgttgcttttcaagataacgccaaggaaagtattcaagatcgacttaagaagctaatggggccgcgtagcttgcgtaaggctgcatcggattggggcttcccttactcaaccctaaacaactactttgcgaaaggaacaacgccaggagttgacgtggtggtcagagttgcagaaatagaacaggtttctgttcagtggttgattttaggaacagatgagccgtcaggcggtcaaattgagcaacatgaagaacagagccatgctggggcggatgagttccaaacgttgaaggtgatttgggataacttagaggcgaaggagcgctcgcagttggcacgtctgctaggcaggaaaggtgctgatgcgctgacgctcctactagatgatgacagcttgaaattgttgatgctgtccggtgaagctcgccaagcggctttaatgttggaaaaattgccggctgcaaagcttgaagagattttggtcgaatgtaataaggttcagcaagacccgactctaaacgtacaacataaacaggccgtttaa

SEQ ID NO: 423506 - DNA, 1053 bp, Serratia marcescens
gtggatgaaaagctgctgaacgagcacgcgcagcagggggattacggcaatgcctggctgcgcggccattccgccggcggcggcccgtatcgggtgagcaactatgtgccgcacgaagcgctgctgtttggccgcaacgactatgcgccgtcgccggcccggctgaaaacggtgttgttcaagaacgtcagcgacgccggcacccgccgtttgctgttgctgaaaggggatgccgacgtggcctacgatctgggcgccgaccagttcgactcgctgcgcaacgcgtctggcgtgcgcatcgagcaggccgatgcgccccgggtctattacctcggtttcaacaccggcagcaaagacaacccggcgctgggcaatccggcgctgtggcgggcggcgcgctggctggtggattatcaaagcatcgccgagcaactgctgaaagggcaatatcgcgtgcatcaggccttcttgccgcagggattggatggggcgctcgacgatcggccgtttacgctcgacgtgggcaaagccaaacagatcctgcgcgatgccggtattgccgaaggtacgcgcctcgatcttatcgtcatcaatcagccgccgtacactgacatcgcacaggcgctgcaggccagcttcgcgcaggccgggctgcggctggatatccatccggtggtggagagcgacctgtggggcaagatgcgcggccgcgattttcaggcgatcttcacctactggggcgccgactacctggatccgaacaccaacgccagcgcctttgcctacaacgtgcccggtgggccgaaaaccctggcctggcgcacccagtggggcattcccgccatcagcgcggaaacgcgtgccgcggccgcagagggcaacagcgccgcgcgccgcgcacgttatgccgcgctgcaacgggaactgcaggccagctcgccctatgtagtggcgctgcaggggcaaacgctggtggcattgcgcgacaacgtcaaaggtgcccagttggatatcgccaacagcatgctgtatctggatcgggtcagcaagtag

SEQ ID NO: 423507 - DNA, 759 bp, Serratia marcescens
atgtttcttttctcactgtggcacgcgctgttttttaccgcgctgctgtcggcaggaatgctcgccttcgcgctcatcacccggctggagcgaacggcggccgtgcgcgccagcccgccgagattgcgccgccgcagcctgctgctgacggccctgggtttggcgttggcggcgctaccctttgacctgccgacagcacatcggctgtggttaccgccggccgcggcgctgctgatcgccctggcctggctagactggcgccaccggtggctgccggaccggctaacccagccgctgctgtggggcgggctgctgtgcaatctcgacgctcgctgggcgccgctggacgatgcggttatcggcgccgccgccggctacggggcgttgtggctgctcaacgcgctttatcggcagctgcggcggcgtaacggcatcggccagggcgacttcaaactgcttgcggcgctgggcgcctggctcggttggacgatgctgccgctgctggtctgcctggcggcagtgttcggattaggcatggccttggcgcgcggcctgcgcaaccgtcgcgcctggcgaacgccgcaacctttcggcatcgccttggcggccgccggctggctgttgctcttgatgaacgccggccagaacgcaccagcgttgttcggtgagttcttcagcgtctcgatcagccgattgagcaatccggccacttctgccgtgctggccgttgccggattggccagtggctggaaaccataa

SEQ ID NO: 423508 - DNA, 1512 bp, Serratia marcescens
atgaaagacgaaattcaggcaggactcatcaaaatcaaaaaacgactctggcgccgccgccgggcggcctggctggccgggccgctggtgtggctggccggcgcggcgcccgtgtgcgccgaatccccgccggcgccggacgccgttatttcttccgaacggcaagccgcggatccggccgagagtttgccggagctgggcggtgcgcccgacgatgccgcgcgcgagaagcagtgggccgagatggccaagcagtttggcgaaaaagatctgaataacgtttcccgtcagcagatgcgcagccgcgccgaggattacctgctcggccaggcggccgacacgctgcagcaacaggcgcaggagctgttgtcgccgctgggcaccgcccggctatcgctgaagatgaccggtgagggggattttaccggcagcaacgggcagttattcagcccgctgtacgacgtcgacggattgctgacctacagccagatcggctggctgcagcaaagcgcgggggcgctcggcaattttgcgctggggcagcgctggatcgtcggcgactggctgctgggttacaacacggcgctcgacagcgatttcgcccggcagcgcaatcgcggcagcgtcggcgcggaagcctggggagactacctgcgtttctccaccaactattactacccgctgtcggcgctggcgcaacagcccggcgatggcgtgtttttcagccgtccggcgcgcggttacgacatcacgacgcaaggctatctgccgttttatcgccagatcggcggttcgctcagctatgagcagtatctgggcgataatgtcgatctgtttggcagcggcaaaaaacaaaacgatccgcgcgcgatgcagctggggctcaattacacgccggtgccgctggtgacgatgaaggcgctgcataagattggcgcgggcgggcagagccaggatcaggtcgaactggcgctgagttatcggctcggggtaccgctggcgaagcagatttcgccggagtatgtggcgcaggccaagtcgctgcgcggcagccgctacgatcccatcgaacgcaagaacgtgccggtgctggaattccgccagcgcaaaacgctgcaggtgttcctggccacgccgccgtggagcctgcaggcaggggaaaccgtgccgctggtgctggaaatcaaggcgttgaacggcatcgctcacgtcagttggcagggggatacgcaggcgctgagcctgacgccgccgcacaacgccaacgatccgcagggctggacggcgatcgtgccgccgtgggacgacgcgccgggcgccgccaacagctaccggctgtcggtcacgctggaggacgaaaagcagcagcgcgtgacgtccaactggatagagctgaaagtggcgccgccgctgacggcgaccgccggcgatgacgcgggtctgctgccgatcaaaaccctgacgccgccgccgatcccggcgcaaaccgggccgctgtacggcggcgattaa

SEQ ID NO: 423509 - DNA, 651 bp, Serratia marcescens
atgacgacagaaaccgccgccacaatcttactgatagacgaccacccgatgctgcgcaacggcgtaaaacagctgattggcatggacgcccgcctgcaggtcatcgccgaagccagcaacggtgaacaaggggtcacgctggcggagcagcacgatccggatctgatcctgctcgacctgaacatgcccggcatcaacgggctggaaacgctggatcgcctgcgccagaccgacctctcggggcgcgtcgtggtgttcagcgtgtccaaccatgaagacgacgtcgtcagcgcgctcaaacgcggcgccgacggctatctgttgaaagacatggagccggaggatctgctgaaggcgctgcatcaggcggcggccgggcagatggtgctgagcgaaacgctgacgccgatcctcgccgccagcctgcgggaaaaccgccccagcgccgatcgcgatattcagcaattgacgccgcgcgagcgggatatcctgaagctgattgcccaggggctgccgaacaagctgatcgcccgccgcctgaccatcaccgagagcacggtcaaggtgcacgtcaaacacctgctgaaaaagatgaagctaaaatcccgcgtcgaggccgcggtgtgggtgctgcagggtaaaaacggttaa

SEQ ID NO: 423510 - DNA, 1785 bp, Serratia marcescens
atgaaacgcctgttggccccgctttcgatcgtgaatcaggtcgccctgctgatgttgctgtcgggcattctgggcgtggccggcatggggatttccgcctggatgtcgcagagcattcagggcaatgcgcacgccatcaacaaggccggctcactgcgtatgcaaagctaccgtctgctggcgcaggtgccgctggatgaacggcatgaagcgttgattcgcgaactggagcgcgacgaaaacagccccgacctgcagcgctcggtggagcaggaagggttgacgcaacctttcgacgccttgcgcgactactggcaacagaccctgcaaccacgcctgcgcagcgcgcagcgcccggccgacgccgcgccgcaggtggcgcacttcgtgcagctgctggataagctggtgtcggatatcgacaggcaaaccgagcgccgcctgctgatggtaacgctggtgcaggccggctttatcgcgctgaccctgctgctgctgatcggcaccacctgctacctgcgccgccggttgctgcatccgtggcgacagctggtggaaatggcgctggcggtgggccgcggcgattttagccgccgcttcgcgcagcgcgggcaccaggatgaaatggcgtcgctcggcggcgcgttgaacaccatgtctgacgaactgtcggccacctacagcgggctggagcagcgcgtggccgagaagaccgcggacctgcagcaaaagaatcaggtgctgagcttcctttatcgcgccagccgcctgctgcacgccagcgagccgctgtgcagccgcctgacgccgctgctcaaccagctgcaaaccctgacgccgctgcgcgccattcaggtgcgactgtatgaaaacgacagccgggaaccgctgctgcagctgagcggcaaccagccgctgcggccggagcattgccataacccggtgtgcagcgcctgcctgaacgacagcgaccgccagcatcccgacaatccgtcgctgagctggagcctgagcgacaagctcggcgactacggcgtgatcgtggcacagcatgcgccgcaacagccgctgaacgatgagcaccgccagctgatcaacaccctggtggagcagctgaccagcgtgctggccatcgagcgtcaggtcgaccatcagcagcagctgatgctgatggaagaacgggcggcgatcgcccgcgagctgcacgactccatcgcccaatcgctttcctgcctgaaaatgcaaatcgcctgcctgcagatgcagggcgaaacgctctcttccgccagccaggtgctggtgcagcagatgcgcgaagagctgaacggcgcttatcgccagctgcgcgagctgctgaccaccttccgcctgcaactgaccgaaccgggcctgctggcggcgctgcaatcgacagtggcggagttcaatcccaaactgggcctgaccatcagcctcgattaccaactggggccacgcacggtgcccgcctaccaggccattcacctgctgcagatcgcccgcgaggcgctcagcaacatccttaagcatgccgccgccagcgaggtgagcattcaggtcatcaacaagcggggcgaagtgaccctgagcgtatgcgacaacggacgcggcctgccggccgagacgtctcgccccgaccattacggcttgatcatcatgcgcgatcgcgccaagagcctgcatggccgctgcgatattttaccgcgcagcggcggcggcaccgaggtgcgggtcagcttcacgccggataaccacgccatcgactaa

SEQ ID NO: 423511 - DNA, 1395 bp, Serratia marcescens
atgtcgcaacttgcaacgccttcatcaaagaaaaccggtgcgctgattcaggactggcgtcctgaagacagcgccttttggcagcagcgtggccatcgcatcgccacccgcaacctgtggatttccattccctgcctgctgctggccttctgcgtctggatgctgttcagcgccgtcgcggtcaacctgaacaaggtgggcttcaacttcaccaccgaccagctgttcctcctgacggcgctgccgtcggtgtcgggtgctattttacgcgtgccgtattcattcgtgatcccgctgtttggcggccgtcgctggaccgccatcagcacctgcttcctgctggtgccgtgcttgtggctggggttcgcggtgcaagacagcagcacgccgtacagcgtgttcgtcatcatttccctgctgtgcggcttcgccggcgccaactttgcctccagcatggccaacatcagcttcttcttcccaaaagcgcgtcagggcggcgcgttagggctcaacggcgggttgggaaatctgggcgtcagcgtcatgcagctggtcgcgccgctggcgatttctttcagcctgttcggcctgtttggcggcacggcgcaaaatcaggcggagggggggcagctgtggctggaaaacgccgcctgggtctgggtgcctttcctgctggtcgccaccctggcggcttggttcggcatgaacgatctggcggcggccaaggcctcgctgcgccagcaactgccggtgctcaagcgtgggcatttgtggatgctgagtttgctgtatctcgcaaccttcggttctttcatcggtttctccgccggttttgccatgctgtcgaagacgcaattcccggacatcgtgatcctgcattacgcattcttcgggccgttcctcggtgcgctggcgcggccggtcggcggcgcgctgtctgaccgtttcggcggcgtgcgggtgacgctgatcaactttgtggtgatggccgtattcgccgcgctgctgttcctgaccttgccgacggcgggtgagggcggttcgttcatcgccttctacggcatctttatggtgctgttcctcactgcggggctgggcagcgggtcgactttccaaatgatcgccgtcattttccgtaaaatcactgtcgatcgcgtgaaagcggccggcggcagcgacgagagcgcgcagcgtgaagcggtgacggactccgccgccgcattgggctttatctcggcgatcggcgccgccggcggcttcttcattccccaggcattcggcacctcgctggcgttgaccggttcgccggcgggggcaatgaaagtattcctggtgttctatatcttgtgcgtggtgatcacctgggcggtgtatggccgcaagaaaaaagcctga

SEQ ID NO: 423512 - DNA, 213 bp, Serratia marcescens
atgcccgccagccgcgtagtgaaatacctgacggtattcgcttctttgctggttatttcacatttttcatatgtgctcggcaaccaaactcgtccaccggtgatcaatgatattcagaacaacacgcgcgtggtgttgacgctgacgctgaataatccccataccaacagcccgcaaaccctgctctgcctgtaccagggcgagagcatgtag

SEQ ID NO: 423513 - DNA, 963 bp, Serratia marcescens
atggataagcgtaaagtagctattatcgggggttccggttttatcggaacacgcctggcaaaacgtctcagtgcgcgcgatgatctgacgttggtcatcgttgacaagcaacccagcgcgcattttccggcgctctatcagtatggcgatgtgacgcagccccagaccctgcaagaaccgctggcgggctgtgacgccatcattaatctggcggcggagcatcaggacaacgtcgatcctatttcgctctattatcaggtcaatgtcgaaggcgcacgccatgtctgcatgaccgcctccgccttgaatatccgccaaatcattttcacttcctcggtggccgtttacgggttcgtcgagcaggaaaccgatgaggagggacgtttcgaacccttcaaccattacggcaagtccaagctcgaagcggaatacgtttatgaagcgtggcgcaaggcggatagcgcaaacaaattgaccatcatccgcccgacggtggtattcggtgaaggcaaccgcggcaatgtgtataacctgttccgccagatcgccagcggccgattcgtgatgattggtagcggcaataatatgaagtcgatggcttacgttgaaaatattgccgcgcggctggaacatgcgttggaccagcagtcaagttatcaggtcagcaactacgtcgataaaccggactttacgatgaatcaattggtcgacgttatttcctcctcgctgggcagagaaaataagacgattcgcattccttatgtggtgggcatatgcggggcgaccgcattggatgtcgtgagtaaaataagtcgtaaaaaattcccaatcagccgcgtcagagtgcagaaattctgcgccagaacgcaatttaaaagtaatgtgcaaaataatttcgtggcgccggttgaacttgattcggcaatcgaaagaaccattaaacatgagttttctgatagataa

SEQ ID NO: 423514 - DNA, 1050 bp, Serratia marcescens
atgttatatcaactgagcgtgatatttatgctggcggtcgcctgggtgcttattgcccgccgggccgccttgacggtgggattggtggataagcccaatgcgcgcaagcaacatctgggacatattccgctggtcggcggcatcgccgtatacctgacgctgatgctgatgacgctgtggcaacccgcctggctgcccgacagcaccatctatctgctgtgcattacggcgctggtggtgttgggcgtgctggatgaccgctttgatctgcctgtggcgccgcgcgtcatggtgcagggagggatcgcgctggcgatgatgctggcggcagggatgcagctttcctcattgggctatgtctgggggcatcaggaagtgatgctcggctatggcgcgttgctgcttacgccgctggcggtatggggagcgatcaacgcctacaacatggtggatggcatcgacgggcaactgggcgccttgtcctgcgttaccttcgttgcattggccatcgtgttcggattgggcggccgggaagatctggcgctgtggtgcctgggcctgatcgctgcgctggcggcttatctgctgttcaacctgagcctgttcggcgcgcgcaacaagatctttatgggggacgccggcagcatggtgatcggcttcagcgtgctgtggctggtgttgctggcgactcaggggccgcaggcggtaatgcgcccggtcaccgcgctgtggctgatcgccattccgctgatggacatggtgaccgtgatggtgcgccgcctgttgcgccgccaaagccccttcaaagcgggccgcgatcatttgcaccacattctgatgcgtcgcgggctcaatgcgcgccaggcgctggcgatgagcaccatgctggcggtgacgctggcctgcgtcggcatttgcagcgaagtgctgcagctgcaggaaagcctgatgctggtggcgtttctgttttgtttctgcggttatttcgccatgttgcgcgaaccgcgtcaggcgacggtgttcagcgataatccgaccgtcggccgttaa

SEQ ID NO: 423515 - DNA, 1110 bp, Serratia marcescens
atgccgttggccttcacctccgcgttgttgagcgggtgtacggtggtccccggctcacatttaccgaccagcggaaaagccatcgtcgtgcagcaggacgacgatttcgatttgaatgaccaggtgcaggtttaccgcatgtcgccgatgctgctgcagaaaatgcggcgcgtagaaccggtcgcccggccgaatccggcgctggatcagcggttgcagaactatcaataccgcatcggcgtcggcgacgtgttgaacgtcaccgtctgggatcaccccgagttgaccacgccggccgggcagtaccgcagcgccagcgataccggcaactgggtgcatgcagatggcacgatcttttatccctatatcgggcgagtggcggtggtgggcaagaccgtcaccgaagtgcgcagcctgatcgccggccgtctggcgcagtacgtggaaagtccgcaggtggacgtcagcatcgccgcttttcgttcgcagaaggcctacgtgaccggcgaagtgaaaacctccggccaacaggcgatcaccaacgtgccgttgaccattctggacgcgatcaacgccgccggcggcctgacggacaacgccgactggcgcaacgtggtgctgacccatcagggcaaagagcgggctatttcgctgcaggcgctgatgcagcgtggcgacatcagccagaacgcgctgctgcagccgggcgacatcctctacatcccgcgcaatgacgaattgaaagtgttcgtgatgggcgaggtgggcaagcaagcgacgctgaagatggatcgcagcggcatgaccctgaccgaagccctcggatcttccgaagggatcagccagacggtggcggatgcgaccggggtgttcgtgatccggccgagcggcggtaaaacgccgcagcggctggcgacgctgtatcagttcgatctctccgacgccagcgcgctggcgatgggcgctgaatttcagctgcaaccttacgacgtcgtgtacgtcactgcggcgccgatcgcgcgctggaaccgtttgatcagccagctggtgccgaccatcagcagctttaacgatctcagcgaggctaccttgcgcgtgcgcaactggtaa

SEQ ID NO: 423516 - DNA, 2181 bp, Serratia marcescens
atgaaaaacaatgcgctgtccgtgatggtggccgaacaagatgaaaagctggagtgggagcggctgatcgggccgctgtgggataaccgttggcggatcgccgtcgtgaccggtttggccggcgtgctgggcgtcgcctacgccctgttggccaccccggtatatcaggccacggcggtggtgcaggtggagaagcagctgtccggcgattcgctgctgcgtgaaacgctggacagcacgatggggcaaagctcggcgacgcaggatgaggtgacgctggccaagtcacgctacgtgctcggcaaaacggtggacgccctcggcctgacggtgcgcgtcagcccggactatttcccggtgttcggcaaaggccttgcccggttgagcggtgaaaagccgccggtgctgaacatcaccacgctgacgacgccggcggacatgcagggcgaagcgctgacgctgacggtgcgcgacgggcagcattacgaattgagccatgacggcgacaaactgttcagcggcgtagtcgggcagccggtggcgcagggcggttggaacatgaccgtctcggcgctggacgcggcgccgggcgccagctttaccgtggtcaaagtcgcgcgtcaagaagcggtggacgatctgcgcaaatacctggacgtggtgccgggcggcaaggacagcggcatcatggcctttacgctgccgagcgaagatccgcagagcgccgaggcgatgctgaagaacatcaccgacaactacctgcaacagaacgtggaccgcaaaacggaagaggcgcagcgcatgctggcgttcctgcaagagcaattgccgcaaacgcaaacctcgttgaacaatgccgaaacccagctcaatcagttccgccagcaaaacgactcggtggatctgtcgctggaagccaaatcggtgctggatactcaggtgcagctcgaagcccagctcaatgagctgaccttcaaggaagcggagatctccaaactctatacccgcgcgcacccggcttaccgggcgctgctggaaaagcgcgccacgctggaggcggaaaaggcgcggctgggtaaacaggtgcagacgctaccgaaaatgcagcaggagatcctgcgcctcacccgcgacgtgcaggtggatcagcaggtttacatgcagctgatgaacaagcagcaggagctgagcatcagcaaggccggcacggtgggcaacgttcgcatcatcgacgaagcggaaaccgctatccggccgattaagccgcaaaagatgctgatcgtcttgttggcgctgctgctgggagcgggaggcgccgcctcggtggtgctgctgcgcgcggctttccatcgcggcatcaatgatatcgataccctggagaagcggggcatcaacgtctacgccacggtgccgctgtcgccgtggcaggtcaagcgcaaccgcgagcagcgccatttgctgcccaaatccggcggccggcgcttgccgatcctggcggtggccgaaccgacggatctgtcggtggaagcgatccgcagcctgcgcaccagcctgcatttcgccatgatggaggccaaaaacaacattctgatggtctccggcgccagcccggaaagcggcaagagctttaccagcaccaacctggcggtggtggtggctcaggccgggcagcgggtgctgttgatcgacgccgatatgcgcaaaggcttcctgcaccgctggttggcggatgatgggcatcagggcctgtccgacatgctggtgggcaacgtgacggcggaacaggcggtgcggaaaaccgccatcgccaacctggacttcgtgccgcgcggccaggtgccgccgaacccgtccgaactgctgatgcaccgccgtttcgccgattttctacgctgggccgggcaaaactacgatctggtgctgatcgacacgccgccgattctggcggtgacggacgcggcgatcgtcggcaatcacgcgggcacctcgctgctggtggtgcgctttgaggtgaataccgtcaagcagatcgaaaccagcatgcgccgcttcgaacagaatggggtgacgatcaagggcgtgatcctcaacggcatggtgaagaaggcggcaaccgacatgagctattacaacttcgcctacccaagccatcgtgaagaacgcccgcaggcaggggagtaa

SEQ ID NO: 423517 - DNA, 1299 bp, Serratia marcescens
gtgaaggccattatcaccaatgccctgtggctgatgctcgaacgcgtttcgctcagcctgtccggcatcttcgtctccatttacgttgcgcgctatctggggcccgcgcagtttggcgcgctcaactatctgttggcgacgatcgccatcgtggtgccactggtgcagttgggcgccgacagcatcattttcaaccgcgtcgcccgccgacagccgagcggcattcgcctgatgctggcgtcaatacgcctgcgccgccggctgttcctggtggtggcgctgccgatactgatatggagctatttcagccaaactcccgccagccaactgatgacgctgttgctgcttgtcagcgcctatttctcgattcaggacgtgtacaagatttattacgatgcccgcctgcagtcgaaacgcaatacgctgatcaacaacctggcgctgctgctgtcgatcgggctgcggctggcgctggtgagcgccgcgctgccgctggtgtggttcgcggtaccctacatcctcagcagcgccgtgccttacctggtgcgcctctggttattctgtggggaagctgcggcctcgccgcgggttacgccgcgccaggccaggcgctacggccgttacttgctaaaggtggggctgccgttggccatctccagcctgtcaatagtgatctatacccgcatcgatcaaatcatgctgggcaatctggtcggcgagcaggcggtaggctggttcagcgccgccaccacccttagccaaggctgggttttcgtgccgatggcgctgataacctcgttgatgccgggcattgccagctgccgcgatccgttggagcaggagtaccgtatccgggtgctttatctggtggtcctgggcctgtcgttgccggtgttgctgggcctgtggtggttcgcccacccggccattgcgctgctgtacggcgccgctttccaaccggccgccagcatcctggccatttgtacgctgacctcgctgttttcggtcatggggacggtttcgtaccgcagcatcgtgctgttcgccggctatcgctttatcgccatcaagatgccgttggtggctgtggcgaacgtggtgatgaatctgctgctgatcccgcgctatggcctgatcggtgcggcggtgtctacgctgctggcggaattcatttcgttctttgtgctgaacagtttattccgtggcggaaaaattacccgactgcagctgacctgtttttactgcctgccgcgtcttgtcagcaaattaaggagagagcatgttaaacatcctggttaa

SEQ ID NO: 423518 - DNA, 849 bp, Serratia marcescens
atgttaaacatcctggttaaaaacatttccaagcgcctgcccgatgcctggcaccatcaggttaaatacgcgctctatttcaagaagctgccgcacctgtcaaaaccgaccggcttcagcgaaaagatcatgcgccgcaaaatttacccgcgcagcatctacaccactttgtcggacaagttcaaggtacgtgaatttatcgccggtctgtggggcgaggagtacctggtggagctgtatgcgcatggcactgaactcagctacgacatgttcaggcaattgcccaacgcctttgtgctgaaggccaaccacggcagcggttataaccggttggtgttcgacaagcggcaggttagctacgcagagttgtacgatctcagcaacgcgtggatgcgcagcaacttttatgagcagagtcgcgaaaagcattatctggatatcgaaccctgcatcatggtggagcgcatgttgctggatggcgaacaggtgccgaacgatatcaagtttcattgtttcaacgacaatcatgaaattcgcatgttcatccaggtggattatcagcgtttcggcacccatcggcgcgatatttttgatgtcgactggaaccgcaccgaaatccgcatcagcttgcccaatgccgacgaaccgatgccgcgccctacacggctggatgaaatgatacgtttggctcgccagacggcgcagcagttctcttatgtgcgcgtggatttctaccaggtcggcgagaaggtgtatttcggtgagttgacgtttacgcctggtgcggggctaagcaagctgatgccgaaaaacattgagcaggaatggggcagttattttactgagtaa

SEQ ID NO: 423519 - DNA, 1155 bp, Serratia marcescens
atgcaaagagtcgcctccaattttcaaatgcatgccaatgccggttataatcagtcgcgggatttgatcaatcaatccatcgtattgaccttcctgctgatgtttttcgtgaaaaccttcctgacctcgggatcgttcaacagcgagctgattaataaagccgtgctggggctgaatggcctgatgttgctctatgtcggctatgcattttttatcgctacgctggcggaaaaggcggttgcgggttttttggttctgctgtttcttatgaatattgccaccgggcatggtgattatctgtttggtgcggtattcagcacggcggtgataattttatttcgtcgtatcgaaatggggcgtggcgctgaaatgtttgccatcacctttgtggtggcagggttgctggtggttattccctataccttttacactgatgggtttgtttaccttgatgaacgttatggcaacagattaacgctggggttcgataacccgaataccctggcgtattattcttttgccttgttcgccacactgctgtgcctgatcgaccatgcgaaattaacgcgtggaatgaaaaatatcgcttcgttggcggtatcggcgttaattctcccggtgctgatgtattcctattctcgcacctgttttatgctggcgttgttgatgctgctgctgttttggctggcgccgctgctgcgtgtcgcccccaacagaaaagtctgcatcgcgctgacgttggtcattgtaggctttcaattcgccagcgttatacgctgggggaacaatccggcattggacgtgctcctgaaccaggcgctgaccggccggatctggttctcctggcagatgtttcaggcggtggggctacccaatccgctgttcggcatgaatatagagccgtataagccagtcgatttcttcttcatcgccatgttttattcggccggtggcatcgcctctgtcgtcatgcttttttgttattttcacttgttgggcaatatgcgcaggctgagtcgattcatgcgctgggtggtggtggttttcctgttaacaaccttgacggaaacctattttttggtcccggtatttaacgtgtcgttattgttgctgtgccgtggaaaagaaataataaattctaagctggagggttaa

SEQ ID NO: 423520 - DNA, 906 bp, Serratia marcescens
atggatttctctatcgtgatccctatttataatagttcgcgctacctgcctaaaacgctgaagcgaattttcaacgcttgccaagggttcgactatcaggtgattttggttgatgattgctctgacgaggatgacatcaaatctatccgccagatagcggcgacaaatagcaatgtgatgctgcatgagaaaaaacagaagagcaatgcggcggtatcgcgcaacttaggcaccaagttagcgcaatcggagatcgtgtttttcctcgactccgatgattacttcacgaccaactatattattcgccgcatgaagaagcatgaagatcgccatattgacattatcttcggcaactatgcagaggtgagcggcgattcggtacgcgacttcaacttccactacaaatccggttcttccggcgaagattttctttttctggaaatgggcgatattcggtcatccaccatcagcatgcgtaaaaaaagcgatcgccgctttttatttcccgagtttctcaacaaacatcaggattggggttttctggtcaacgccaccaatttgggcgcgcaagtggcgcatgacgccggcggcggggtgtttctcgacgtggggcgctacgggcgcatgacggcgaagcttaatctggaggccagcgaccgctttatcaataccttcctcagccccagcgatcgccatatcagcggattcgcctgtaagcatctgctggcctcgctgtattcggaaaacgcccaggcgttcaattattactcgtcgcgcatcgtgcggcacagcctgagcggcaagttcaagatgatcaaatggtatggcgattgtctggcgcggttggggttgttctcggttggcggccggctgctgcgcaacgtgcgccagggattcaggagatga

SEQ ID NO: 423521 - DNA, 1056 bp, Serratia marcescens
atgcaaccacgcaagataatcatcgttatcgaaaatatggcgggcaagggcggtactgaacgggtcgccagcggtttggccaatgcgctggcgcgtttgccgggttacgaggtcgcggtgttttcgctgtttggcgagcggagcttctttccgctggcgagcgacgtccggttgcgctgcggcggtggcgattcactgttctggccgtggcggctggcgttcgcgctgcggcgtgaacgcgcggacgtgatcattaccgtttccatggggaaactgtcggtggtgatgacgcctttcctgcgtttgttctgtgcccgcagccggctgctgttgagtgagcacgtcagctttcaccagtatccgcgcgtatttaagtggctgaagttgctggtttaccggctgagcgatcgcgtgattttcctgacgcggcaagatagcgacgccatcgctcgctgggtgggggccgggaaatgtcgggtgatcgagaacgtttcgccgttccgcgcacaggcgccaacgccggcgctgcagcaaaaggtggcgctggcggtggggcgcttgagcaatcagaagggcttcgatcgtctgatcgcgctgtggcgaggggtggcggcgcaggtgccggattggcggctgctgattattggcgacggcccggagcgcgatgcgctgcggcggcagattgaagacgccgggctggcgcggcaggtgagtctgctgccggccactgccgacgtggcggactattatcgccaggccagcctgtatttgatgacctctcgctatgagggattgccgatggtgctgatcgaagccatgagtttcggcctgccgctggtggcctacgactgcaagaccggcccggccgagttgatagacgacggcgtcaacggctatctggtgcccgatgacgacgccgccgccttcagcgaaggggtgatcaaactgatgctcgatccgggtttgcgcgagcacttttctgtcgccgcgttagagaagtctcgccgtttttctcccgaacgtatttatccccagtggcaacagctcaccgagtga

SEQ ID NO: 423522 - DNA, 744 bp, Serratia marcescens
atggaaaagatatccgtaatcatgccagcctacaatgccgcgaactctatcaaagagtcgattctaggcgtgctgaaccagcgatttaccgattatcacctgtatgtgatcgatgatgcgtccaccgacgatactgccgaggtggtgcggccgtttatccacgatcgcctcacctatatacgcaatgagcataatcagggcgtggcggaaacgcgcaacatcggcattgaggcggcgaacggcgactatatcgccttctgcgacagcgatgacgtatggctccccaacaagctgtcgcgccaggcgagcattttgcaaacccgccgctacgacgtggtgtgttcccattactacaccttcgaagacgacctgaaattgatcaaaaacacccgtggcgcggaagagcttatcggctatcaggacatgttgaaaagcaactggatcggcaatctcaccggcatctacaaccaaaagcgcatcggcaaggtgtatcagcaaaaagtgggtcatgaggactatttgatgtggctggcggtgctgcagaaggcgcgtaacggcctggcctactgcattcccgaaccgctggcctgttatcgattgtctacccattcgctgtcgggcaacaaaatccgcgccgctgactggcaatggcggatttaccgtcagcatttggggctgtcttaccagaaatcctgctatctgttcgccacctatctgttcaatgccgtggtgaaaaggaaatga

SEQ ID NO: 423523 - DNA, 1869 bp, Serratia marcescens
atgagggggatgtatcagagggtggttctgggctgttgcgccttgtggggcgcttcggctctggcgcagagctgccaacccaatctgttggccaaccccggctttgagcagggtctcggcggctggcgagcgcagggcgcgcaggccgacggcgatacgcgcagcggcaatggcagtttgcgctatgacaatgcagatgccgcgcagtaccgcaccttcaaccaggcgctgcaggttgcgcccggacagacgatcgattttggcgtctggctcaagactcgcggcgtacgcgggcaaagccgcgacggcggcgccggggtttatctgcagagctttgatgcgcaggggcgctttctggagggcagctatccggctggggtgaccggcgacagcggctggcggcaggtgaacgccagctataccgtgccgccgcaggcggcgcgaatcacgtttggcgtttatctgcgcaaggggagcaccggtaccgcctggtttgacgacgcctatgcgtgtgctcgagcgcctacgccggcgttgtatcagctcggcgcgtcggcgcaggggaaggttgacacgctggtcgtcacttcgcagccgcagcgtttgcaggtcgacagcgaattgctcaatgccgaggggcaggttgttcaccgtagccgcgaccgttatcaggttgaagggcagcgccgtatcgaataccaaccgccgaccggcctggcccagggcgaataccgcctgcgtcagcaggtcaccgggcagcaatcccggtcggcaccggacagcgagctgtcttttcgcgtcgggcagcctgcggccaaagtggcgatcgacagcgaaggctttaccctgcgcgacggtcaacggcttttcccgttgggtatttacgccaacgtggctaccgatgagcatttggcgcgcatcgcatcggcgggattcaacacggtgctgaattatgattatggggagaagaaagacccttatgcctttttccgcaacgcacgccagcgcgggctgctggtcatttactccgtcaaagatcagtaccgcggcagccgtttcgctccggccgtgcgcggcggcgattatgcggcgatgacggcctggtacgtgcagcgcttgcgctctcagcccaacctgctcgcctggtacatcaacgatgagctggggccggaatatctcgataagatcgaggaaaaaaacctgcaaataaagcggcttgacggcgatcatcctaccttccaggtgttgaacaaaaccggggagttggacgctcacttcaacagcagcgacattttggcgaccgacccttacccggtggggaacgatcgcgatctgacgcgcaccacgcgttataccgaactgacggtgcaggccgcccgccaggcgcgcggggcctgggtggtgatgcaaatcatggatcatgccgcttatgacgcccgccgcaagccacatccgccgtcagaggcggaaatccgcaatcaggcctggcaggcgctgatcggcggcgccaaggggctgttgttttattcttataccgatctgttttacaagcgcaaaaccggccgcttcgaccaacgggagtttgacgccacctggcgcggtgtggccgccgtgtcgcagcaaatcgccgccttcaccccttatctgctgacgggaaaatcgacgccgctggcgggaagcaaccctcaaatgccggcgcggatgtttgttctgggcgatcgcgccttgctgctggtagccaatccttactatcgagaggaaagcacccgattgcgccttccggcgggctggcggcagcgggaagggggggcggagatcacgctggcgttgcccgccgtgggcaccgcgacgctgtggctccaacgctga

SEQ ID NO: 423524 - DNA, 3762 bp, Serratia marcescens
atgagcaaatttttagaccgtttccgctatttcaagcagttggcggagcctttttctggcgatcacggccagaccttgaacaccaaccgcgactgggaagacggctaccgcagccgttggcagcacgacaaagtggtgcgttccacccacggcgtgaactgcaccggttcctgcagttggaagatctacgtgaagaatggcctggtgacctgggaaacccagcaaaccgactacccgcgcacccgccccgatctgcccaaccatgaaccgcgcggctgcccgcgcggcgccagctactcctggtacctgtacagcgccaaccggctgaaatacccgctgatgcgcaagcgtctgctcaagctgtggcgcgaggcgaaagcgcagcacagcgatccggtcgcggcctggggctctatcgtcggcgatgcggaaaaagccaaaagctacaaggtggcgcgcggccgcggcggtttcgtccgctccagctggcaggaggtcaatgaactgatcgccgccgccaacgtctataccgccaaaaccttcggcccggaccgtatcatcggcttctcgccgatcccggcgatgtcgatggtgtcctacgccgccggcgcccgctacctgtcgctgatcggcggcgcctgcctgagcttctacgactggtattgcgatctgccgccggcctcgccgatgacctggggcgagcagaccgacgtgccggaatccgccgactggtacaactcctcctacattatcgcctggggctccaacgtgccgcagacgcgcaccccggacgcccacttctttaccgaagtgcgttataagggcaccaaaaccgtggcggtgacgccggactatgccgaagtcgccaagctgtgcgaccactggctgaatccgaagcagggcaccgacagcgcgatggcgctggcgatgggccacgtaatgctgaaagagttccatctcgatcgcgaagtcggctacttccgcgactacgtgcgccgctataccgacatgccgatgctggtgctgctggaagcgcgtgaaggcggccattacgccgccggccgcctgctgcgcgccgccgatttggtggacggactgggccaggaaaacaaccccgagtggaaaaccgtcgctatcgacagccgcagcggcgatctggtggcgccgcagggctccatcggcttccgctggggcgagaagggcaagtggaacctggaacagcgcgagggcaagtcgcaacaggaagtcgagctgcagctcagcctgttgggcatgcatgacgacgttgccgaggtgggcttcccgtacttcggcggcgccgacagtgagcatttcaacagcgtggcgctggacgagatcctgctgcacaagctgccggtgaagcgcctgcagctggcggacggcagcgaagcgctggtgaccagcgtgtacgacctgacgcttgccaactacggcctcgagcgcgggctgggcgacgccaactgcgccgccgactatgacgaggtcaaggcctacagcccggcctgggcagaacagatcaccggcgtgtcgcgccacaacattattcgcattgcccgcgagttcgcggaaaacgccgagaagacccacggccgttcgatgatcatcgtcggcgccggcgtcaaccactggtaccacatggacatgacctaccgcggcctgatcaatatgctgatcttctgcggttgcgtcggccagagcggcggcggctgggcgcactacgtcggccaggaaaaactgcggccgcaaaccggctggctgccgctggcgttcggcctcgattggcagcgcccgccgcgccacatgaacagcacctcgttcttctacaaccattccagccaatggcgctatgaaaccgtcggcaccgacgagctgctgtcgccgctggcggacaaatcgcgcttcggcggcagcctgatcgacttcaacgtgcgcgccgagcgcatgggctggctgccgtcggcgccgcagttgggcaccaacccgctgcgcctggcggagcaggcccgcgcagcgggccaatcgccggtcgagttcaccgtcgacagcctgaagaacggcacgctgggcttcgccgccgagcagccggacaatccgcagaacttcccgcgcaacctgttcgtctggcgctccaacctgctgggctcctccggcaagggccatgagtacatgctcaaatacctgttgggcaccgaaaatggcattcaggggaaagatctcggccagcagggcggcgtgatgccgcaggaagtggaatggcgcgagcagggcggcgaaggcaaactggatttggtggtgacgctcgatttccgcatgtcgagcacctgcctgtactccgacgtggtgctgccgaccgccacctggtatgaaaaagacgacatgaacacctccgacatgcacccgttcattcatccgctgtcggcggcggtcgatccggcctgggattcgaagagcgactgggagatctacaagggcatcgccaaggccttctccgaggtgtgcattggccatctgggccaggaaaccgacgtggtgaccctgcctatccagcacgactccgccgccgaactggcgcagccttacggcgtgcaggactggaagaaaggcgaatgcgatctgatccccggcaaaaccgcgccgcacatcatcgcggtggagcgcgattacccggccacctacgagcgcttcacctcgctggggccgctgctggacaaattgggcaacggcggcaagggcatcagctggaacacccaaaccgaggtcgacttcctcaagcagcttaactacgtcaaggccgacggcccggcggcggggcggccgaagatcgagagcgcgatagacgcggcggaagtgatcctgtcgctggcgccggaaaccaacggccaggtggcggtaaaagcctgggaggccctgagcaacgtcaccggccgcgatcaccgccatctggcgctgaacaaggaagacgagaaaattcgcttccgcgacattcaggcgcagccgcgcaaaatcatctcaagcccgacctggtccggtctggaagacgaacacgtttcctacaacgcctgctacaccaacgtgcacgaactgatcccgtggcgcaccctcagcggccgtcaacagctgtatcaggatcacgagtggatgcgcgccttcggtgaaagcctgctggtatatcggccgccgatcgacacccgcgccgcgcagccgttgctcaacagcaaaccgaacggcaacaaggagaaggcgctgaacttcctgacgccgcatcagaagtggggcattcactccacctacagcgacaacctgttgatgctgacgctgtcgcgcggcggcccgatcgtctggctgagcgaagacgacgccaaagatctgggcatcgcggacaacgactggatcgaggccttcaacgccaacggcgcgctgacggcgcgcgcggtggtcagccagcgtatcccggccggcatgaccatgatgtaccacgcgcaggagcgcatcgtgaacctgccgggctcggagatcaccagccagcgcggcggcatccacaactcggtgacccgcgcctgtccgaagccgacccacatgatcggcggctatgcgcagctggcctacggcttcaactactacggcaccgtcggctccaaccgcgacgagttcgtggtggtgcgcaagatgaaccgcattgattggttggacgacgaaggcaacgactacgcgcagggcagtcagcaggagaacagcaaatga

SEQ ID NO: 423525 - DNA, 1545 bp, Serratia marcescens
atgaaaattcgttcgcaagtcggcatggtgctgaatctggacaagtgcatcggttgccacacctgttcggtcacctgcaagaacgtctggaccagccgtgaaggtatggaatacgcctggttcaataacgtggaaagcaagcccggcgtcgggtatccgcacgcctgggaagatcaggaaaaatggaagggcggctggatccgtaaaatcaacggcaagctggagccgcgcatgggcaaccgcgtcggcgtgctggcgaaaatcttcgccaacccggacgtgccggcgctggacgactactacgagccgttcgattacgactaccagcatctgcacaccgccaaacagggcaagcaccagccggtggcccgcccgcgctcgctgatcaccggccagcgcatgaacaagatcgaaagcggcccgaactgggaggagatcctcggcggggaattcgaaaaacgctcgcaggacaagaatttcgacaacctgcagaaggcgatgtacggccagttcgaaaacaccttcatgatgtacctgcctcgcctgtgcgagcactgcctcaacccggcctgcgtcgccacctgcccgagcggggcgatctacaagcgcggcgaagacggcatcgtgctgatcgaccaggacaagtgccgcggctggcgcatgtgcctgaccggctgtccgtacaagaaaatctacttcaactggaagagcggcaagtccgagaagtgcatcttctgctacccgcgcatcgaagccgggcagccgacggtgtgttcggagacctgcgtgggccgcattcgctacctcggcgtgctgctgtacgatgccgaccgcatcgagcaggcggcggcggtggagaacgacaaggatctgtatcagagccagctcgacatcttcctcgatccgcatgacccgaaggtgattgctcaggcgctggcggacggcgtgccgcagggcgtcattgaagccgcccagcagtcgccggtgtacaaaatggcgatggactggaagctggcgctgccgctgcacccggaataccgcacgctgccgatggtctggtacgtgccgccgttgtcgccgattcagtccgccgccgacgccggcgagctggcgcacagcggcgtgctgccggacgtcgagagcctgcgcattccggtgcagtatctggcgaacctgctgaccgccggcgataccgaaccggtgctgctggcgctgaagcgcatgctggcgatgcgccactacaagcgggcggaaaccgtcgacggcgtggtggacaccagcgcgctggagcaggtcgggttgagcgaagcgcaggcgcaggagatgtatcgctacctggcgatcgccaactatgaagatcgcttcgtggtgccgtcgagccaccgcgagctggcgcgcgaagccttcccggaaagcaaaggctgcggtttcagcttcggcgacggctgccacggcagcgacggcaagttcaatctgttcaacagccgccgcatcgacgccatcgacgtgaccgcgaaaaccgcgcggccggaggatgcctcatga

SEQ ID NO: 423526 - DNA, 723 bp, Serratia marcescens
atgatcagcctgaaagtgatcgcccgcctgctggattacccggagcaggtcctgtttgaccatcagcaagcgctgattgaggcgctggagccggccagcgagctggatctgcatcacagcgcgcagctgattctgtttatccgccgcctgtgcgcccgcccgctgctggacgcgcaggccgactattgcgagctgttcgatcgcggccgcgccacctcgctgctgctgtttgagcacgtgcacggcgagtcgcgcgatcgcggccaggcgatggttgacctgatggcgcagtaccgcgctgccgggctggagatcgacagccgcgagttgccggatttcctgccgctgtatctggagtatctggccagccgcagcgcggcgcaggcgcgggaagggctgcaggacatcgcgccgatcctggcgctgctgggcgcgcgcctgcaacagcgcgaaagcccgtatgcggtgctgttcgatctgctgctggcgttgtccggcagcgaggtgcaggcccaggcgctggagccccaggtggcgcaagaggcgcgtgacgatacgccgcaggcgctggatgcggtgtgggaagaggagcaggtcaagttcctcggcgaacagggctgcgcctccgcccagcagacggcgcaccagcggcgcttcgccggcgcggtggcaccacagtatctggacctgacggatgcgttaaccggaaccaaaggacgctaa

SEQ ID NO: 423527 - DNA, 678 bp, Serratia marcescens
atgcaatttttgaatcagttcttcttcgatatctacccttatctggccggcgcggtattcctgatcggcagctggttgcgttacgactacgggcagtacagctggcgcgccggctccagccagatgctggataaaaagggcatgcggctggcgtccaacctgtttcacatcggcattatcggcatcttcgcgggccacttcctcggcatgctgacgccgcactggatgtatgaggccttcctgccgatcgacgtgaagcagaagctggcgatgatcgccggcggcgcctgcggcctgatgacgctgatcggcggcgcgctgttgctgaagcgccggttgaccaacccgcgggtgcgcgccaccagcagcttcgccgacatcatgatcctgacgttgctggtggtgcaagtgtgcctcggcctgctgaccattccgttctccgcccagcatatggacggcagcgaaatgatgaagctggtggcctgggcgcaggcggtggtgaccttccacgccggcgcctctgcgcacctggaaggcgtggcgattatcttcaaactgcacatggtgctgggcatgacgctgttcgtgctgttcccgttctgccgcctggtgcatatctggagtgcgccggtagagtatctgacccgccgttaccagctggtgcgcaaccgccgctga

SEQ ID NO: 423528 - DNA, 1008 bp, Serratia marcescens
atgaccacacaatgtcgctcacccgagctgttgcctctgaaaatcatcgccaccggggccgcgttgccgcccaaccgcgtggcctcctctacgctcgatgcccgcctgggaaaaccggccggctacgttgaaaaacgctcgggcatcgtttaccgctatcacgccgccgacgacgccagccaggccgagctcgccgccgccgcgctgcaagacgcgttgggccgcagcgccatcccggcagcctccattgaccttttgatctccgcctcggcgatagcggtgcaggcattgccgtgctccgccgcgcatattctcaaggttgccgggctggcaccgggtacgccgggcttcgatatcaacagcagctgcgtcagcttcatctctgcgctgcaggtggcggcggggctgttgaacgccgggacgtatcggcgtatcgccatcgtctcggcggatctcgcttcgcgcggcatcgactggcagcacgaagagtcgtcgctgatcttcggcgacggcgccgcctgcgccatcgtggagcgcggcgacggcacaggcggcatcctcgccagcctggtggaaacccatcccgccggcagcgaactgtgcgagatccgcgccggcggcacgcgccgcaacccgcgcgccggcatgtgcgagcaagacttcctgtttcatatgcagggcaaaccgctgttccgtcaggcatcggcactgattgaggactacctcgaccggctgctgagcgccagcggcttgaccctggggcagatcgccaccgtggtgccgcaccaggccagccatttgtcgctcgaacatatgcgcaaacggctgcacgtctccagcgaggcgctggtggacatctaccgccatcatggcaaccaggtggcggcctctatcccgaccgcgctgcatgccgccgtgaccagcgggcgcttcaaccccggccagccagtgatgctgatcggcaccgccgccgggctggcgctggccggcatggtgttgctgccatga

SEQ ID NO: 423529 - DNA, 1017 bp, Serratia marcescens
atgagggtgctggtgaccggggcgaccagcgggctggggcgcaacgcggcgcagtggttgctggaggccgggcatcaggtgcgcgccaccggccgcgatgagcgggccggcgaagcgttgcgtcaactgggcgccgaattttactcgcgcgatctggcgcaggccacgccgcagcagtgccgggagctggtgaccgactgcgagtgggtgtggcactgtgcggccaagtcttccccctggggcagcaaagcggaatttcaccgcatcaacgccgcggcgacggagaaactggcggaggcggccgggcgctgcggcgtgcggcgcttcgtgcatatctccacgccggcaatctacttcgattttcagccgcattacgatcttgatgagggttatcgcgcccggcgcttcgccaatcactatgccgccagcaagcacgccgccgagcagcggctgttggcgcaggcgaagatctacccgcaaaccacctatattatgctgcggccgcgcggcctgtttggcccgcacgatcgggtgatcgtgccgcggctgttgcaacagctcgaacgcgatcgcggcgtgctgcggctgcccggcggcgggcaagcgctgctggatctgacctttgcccccaacgtggtgcacgccatggagctggccagccggcagcgcggattgccgtccggcgccgtgtataacatcaccaaccaccaaccgcagcggctggcggagatgctggatgcgctgctgcgccaggagctggggctgcgttaccggctgcaggccgtgccttatccgctgcttcatacgctggccagcggcatggagctgtgggcaacgctgagcggcaaagaaccgccgctgacgcgctacagcgtggcggcggtgcatttcgacatgaccctgagccagacccgcgcgatcgaagagctgggctatcggccgcgttactcgatggtggaggggatccgcctgaccggcgagtggctgcggcagcaaggaggcatacagcatggctaa

SEQ ID NO: 423530 - DNA, 807 bp, Serratia marcescens
atggctaaggtcaccgtttttgaagtgggctattgcacgcatatcggctgcatggcgctgcgcggcgccgggttccgggtgtgtaaattcccggcgcgcgcctatctgctggaggtgggagagcgccgctggctgtgggataccggctatgcgcattattttcagcagcacacgcagtcgggggtgttcagcctttaccgccgcatgacgccggtctacttcgatcccgccgagtcgttggcgcatcaactgcgcgaagccggttacgccgaaggcgacatccaggcgctgatcgtctcgcactttcacgcggatcacatcgccgggctgcaggatttcagccgcctcgattttatttgctgcggcgaaggctggcagcaaacccgcgggctgcgcggtttcgcggcgctcaagcgcgcctttattcccggcctgatcccggcggatttcgagagccgcctgcagtttatggagtcttttccctcggtggcgttgcccgcgctgctggcgccgttcgatcgcggttacgcgctgccgggcagtgaagggcaaatcgtgctggtgccgctgccggggcatgcggccggccatatcggcgcctttatcctcaccgacgccggctggacgctgttggccagcgacgccgcctggtcgccgcagagctaccagacgctgcgcgggccttcgcgcctggccaatctggtgatggacgacgcggtggcgtacacccgcacgctggaacggcttaaccaactgtgggcgggcggccaggtcaacattttgctgtgccacgagggggacctgtga

SEQ ID NO: 423531 - DNA, 1287 bp, Serratia marcescens
gtgatccctttcatgaccctgtggcactacttccgcgcccggcgcctgcgctttggcgatcgtgcggcgctggaggcgcatcaggctcggcagctcgcgggctttgcccgccgggtgctgagcaagagcccctattttcagcgcttcagccgccggccgttcgccgaatggccgcagatggacaaggcgctgatgatggcgcagttcgaccggatgaataccgccgggctgagccgggaggcggtgctggcctgcgcgcagcgcagcgaggcggatcgcgatttcacgccaaagattgggcgctacagcgtcggattgtcgtccggcacctccgggcagcgcggcgtgtttgtcgtcagcccgcgcgaacagcaggtgtgggccggcggcatgctggcgaagatgctgccggacgggctgctggccggtgagcgtgtcgcgctgtttctgcgggcggacaataatctctatcacagcgtaaacaaccgttggctgagcctggcgttttatgatttgctggcgccgttcagcgagcatctgcccgcgctggaacggcaggcgcccagcatcatcgtggcgccggcgcaggtgctgcgcgccctggcgctggcggtgctggccgggcaggtgaagctgccggtcaaaaaagtgatttcggtcgccgaggtattggaagaacaggatcgccgcctgctgatgcaggtgtttccggcggtcggcgaagtgtatcaggccaccgaggggttcctggccgcgacctgcgcgcacggcaccctgcatctgaacgaagagtttttgcatatcgaaccgcagtggatcgacgaactgcgtttcacgccgctgatcactgatttcacccgcagcacgcagccgatcgtgcgttatcggctggacgatgtgctggtgctgcgcaaggaaccctgcccgtgcgggcagccgacgcgcgcgatcgcgcgtatcgaagggcggcgcgacgatcagctgatgctgcccgatgcgcagcggcaaccgcaggcggtgttcgccgatgcctgcagccggacgattgccaatgcgctgccgctgaccagcgattaccgcctgatccagcgcggcgagcagcggctggagttgatcgccgattgcagcccggcggcgttggcgcactgccaggcgcagctgatcgcgctgttcgctcgccagggcatcgccaccgatcggctcgaatggcggttgacggcgcaggcggtgctgccgcagttcgatcgcaagcggcggcgcatcgtgcgccaggcggaggaagcatga

SEQ ID NO: 423532 - DNA, 618 bp, Serratia marcescens
atgaaaaatacgctgttcaggctagggcacatgttgctcggctgggggacggtcggggtggtgtatagcctgaccgatcgcctgcaggggacgggaactttgttgccgccgtcggcgcttgaccgggcgatcccgttcagtccggcggccatttggctttacctgtcgttcttcctcatcgtcccggcgggctatttgctggcgccgctgcagcgaatcaaatggctgacgctggcgatgcagctgacggcgctgggcgccggggcagtttacctgctgtggccgaccaccatggcctatccgcggaacgatggcgttgggatcagcgcgcagctgctggcggcgttaacccaggtggattcgccgcagaactgcctaccttcgttgcatatggcgctgacggtgctggcggtgtgggcgttgagcgacggcgagcgcaaagtgcgaacggcgctgtggatgctgtggggcgtggcgatcgcgttctccattctgcagctgcgccgccatttgtttgtcgatctggccggcggcgcgctgctggcgctgtgcgccgggtggttggccctgcgcatcaagaccctgcgccggcgggtggttaaaggagaaatgggatga

SEQ ID NO: 423533 - DNA, 1134 bp, Serratia marcescens
atgagcgatctggcgttgccgatagtgttcatgctgttcatcgtggtggcagaggcggtggcgctgcagtgggggcgccgtgagccggtcaactggcacgatctggtgttcaacctgaactccggccatatcatgctgtggctgttccgcgggctggagatcacctgctacggctacgtggccgcgcatttcagtctggggctgctggacgcctggccgccgctgctgatgtggctgttcgccctgctggcgtgggacttcggtttctactggctgcatcgcctgcaccaccgcttccgcgtgctgtgggcggtacacgtggtgcatcaccagggggagcacttcaacctgtcgctgggggtgcgcaactcctggtattcgtcgttgacgtcgatcccgttctttttgctgctggcgctggcgggcgtgccgctgtcggtgttcgtcacggtgtcgatttttcactacagcattcagctgtttaaccacaatgcgctgacgccgaagctgggcgtgctggaaaagatcctggtcacgccggcgcaccaccgggtgcaccacgtcaaggacatggcgtattccaataagaacttcggcggcagctttatcttctgggacaagctgttcggcacgttctgcccggcgttgccgaccacgccgttcagctacggcgtcagcggcgatcggccgtccgccaacccgttctgggcgagcaatctgccgtttctgcgctatttccgtctggcatggcgcccggagccgggccggccgcgcgaccgccgttcggcgctcagcgtcttcagcggcgccatgctgctgttctcgttggtggtcggttacgtctaccaatacggttacggctacggcgacatcagctggccacaaatggcgctgctggtgctgctggcgttgggctctgtggcgctgggtggcatgacggaagggcggccgtgggcgagcgccgtctggctgctgatcgcgctgggtatgccgctgctgtttatcggctatcttggctggccgcagcgctattggcatatcgccatggccgccgtggcgctgcatgccctgtgcgtggcgctgggctgggggcgagtggccgcgccggccgccgtggaggaaccgcatggctga

SEQ ID NO: 423534 - DNA, 1083 bp, Serratia marcescens
atggctgacttattgccgccgctgcgttttcccgccgatggcgagcaggcgtttcaccgcgatctcaagcgcgcggcgcacgcctgcctggcgggcgatcatcgctatgccgatgccgcgcgattggccaaggccgcactgttgctggcgctgtgcgtcgggttttatgccctgagcctgatgcagcatcagccctgggcatttttcctctgctatttcctgttcgtggccatgggcatgctgctcaacgtcaacgtcaaccacgatgcttcgcataacgccttcttgcgcgcgccctgggccaatcgcctggtggggcggctggtgacgctgccgctgggcgtcgatccggactactggcgcacgcggcacgtggattaccaccacgtttacgccaacgtcgaacactacgatctggacaccgaagagaacggctttttccgccagacgccgttccagcgctggtggccgcatatgcgctatcagcatctgtactggccgctgatcgccgcgctctcgctgccctacatcgcgtggattttcgattggtccgatcggctcgataaaacgccgctgcgggaaaaacgcgtgctggcggggcgcggcggttggacgctgttcgtgctgtgcaaattgcttcatgtggcgctggtgctggtggtgccgctgatcctgtgccacctgcacggcatcggttggggctgggtgctgttggcttacgcgctcagccagatgtttgcctcgctgctggtggtgttcctgctgctgggcacccactgggcgcaggccgagttctatccggcgccggcgggcgacagcatgccgcacggttggtaccggcacaatttcgccaccgcctgcgactggcagcccgagccgcgctggctggagcacctgaccggcgggctgaactatcacctgacccaccacctgtttcccggctggaatcaccgccactatccggcgctggccgccgcgctggcggaagtggcgcagcggcacggcatggcatatcgctgcatcggctatcgcgaactgctggcgcagcaacagcgcttcttgcgccttatggggcagccatga

SEQ ID NO: 423535 - DNA, 1086 bp, Serratia marcescens
atgaaagcgctgcgtccgttagcctatcggcgcgacgacggcggcctgcatcgcgcgctgatgcaggccgcccagcattatctggcggccaacggcgatcaccgcttcgccgacggcggcatgctggcaaaggtggcgctgctgctggcgctgtgcggcctgtgttacgggctgagcctgcagcagcaaaacggctgggcgtttttcgcttgctacttcggttttatctttatcggcatgttcctgacggtgaacgtggtgcacgatgcctcgcataacgcgtttttccgtcggccctgggccaaccgctggctgaacgccctggtgagcgtcccgttggggctggatcccgactgttggcgcgtgcggcacgtgctgttccaccatgcccataacaatatcgaacattacgaccccgacatcgacgccaacggcgtgctgcggcaaacgccgttccagcgctggcggccctttatgcgcgcccagcgttactattggccgctggtggcggcgctgacgttcccgtactacatctggctgttcgactggctggatcgggcgggacgcacccgggtggcggcgcgcatggcacagcagggcgtgcgcggctggtgcgagtttctggcgggcaaggcggcgcacctgctgctggcgctggcgatcccgtgctggttgctgccgccggccatcggcatcgggcaaattctgctggtctatttgctgagccagatgctttcttcattgctgttcgtgatgttgatcatcggcacccactgggccaaggccaatttttaccaggcgccggcgcagggcgcgatgccgcacggctggtatcaccatgtgttcgccaccaccttcgactggctgacccggccgcgttggctgggatactggctcggcggggcgaacctgcatttgacgcatcatctgttcccgcactggagccaccgccattacccggcgctgagccgcatcatcggcgaggtagcgccgcgtttcggcatcgactaccgcctgctggagttggaggagctgttgcgcctgcagcagcgcttcctcagcgcgatggggcgcaaaccgcattag

SEQ ID NO: 423536 - DNA, 225 bp, Serratia marcescens
atgcgcagcttgccgattcggttatcgaacaaaattgatgatgatctgaacgatattgcccggcgtcatgggatggaaaaaaccgaggtaatcaaaatggcgtttgcactgattacccttgccgataagtactggatgaaacaggatggtacttctcttggcattgtacgagagaagggtgaacagcttgaagcggtgggccgggtcgtggagatcttcccatga

SEQ ID NO: 423537 - DNA, 222 bp, Serratia marcescens
atgaacatcgaaagccgtaatctgcgcgatgaggccagccaggtttatctggaacaggtgttggtcttcgacgaaatggagcgtctgcgcttggcgcgccaggtattgtgcgggatattcgcggtcagcgtgggcgtattcgccgcccacgccgctcctctaaataattggagttgcttcccgacggcaagagcgttcatccccgggagcttactcaggtaa

SEQ ID NO: 423538 - DNA, 153 bp, Serratia marcescens
atgcaagataaaacggcaaccgccgcgccggcgccctggtggaaacgcatcggttggctggtgatcatctggagcgccagcgtgctggggctgttcgtggtcgcctcgctgttccgcctgctgatgaccgcggcgggcatgaagtcgcattga

SEQ ID NO: 423539 - DNA, 1008 bp, Serratia marcescens
atgggtatcgatcttccgctgatttggtttgtgatcatcgtgttcagcaccatgatgtacgtggtgatggacggtttcgacctgggcatcggcatcctgtttccgtgggtgaaggcgagcggcgaccgcgatctgatgatgaacaccgtcgccccagtgtgggacggcaatgagacctggctggtgctgggcggtgcggcgctgttcggcgccttcccgctggcctactcggtgatcctcgacgcgctggcgatcccgctgacgctgatgctgatcgggttgattttccgcggcgtggccttcgagtttcgcttcaaggcgaagccggagaagcgccatatctgggataaagcgttcatctggggctcactgttcgccaccttcagccagggtgtggtggtgggcgccgtgatcaacggcttcccggtagaaggccgcacctacgccggcggcgcgctggactggctgacgccgttcgcgttgttctgcgggctggggctggtggtgacctacgccctgctaggctgcacctggctggtgatgaaaaccgccggtgatctgcaggcgcgcatgtatcatctggcaacgccgctgctggcgatcctgttgctggtgctggccgcggtcagtatctggacgccgatcgcgcatccggaaatcgccgcccgctggtttacgctgccgaatttgttctggctgctgccggtgccggtgctggtgctgctcagcgcctggggaattcagcgcggggtgaaacgcggcgcgcactactcgccgttcatgctgacgctgctgctggtgttcctcggcctgagcgggcttggcatcagcatctggccgcacctgatcccgccggccatcagcctttgggacgccgccgccccgccgcagagcctcggctttatgctggtgggcgcgctgttcatcatcccgatcattctggtctacaccttctggagctactacgtgttccgcggcaagatcagccatgaacacggctatcactga

SEQ ID NO: 423540 - DNA, 1401 bp, Serratia marcescens
atgctgggtcttgatgcactggaactcgccagaatacagttcgccttcaccgtgtctttccatatcatcttccccgccatcaccatcggtttagccagctatctggcggtgctggaaggattatggttgaaaacgcacaatgaagcctaccgtgagctttaccacttctggtcaaagattttcgccgtcaacttcggcatgggcgtggtgtccgggctggtgatggcctatcagttcggcaccaactggagcttcttctccgagttcgccggcagcattaccgggccgctgctgacctatgaagtgctgaccgccttcttcctcgaagccggtttcctcggcgtaatgctgttcggctggaaccgcgtcggccccggcctgcacttcttcgccacctgcatggtggcgctcggcacgctgatctccaccttctggatcctggcctccaacagctggatgcagacgccgcaggggcatgaaatcatcaacggccaggtggtgccggtcgactggctgaaagtgatcttcaacccatccttcccgtaccgcctgctgcacatgtccaccgccgccttcctctcctcggcgttcttcgtcggcgcctccgccgcctggcacctgctgcgcggccgcgataccccggcgatgcggaaaatgctgtcgatggcgatgtggatggcgctgatcgtcgcgccggtgcaggcgctgatcggcgatgcgcacggcctgaatacgctgaaacaccaaccggcgaagatcgccgccatcgaaggccattgggaaaacccgccgggcgaagccacgccgctgatcctggtcggctggccggacatgcagcgcgaagagacccgcttcaagctggaggtgccgtacctcggcagcctgatcctgacccacagcctgaccgagcaggtgccggcgctcaaatccttcccgccggaagatcgccccaactccaccgtggtgttctggtcgttccgcatcatggtcgggctgggcatgctgatgattctggcaggggtatggagcctctggctgcgttggcgcggcgggctgtatcagtcgcgtccgttcctgtacttcattttgtggatggggccttccggattgctggcgctgctggcgggctggttcaccaccgagatcggccgccagccgtgggtggtgtacggcctgctgcgcaccaaggacgcggtctccgcgcacggcgacctgcacatgagcatcagcctactggcgttcatcatcgtctactgctcggtgttcggcgtggggtattcctacatgatgcgcctgatccgcaaagggccgcagccgcatgaacaccaagaagacaataccgagggccggccggcgcgtccgctgtccgcggtcaacgacactctggacgacaggagctga

SEQ ID NO: 423541 - DNA, 1419 bp, Serratia marcescens
atgacccgatacgagcagcttgcgcagcagattagagaacagatccagaaccgggtgtggcgggcgggcgacaagctgccttcgctgcgcgagagcggcaaacgcgccggactgagcctgatgacggtggtgcagtcttaccaactgctggagagccaggggtggatcgtcgcccggccgcagtcgggctactacgtggcggcgcgcccgcagccgctgccccagccttcgcgcggcgagaagctgttgctgagcgagcaggtggacatcaacgcctttattttcgacgtgctgcaggcctgcaaggatccggatatcgtgcctttcggttcggcctttcccgacgccacgctgttcgcccagccgaagctggcgcgcgcgctgagcagcgtggcgcgcaagttcacgccgcacagttcgctggccaacctgccgccgggcaacgacgcgctgcggcggcacatcgcccaacgctatgcgctgagcggcatgcaggtcgcgccggacgaaatcgtcatcaccgccggggcgatggagtcgctcagtctcagcctgcaggcggtgacccaaccgggcgactatgtggcgatcgaatcgccggcgttttacggcgcgctgcaggcgctggaacggctgcggttaaaggcggtggcgatcgctacgcatccgcaggacggcatcgatctggacgcgctgcagcaggcggtggaccagtatccgatcaaagcctgctggctgatgacccatttccagaacccgcagggcgccaccctgccggaggccaacaagcaacggctggtgacgctgctgcgcgaacggcagatctcgctgattgaagacgacgtctacggcgaactgtacttcagcgcggaacggccgctgcccgccaaggcgctcgacagcggcggccagatcctgcactgctcgtcgttttccaaatgcctggcgccgggctttcgcgtcggctgggtggcggcggggcgttatgcgcagcagatccagcgtttgcagctgatgagcaccgtttccaccagcgtgccgacccagatggcgctggcggattatctgctgcacggcggctacgatacccatctgcggcggttgcggcgcctgctggcccagcgccaaagcgcgatgcgtcaggcgatcgcccaccatttcccgccgacggtgaaggtcagccagcccgacggcggctacttcctgtggctggagctggatccggcgctgtcgtcgatggagctctaccggcgcgcgctttcccggggcatcagcatcgcgccggggcgcatgttcaccaccggcgaccatttcaaccactgcttccgtctcaacgcctcttttgaatggaacgaccgctttgaagaggcgatcaaaaccttagccaagctcatccgggggctagcggcggcaggctga

SEQ ID NO: 423542 - DNA, 975 bp, Serratia marcescens
atgcccaagaaaaccgtcgatctcagccagccgcacgcccaacacgacatccgcgcgtttctcgacgcgctgaatgccggcggcggtaaacctatggaacagatgaagcccaaagaggcgcgcagggtgttggaggacacgcaacgcagcgtcgaggtgccgctgcgcgaggtcgatatcagcgagaaaaccattcacgtagaaggtcaggatattctgctgcagctggtgcggccggccagggtcaaagaggcgctgccggtattcatgttcttccacggcggtggctgggtgctgggcgattttcccacccatgaacggctggtgcgcgatctggtgcacagctcaggtgcggcggcggtgttcgtcaattatccccgctcaccggaggtgcgctaccctgaggcgatcaacctggcttacgccgccaccgaatgggtggccgagtacggcgagaagatcaacgtcgacggctcgcggctggcggtggtcggcaacagcgccggcggcaatatggcggcggtggtcagcctgatggccaaacagaaaggcataccggcgctgcgctgccagatcctgctgtggcccgtcacccgcgcccagtttgataccgattcctatcatcagtttgccgaaggccatttcctgacccgcaacatgatgaagtggttttgggacagctacgcgcccgataaggcgcagcgcaaagatatctacgcctcgccgctcaacgccacgcaggaccagctgcgggggttgccgccggcgctggtgcaaaccgccgagctggacgtgctgcgcgatgagggcgaagcctacgcgcgtctgctcgatgccgccggcgtcgaggtcacctccacccgctataacgggctgatccacgactacggcctgttgaatccgctcgcccacgtcccggcggtgcattcggcgatccaccaggccgggcgcgcgttgaagcactatctgtcctga

SEQ ID NO: 423543 - DNA, 1215 bp, Serratia marcescens
atggaacagccaatcgcagttacccgccagtctttcgatgactggatggtcccggtttatgcccctgccgattttattctggtgcggggagaaggctcgcaggtgtgggatcagcagggtaagtcttacatcgacttcgccggcggcatcgcggttaacgcgttggggcatgcgcacccggcggtcaaggcggcgctggtggagcaggcgggcaaactgtggcatctgggcaatggctataccaacgaaccggtgctgcgcctggccaaaaaattgatcgacgccaccttcgccgacaaggtgttcttctgcaactcgggcgccgaagccaacgaagcggcgctgaaactggcgcgcaagcatgcgcacgaccagcacggcgccggtaaagatcagattgtggcgttcaacaacgcgttccacggccgcacgctgtttaccgtgtccgccggcggccagccaaaatactcgcaggactttgcgccgttgccgggcggcatcacccatacgccgtacaacgatctggccgcggcggccgagcttatcaacgatcgcacctgtgcggtgatcgtcgagccgatccagggcgagggcggcgtgctgccggcggaagccagtttcctgcaggggctgcgtgagctgtgcgatcgccataatgcgctgctgatcttcgacgaagtgcagaccggcgtcggccgcaccggccatctgtatgcctacatgcagtacggcgtggtgccggacgtgctgaccaccgccaaagcgctgggcggcggtttcccgatcggtgccatgctgaccaccgatgcgctggcgaagacgctgggcgtcggcacccacggcactacctacggcggcaacccgctggcgacggcggtggcggggacggtgttctccatcatcaacaccccggaagtactggagggcgtcaaacagcgtcaccagtggtttatcgacgggttgaacgacatcaaccgccagtacccgatcttcgccgacattcgcggcggcggtttgctgatcggctgccaattgacgaaagactatgccggcaaagcgaagcagatcacccaactggccaacgaagaaggcgttatcgcgctgatcgccggcccggacgtggtgcgtttcacgccgtcgctgatcatccctgagcaggatgtgaaagaggggctggcgcgattcgcgcgcgccgtggcgcgcatttgcagctaa

SEQ ID NO: 423544 - DNA, 1035 bp, Serratia marcescens
atgatgattattcgccctatagagcgtcgcgatctggcggatttattgacgctggccggtaaatccggcatcggtctcacttcactgccgcaaaatgaagataccctgtcggcacgcattgagcgggcgttaaaaacctggcaaggcgaacttccgcaaagtgaccagtgttatctgttcgtgttggaagacaacgagcgccgtcaggtggtcggggtctgcgcgatcgaagtggccgtcggcctggcggaaccctggtacagcttccgcgtcggcacgcaggtgcacgcttccaaacagctgaacgtctataaatcggtgccgacgctgttcctcagcaacgatcataccggccattcggagctgtgcacgctgttcctcgatccggattatcgtcacggcgagaacggcaagctgctgtcgaaggtgcgtttcctgtttattgccgcgttccgcgaacgtttctcccggcgcctgatcgccgagatgcgcggtttctccgatgaaaatggccgatcgccgttctgggagagcgtcgggcgccatttcttctccatcgagttcgccaaggcggactacctgagcggcaccgggcaaaaggcgtttatcgccgaactgatgccgaaacacccgttgtatgtcgatttcctggccgaagacgcgcagaaagtgatcggcgaagtgcatccgcaaaccctgccggcgcgccgattgctggaggcggaaggcctgagctatcagggatacgtcgatatcttcgacggcggcccgacgctggaagccgagatcgaccacatccgcgcggtgaagcagagccgcctggtgaaagtggtgctggatgacacgccgatgcgcgccgatgcgccggtgcatctggtggccaacgacaactatcagcactaccgcgcactgttggtcaatgccgatctgtatgacgaccgcctgcatatcaacgccgccaccgccgcggcgctgggcgtcgaacagggcagcccggtgcgggtgctcccccttattgcacaggagaaagcatga

SEQ ID NO: 423545 - DNA, 1476 bp, Serratia marcescens
atgatgtctcatcctgcactgttgattaacggcgtctggcggcagggccgcggtgccgagttcggcaaggccgatccggtcggcaaccagccgctgtggcgcgccaacgccgccgataccgacgacgtcgccgccgcctgcgaagccgcgcgcgccgcgttcccggcctgggcgcgtacgccgttcgagcagcgcgaacagctggtaaaacgcttcgccgccttgctggaagaacacaagcagtcgctggcggaaaccatcagccgcgagaccggcaaaccgcgctgggaaacgctgaccgaaattcaggcgatgatcggcaaggtgggcatttcgctgcaggcctatcagacgcgtaccggctttagccagacggcgatggccgacggcgcttcggtgctgcgccatcgtccgcacggcgtgctggcggtgttcgggccttataacttccccggccatctgccgaacggccatatcgtgccggcgctgttggccggcaactgcgtggtattcaaaccgagcgagctgacgccgctgaccgccgaggagaccctgaagctgtggctgcaggccggcctgccggacggggtgatcaacctggtgcaaggcggccgcgagaccggcgaagcgctggcggccagtgcggatatcgacggcctgctgttcaccggcagcgccggcaccggctatcacctgcatcgccaattggcggggcagccggagaagatcctggcgttggagatgggcggcaacaacgcgctgatcgtcgacggttttgacgatcgcgatgcggcggtcaacctggctatccaatcggcgtttatctccgccggccaacgctgcacctgttcacgccgtattctggtgaagcagggggcggaaggcgacgcctttatcgaacgtttggtccaggtggcgggcgaactgcgcgtcggccgctgggatgccgaaccgcagccgttcatgggcggggtggtgtcggcagccgcggcggaaaacatgctgaacgcgcagcagcgcttgctggcgctgggcggcaaatcgctgctgagcatgcgcctgctggaaccgggcagttcgctgctcagcccgggcatcgtcgatctgaccggcgtggccggcgtaccggacgaagagtatttcggccccttgaccaccatcgtgcgttaccgcgatttcgacgaagcgctacagctcgccaaccggacgcgctacggcctgtcggtggggctggtatcgccgcagcgcgcgctgttcgagcgcttgctgctggaagcgcgcgccggcatcgtcaactggaacaagccgctgaccggggcgtccagcgcggcgccattcggtggcgtgggggcctccggcaaccatcgcccaagcgccttctatgcggcggactattgcgcctggccgatggcttcgctggaaagcgaaagcctgtcgctgccggcgacgctctcgccgggcttgttgttccgttaa

SEQ ID NO: 423546 - DNA, 1341 bp, Serratia marcescens
atgtcaggatatgaagtcaatttcgacggtttggtggggccgacgcaccactatgccgggctgtcgttcggcaatgaggcctcgacgcagcaccaaaacagcgtatctaacccgaagctggcggcgaaacaaggtttgctgaaaatgaaggcgctggccgatctcggtttccagcaaggggtattgccgccgcaggagcggccgcacttgccgatgctgcggcgcctggggttcagcggcagcgatgaggcggtgctggcgcaggcgatgcgtcagtcgccgcgcctgctgtcggcgctcagctcggcgtcgtgcatgtggaccgccaatgcggctacggtgtcgccttcggcggacagcgccgacggcaaggtgcatttcaccgccgccaacctgaacaacaaattccaccgcgccatcgaagcggaaaccaccaccgccgtattgcgggcgatgttcagcgacgatcggcatttcgcccaccatgaggcgctgccgcaggtggcgttgttcggcgacgaaggggccgccaaccacaaccgtttgggcggcgactacgccaagcgcagcgtgcaggtgttcgtctacggtcggcaggagttcggcggcgaaacggcgccggcgcgttatccggcgcgccagacgcgcgaagccggtgaggcgatcgctcgcctacatcagttggacgagcagcatacggtcttcgtgcagcaaaacccggcggtgatcgatcagggcgtgttccataacgacgtgattgcggtcagcaaccaaaacgtacttttccaccaccagcaggcgtttcaccgccagcagcaggcgctggatgaagtgcgccgcaagatggcgacgctggacagcgagctggtggcgatcgaggtgccgaccgagcgcgtttcggtggcggacgcggtggcgacctacctgttcaatagccaaattcttaccaaaccgaacggcaggatgatgatcgtggtgccggaagagtcgcgtcagcacgccggcgtgtggcgttatctgaacgacatgatcggcagcggcgacccgatcgatgaaatccgcgtgttcgacctgcgcgaaagcatgcgcaacggcggcggcccggcctgcctgcggttgcgggtggcgctcaacgaacaagagttgagagcggtcaatccgcgcgtgatgatgaacgagcggttgtttgcgacgctgaacgaatgggtggatcgtcattaccgcgatcgcctgacgcaggatgacctggccgatccgctgctgctgcgcgaagggcgcgaggcgctggatgcgctgacgtcgatcctcggcctcggctccatctatccattccaacgctaa

SEQ ID NO: 423547 - DNA, 984 bp, Serratia marcescens
atgatcgatctactgcccctgacgctggaagggaacgaacccgtcgaatggcagggtgaaacaccgcagctgcgctggcgctggcagggggaaggggtgctggagctcacgccgcggcagcctcaccgccaggcgatggtgatgtcggcgggcgtgcacggcaacgaaaccgcgccgattgaactgctcaatcagctggtcggcgatctgctggctggccggttgccgctgaaggtgcggctgttggtggtgctgggtaacccggcggcgatgcgggccggcaagcgttatctgcacagcgatatgaaccgcatgttcggcggccgctaccgcaacttcgccgccagcggcgaaaccgtgcgcgcgcagcagttggagcgtgcgctcgccgcctttttcgatggcgagcaggcggcgcgtttccactacgatttgcacaccgccatccgtgaatcgcgtttgccgcgcttcggcattctgcccttccagaaacgcccgtacagcgagccgatgttgcagctgctggatgccgccgatctggatgcgctggtggtgcacagcgcgccgggcggtacctttagccactactccagcgaacatctcaatgcggcgagctgtacgctcgagttgggcaaggcgcggccgttcggcagtaacgatctgcagcaattcgccgccatcgatcgcgcgctgcgggcggcggtcagcgaagggccgccgccggtgcgtgcgggcgccgagattcgggttttccgtgtgatgcactcgttgatcaagcacagcgaagatttcaagctgcacctggacgatgacacggccaacttcaccgagctgaaaccggggatgttgctgtgcgagcagccgcaggaggagtatcgcgtgggccaggagggggcgtggatactgttccctaaccccggtgtggcgttgggcctgcgtgccggtatgttgttgagcgaagtttcccgttctacgctgtattga

SEQ ID NO: 423548 - DNA, 1083 bp, Serratia marcescens
atgatgaaacgcagtgtattagccttagctgtcgccctcggggcgatcacctccttcgccaacgcggctgaaatctacaataaggatggcaataaactcgacctgtacggccgtgttaacgccaagcattatttcagcgacagtaaatccaacgacggtgatatgacctatgttcgcctgggcttcaaaggcgaaacgcaaatcaatgatcagttgaccgggtacggccagtgggaatacaacgtccaggccaatcatgacgaagcgcagggcactaccggcaccaaaacgcgtctgggcttcgcggggctgaaattcggcaactacggttctttcgactacggccgcaactatggtgtggtctatgacgccgaggcttacaccgacatgctgccggagttcggcggcgactcctacagctataccgataactttatgaccgcccgttccaacggtttggccacctaccgcaaccgtgatttcttcggtttggtggacggcctgaatctggcggtgcagtaccagggtaaaaacgatggcgacggccgcagcgtgaccaagcaaaacggcgacggttacggcctgtctctggactatcaggacatcggcggttccggcatcggcgtagcggcggcgttctccgactccaaccgcaccagcgctcaaaaagcgctgcagtacggtaaaggcgacagcgccaccgcatggaccactgcggtgaaatacgatgccaaccaggtttacctggctgcgatgtatgccgaaacccgcaacatgacgccgatcagcgtcaacggcacttccggtttcgccaataaaacgcaaaacttcgaagttgtggcccagtatcaattcgagaacggtctgcgtccttccgtggcttacgtgcagtccaaaggcaaggatatcgaagggatcggtgatgccgacctggtgaagtacgtggaagtgggggcgacttactacttcaacaaaaatatgtacacctacgttgattaccaaatcaaccagctgagcgacgataacaaactgaaactggccaacgatgatattgttgccgtcagcctgacgtatcgcttctaa

SEQ ID NO: 423549 - DNA, 225 bp, Serratia marcescens
atgccagcatcggctcactccaacgagcaatatgaaactctgctgcacgacgtcagcctggcgttaggcgacgcagtgttgcagttaatccaaaaccataaaaaggtctccggcggcaacattctttcacagctggtgaacgaaatagagcgtgagcaggatcagcaacgtttcgccgcgctgcgttccgccattgagctggtcgggctggcgcccaaaggctga

SEQ ID NO: 423550 - DNA, 192 bp, Serratia marcescens
atgtacgcattggtgatgtttgtctgttatctggatggtggctgcagtgaaatggtggtcgacatattgcgcgacgagccgcaatgcctggtcgcgatgaaggaacagaacttgcgacacgccggctgttatcccatggaagagtttatcgacggcttctggttgccagccagcgaatattcggatttttaa

SEQ ID NO: 423551 - DNA, 447 bp, Serratia marcescens
atgggcttgtttaacttcgtcaaagaagcgggtgaaaaactgtgggacacagtcaccggtaatgcctccgccgaagatcaaggcgccaaactcaaggagcatctcaataagagcggcttgccggacaccgacaaagtcaatgtgcaggtgatcgatggtaaagccgtagtgaccggcgacgccgtcagccaggagttaaaagagaagatcctggtggctgtcggcaacgtggcgggcatcagcggcgtggaggataaggtggcggtgacgcaacctgacgccgagagccgcttctataccgtgaagaagggcgatacgctgagcgccatctctaaagagatgtacggcaacgccaatcagtacaacaagattttcgaagccaacaagccgatgctgtcgagcccggacaagatttatcctgggcaggtgttgcgtatcccgcaataa

SEQ ID NO: 423552 - DNA, 165 bp, Serratia marcescens
atggagcctaatctccatgatgagaccaaactgctggcgattatcggcctgttggtgtccgtgctgctggtggtatcaattctctttggcgtgacctatttctccgatctcaggcacgcgcaggacgatatagacatcatgagctgctatatcaaagcgtcctga

SEQ ID NO: 423553 - DNA, 942 bp, Serratia marcescens
atgagtcagtcacgtcctacgctctcttcacctacacgcgaatgccctgtcgttgacggcgtgcgccagatacaacgtattgccgtgcgtaacgcagaagtggggggcatcccgatcaaccgtgcgttaccaacccgggagcggcgcaccgtcggcgcctggtgttttctcgatcacgccgggccgacggtattcaacggcacctcgcccggcatggatgtggggccgcatccgcacatcgggctgcaaacgttcacctggatgatagagggggaggtgctgcaccgagacagcctcggcagtgagcaggtgattcgcccgggccaggttaatctgatgaccgcagggcgcggcattgcgcataccgaacagtcggtgggtgagcaacggcgattgcatgccgcacaattatggatcgcgctgccggccgaacatgccgacatggcgccacgcttcgatcattatcctgacttgccgcaatggcagaataacggcgtgaatcaccgtttgctggttggggaatttggcgcttaccgttcaccggtgtttacgctttcgccattaatcgccattgacctggaatggcaggaagcggcgaggatcgaattgccgctgcgcgatgatgatgaaatcggctttttgccccttattggtgcatttgaacttaatggtgaaactttttcacctgatgagttcgcctatttgggcatgaagaataactctattgggttaaatgcgcaaaagggcagccggggattattaatcggtggggcgccattaaacgaagagatccttatctggtggaatttcgttggccatagcaaggctgaaattactcgggctcagcatgattgggaacaaggggcgccgcgcttcccggcggttagcggttattctggtgagcgcatgaccgcgccacgcctgccctggagcgatgtttga

SEQ ID NO: 423554 - DNA, 354 bp, Serratia marcescens
atgacgctctttgccgatattttgctgctgctcatcgcagcgctccatctttatatcctggtgctggaaatgttcctgtggcgtacgccactcggcaggcgcgcattcggcacgacggcggagttcgccgccgccacccgggtgctggccgccaatcaggggttgtacaacggctttctggcggtggggttggcatggagctactggcgtggggatatggcgctgcagctgttctttctcgggtgcgtgttggcggccggcgtgttcggcgggctgaccgccagccgcaaaattctgtgggtgcaggcgctgccggccgcgatcgcgatactggcggcatgggcggcgcgttaa

SEQ ID NO: 423555 - DNA, 387 bp, Serratia marcescens
atgatacaagaacaccacctctcattggtctgcgccctcagcaaatgggtcgaaactcacctcggacgagtgatccatctcgaagagctggccgagtactccggctactcgctgtggcacatgcagaagctgttcaaagaagcgacgggaatttcgctcggcaaatacattcgcgaacgccgtctggccggcgcggtctaccaactgcgcagcagtgaagcgtcgatcttcgatattgccctggactttggcttcggttcacagtctcacttcacgtacatgttcagaaagcgttttaatatcacgccctatgatttccgccaggatttgagcgtcgatctgcatatcgatccgccgctgcacgtcattcaccaaaaatccgcctga

SEQ ID NO: 423556 - DNA, 213 bp, Serratia marcescens
atggcgaatcacaatgtgaaatcctgggcgacagtgcgtgaaacttcggtggagatcgccgaagccatttttgaactggcagggaacgacgaagtgttggcgcagaaaatctgggaagaaggcagcgacgaagcgctggagaaagcctttgccaaaaccaccgccgaccagctttattggggagaggaaaccgtcgagcggaaaaacgtttga

SEQ ID NO: 423557 - DNA, 240 bp, Serratia marcescens
atgtctgacatgctgagcaacgagcaggaattggcttccgatctggtcgcttgccaactggtcatcaaacagattctggacgttatcgacgtgattgcgccgaccgaagtgcgcgacaagatggcgggtcagctcaaaagcatcgatttctccacgcaccctgctggcgccgatccggtgacccgccgagcgattgacaaggcgattgcgctgatcgagatgaagtttacccgcaactga

SEQ ID NO: 423558 - DNA, 234 bp, Serratia marcescens
atgagtaaattgattaagtgggtactggtgttggctgtcatttacggcggctttttgatctcgggctacggcgtgctgatcggcagcaacaaaaacgttggcgggttgggattgcagtgcaaatacctgacggcgcgtaacgtggcgatcgcccagtacgtgaatggcgacaacggtttcatcggcgtagccgactgcccgctgttcaagaaaatcgaaacggtggtggattaa

SEQ ID NO: 423559 - DNA, 276 bp, Serratia marcescens
atgtacgatttaggttttggccagaacggcctgttgtcgctggccctcgccgccgtggcgttgctggccgggctgtgggcttggttcctggtgaaccgcgccagcgtgcgcgccaacgagcagattcgcctgctgcaagagattgccgagcaacagcgtcagcaaacggcgctgttgaagcgtatggcgcaccgcgctggcactgacggcgctgctgcagatgacgacgatctcagccccgcgctggatttcaaaggttttatccccgaacgttga

SEQ ID NO: 423560 - DNA, 408 bp, Serratia marcescens
atgttgaccggcctcaaccatctgacgcttgccgtcagcgatctcgatcgcagcttcgatttttatcgtcatctgttgggttttaccccgcacgcccgctggcaaggcggcgcctatctttcattggggtcattgtggctatgcctgtcgctggatgaaaggcgcacgcaacaacacgagcgcgattacacccattacgccttcagcgtagcgccggaacacattgaacaggccagccagcggttgcgccaggccggcgtcgaagagtggaaaagcaatcgcagcgaaggcgaatcgctctattttctcgatcctgatgggcatcaattggagatccatgccggcgatttggccagccgcctggcggcatgccgggaaaaaccttatcagggcatggtgttttactga

SEQ ID NO: 423561 - DNA, 303 bp, Serratia marcescens
atgattaaatggtacgaagaaagcgatgccgaagtgaaccgcagcatcgcgctgctgaccggagagaacccggacaagtggtatccctacggtggtgtgaaaggtaaagattactgcaagaatccctccgatgcctggccgatcatttgcgccaacaaaatcagtctgaaccccgataaccaaagcgacagcccgcaatggcaggcgcgcatgagcacccagggcggtgaatggcaggcggacagcgccagcccgctgcgcgcggcgatgatctgcttcctgatgagccgacaggctaactga

SEQ ID NO: 423562 - DNA, 237 bp, Serratia marcescens
atgaagcgcattatcaaaggtgataaaaacttgtctcatctggtgattgcccatgcggcgatcgatcgtcatgccgaaagcttcggccagcgccgtcagggctggccctcgacctacctgataaaatatcaaaacgatcgcgtggcggtggaagtggtcacgcgtagccaatcctatgtcgccacgctgatgatcggcgcgcgcaacctgaccaaactgtgcggtatgcctggctga

SEQ ID NO: 423563 - DNA, 1362 bp, Serratia marcescens
atgggcggtcagcatcaggatactccgctaaaacgcggcttaaaaaacagacatatacagcttattgccctcgggggcgccatcggtaccggtttatttctcggcattgcgcaaaccattaaaatggccggccccgccgtgctgttgggttacgccatcggtggttttatcgcgtttttaatcatgcgccagctgggcgaaatggtggtggaggagccggtcgccggatcgttcagccactttgcctataaatattggggcgacttcgccggctttctttccggctggaactattgggcgatgttcattctggtcggcatggcggaattgaccgctgtcggcatctacattcagtactggtggccggagatccccacctgggcctccgccgcgctgtttttcgtgctgatcaacctgattaacctggtgaacgtgcgcctgtacggcgaaaccgagttttggttcgccatcatcaaagtggtggcgattgtcggcatgatcgtgttcggcgcctggctgttggtcagcggcaacggcgggccgcaggccagcatcaccaacctgtggcagcagggaggctttatgccgcacggcttctccgggctggtgatggcgatggcggtgatcatgttctcgttcggcggcctggaaatggtcggcatcaccgcggcggaagccgccgatccgcgccgcagcattcccaaagccaccaatcaggtggtgtaccgcattctgatcttctatatcggctcgctgaccgtgctgctgtcgctctatccgtgggggcaagtggtggaggggggcagcccgttcgtgctgattttccatgccctgaacagcaatctggtggcgaccgtgctcaacgtggtggtgctgaccgccgcgctgtcggtctacaacagcggcgtttatgccaacagccgcatgttgttcgggctggccagccagggcaatgcgccgcaggcgctgacgcgggttaacaagcgcggcgtgccggtgctgtccattgcgctatcggcgttgattacctcgatcggcgtgctgattaactacctgatgcccggcaaggcgtttgagctgctgatggcgctggtggtttcaacgttggtgatcaactgggtgatgatctgcctggcgcacctgaaattccgcgccgccaagaaccgccagggcgtcattcccagctttaaggcgctgtggtacccgttcggcaactacctgtgcctggcgttcctcagcttgattctggtgattatgtatttcagcgaagggatccgcatttcggtgttgctgatgccggtgtggattgcggtgctgtggtgcgggtttatgctgacgcgccgtaaaggcgcaaagcgttaa

SEQ ID NO: 423564 - DNA, 291 bp, Serratia marcescens
atgagtcgttctacatcccgcaaatcaggcatcggcctggggcgccgtattcgcagcgcgctgctggcgcagaagcaatactggaaaatgtatttcgccatgaagctgcgccgtctgcgcgtacctgccccgctggtggtgctgggcggttcgctgctcggattcttcatgctgaccctgctgatgctcagcgtggtcgccatcgacgtgatcagcaccctgctgctgctgtgtcggaaactgctggggcgggggcatagtgaggggcgcgcctttatgccgcgcggctaa

SEQ ID NO: 423565 - DNA, 1035 bp, Serratia marcescens
atgaagagaatcaaccgttattacgacgcggccaaggcgcatcacacgccggagggatttcgcaacccggaaccctcgcagcgccaggagggcgacctgcagcgttggcaggatgaacgcaagcggcaggggctgcccaggccgccgcagcagggctacgcgcaatttaccgagcgttggtggcaacccgccgatctcagcggcggcgatgacagcatttggtggcttggacatgcgtcaatgctgctgcggctgggcgggcgctatatcctgatcgacccggtgttgtctgaacgcgcatcgccgctgagcttctacggcccgaagcgcagaacgccgacgccgctgacggtggggcaactgccggcggtggatgcggtgctgatctcccataatcattatgatcatctcgacaggcgcacggtgcggcagctggcgcggcgctttccacaggccgagtttatcgtgccgctcggattgaagcgctggtttcgccgctatcggctgaaggtgcatgaactggactggtggcagagcctgtcgctgggcgaactgacggtctacgccacgccggcgcggcattggagcatgcgcacgctgtgggatcgcaatcgctcgttgtggtgcggctgggtgatccaccatccggcgctgcggttttatttttccggcgacagcggctattcggaacggctggcggagatcggtcaacggctggggccgttcgacgtggcggcgctgccgattggcgcctatgcgccgcgctggttcatgcaggagcagcatatggatccgcagcagtcggtgacgttgtatcgcgagctgaatcagccgcgcgccattcccatccattggggggtattcgaattggcggacgaatcgctcgacgagccgccgcagcagttgaacctggcgctgagcgaggcggggctggatcagcatcaattccacccgttgaagattggcgagcgcatcgcgttgcaggactcgcagcaagcgttctctcttcgccctgcggtaccggggaaagaataa

SEQ ID NO: 423566 - DNA, 210 bp, Serratia marcescens
atggcaaagatcaaaggtcaagttaagtggttcaacgagtctaaaggtttcggtttcatcaccccggctgacggcagcaaagacgtgttcgtacacttctctgcaatccagggtaacggcttcaaaaccctggctgaaggccagaacgttgagttcgaaatccaagatggccagaaaggcccatctgcagtaaacgttactgctatctaa

SEQ ID NO: 423567 - DNA, 717 bp, Serratia marcescens
atgagcgatcgttccgcgctgctcgatgcggtgccccacattcagcacggcttcggcagcaaactcgcgctgctgccggggcatctgctgccctacagcgccacgctgccggaaaagaagcaggtgcacggcacccgtatcgtcgaggtgctgcaaccggcgcaggcgtgcggtgaagccgacggcttctacacccgccagcccggcattctgctcggcgtgctgacggcggactgtctgccggtgctgttcagccgccgcgacggcggcgccatcgccgcggttcatgccggctggcgcgggttgctggacggcattctggaacagatggcagcgcgcattcgccaggacggcgacaccgccgactgggtggtctctatcggccccgccgccggcgcatgctgctacgaagtcgacgaagcgctggtggagaattttaaacagcgcctgccgctgcccgccacgctgatcagcccgcattaccggcatctggatttggccgcgattgccgaacacaagctggcggcgctgggcttcgccgccgttgaccgcgccggcagttgcaccatctgcacgccggacgtcgacccgcagcggccgcagcgcttcaagtacaccagctatcgccgcaacagccatcggcgcgcgcaggatccgacgcatccggggatcaaaggccgcaaccagtatgccggcatcatcatcgccgccggatga

SEQ ID NO: 423568 - DNA, 819 bp, Serratia marcescens
atgtcctatcaatgccctctgtgtcatcaaccgctgcatttctcatcgcaacgctggcgttgcgacggcaatcatcagttcgatcaagccaaagaaggttacgtcaatctgctgccggtacagcacaagcgatcgaagcagccgggagacagcgcggaaatgatgcaggcgcggcgcgcgtttctcgacggcggtttttatcagccgctgcagcagcaggtggcagagtggctggatttggcgctggcggccgatgcaggcgcgttattggatataggctgtggggaagggtattacaccgccgccgtggccgcacggctggcgcaggcgcgcaatatggcggtctatgggctggacgtcgccaaggtagcgatccgctacgctgccaagcgttatcccgcggtctcgttctgcgtcgcctccagccatcgcctgccgttcgccgacgcggcgctggatgcggtgttgcgcatctatgcgccctgcaaggcggcggagctggcgcgagtggtgaagccgggcggcgtggtggtgacggtttcgccgggcccgcgtcatctgtaccagctgaaagagcaggtgtaccagcaggcgcagctgcatgccgaacaggacgaacagttcgatggattcgagtgtgagcgtaaagaggcattggcctatacgatggccctgccgggcgcacaggctgctaacctgctgcagatgacgccgttcgcctggcgtgctacgccggaggtgcagctgcggctggcgcacggcggcgagtttgagtgcgaaacggatttcgtgctggcgttgtaccggcgccgtgcttaa

SEQ ID NO: 423569 - DNA, 570 bp, Serratia marcescens
atgaacctttcagcaacactcattctcgctttcggcatgtccatggatgctttcgccgcttcgatcggcaaaggcgccagcctgcatcaaccccgtttccgcgaagcgatccgcaccggcctgatcttcggcgtggtcgaagcgatcaccccgctcatcggttgggccatcggcctgttcgccagccaatacatcatggaatgggatcactgggtcgccttctcgctgctgttcattctcggcatgcgcatgattgtcgaaggggtgcgcaacaagcccgatgaagaagagaaggtcaaacgccacggcttctggatcttggtggctaccgctatcgccaccagcctcgacgccatggctatcggcgtcggcctggccttcctgcaggtcaatatcgtgcacaccgccatggccatcggttgcgccaccatgatcatggcgacgctgggcatgatgatcggccgctttatcggcccgctgctgggcaaacgcgccgagatcctcggcggcgtggtgctgatcggtatcggcgtcaacattctgctagagcatcttggctacctggcctga

SEQ ID NO: 423570 - DNA, 168 bp, Serratia marcescens
atggtctcgccaaccttacctggctgcccgcaccacgtttcatacggcgaaacgagtatgttgatacgggcgtttctggcgttttattctccagaaaccggctactccccaatgacggcgcaaccataccatattatttccgccaccgacaactttattctggcgtga

SEQ ID NO: 423571 - DNA, 459 bp, Serratia marcescens
atgtcactgaccgacgccgtactgatgctgtttatcaccctgctgttgctgtactcgctgtatgacgaattcggcatggatctgctgaaaggcaaaacgcgcctcaaggtgctgctcaaacgccgccaccgcctcgacagcctgattttcgtcggcctgatcgccattctgatttaccgcaatgtcaccgacaatggtgcggtattaaccacctacctgcttatttccttggcgctgctcgctatctatgtttcttatattcgcgctccaaagatggtgtttaaagcgcagggttttttcttcgccaatgtgtttgttgaatataaccgcattaaagccatgaatttatcggaggacggtattctggccatcgacctggaacagcgccggctgttggttcaggtgacacacctggacgacctggagaaaatttatcaatttttcgttgataatcaatag

SEQ ID NO: 423572 - DNA, 843 bp, Serratia marcescens
atggttgatacaactgctcaaaagaaactcacgccggccgatattcgcggcgtattcctgcgctcgaacctgttccagggttcgtggaacttcgaacgcatgcaggcgctgggtttttgcttctcgatggtaccggtgatccgtcgcctgtatccggaaaacaatgacgatcgcaaacaggcgatcaagcgccacctcgagttcttcaacacccacccttacgtggcggcgccggtgctcggcgtaaccatggcgatggaagagcaacgcgcgaacggcgcgccgatcgacgacggcgcgatcaacggcatcaaggtcggcctgatggggccgttggccggtgtcggtgacccgattttctggggcaccgtgcggccggtattcgccgcgctcggcgcgggcatcgccatgagcggcagcctgctcgggccaatcctgttcttcgtgctgttcaacctggtgcgcctgctgacccgctactacggcgtggcctacggttaccgtaaaggggtggatatcgtcaacgacatgggcggcggcttcttgcagaaactgacggaaggggcgtccattctcggcctgtttgtcatgggggcgctggtcaacaagtggacgcacgtgaatatcccgctggtggtgtccaagatcaccgaccagaccgggcataccaacgtgaccacggtgcagaccatcctcgaccaactgatgccgggcctggtgccgttgctgctgaccttcgcctgtatgtggctgctgcgcaagaaagtcaacgcgctgtggataatcatcggcttcttcgtcatcggtatctttggctattggattggcctgctgggcctgtaa

SEQ ID NO: 423573 - DNA, 801 bp, Serratia marcescens
atggagatcaccactcttcagattgtgctgatatttatcgttgcctgtatcgccgggatgggttccgtcctcgacgagtttcagttccaccgtccgctggtcgcctgtaccctgatcggcttcattctcggcgatatgaaaaccggcatcattatcggcggtacgctggaaatgatcgccctgggctggatgaacatcggtgcggcagtcgcgccggatgccgccctggcgtccatcatctcgaccattctggtcatcgccggcgggcaaagcgtcggcgccggtatcgccctggccattccgctggcggcggccggccaggtgttgaccatcatcgtgcgcaccctcaccgtggccttccagcacgcggcggacagcgcggcggagcgcggcagcctgcgggccatcacctggatccacatcggcgccctgctgctgcaggcgatgcgtatcgccatcccggcggtcatcgtcgccatctcggtcggtaccgccggggtacacgccctgctcaactcgatcccggaagtggtcaccagcggcctgaacatcgccggcggcatgatcgtggtggtcggttacgcgatggtgattaacatgatgcgcgccggctacctgatgccgttcttctacctgggtttcgtgaccgccgccttcaccaacttcaacctggtggcgctcggcgtcatcggcgtggtgatggccgtgctgtatatccagctcagcccgaaatacaacaagtctcaggttgtccaggccggcccggctaacgcgaacgatctcgataacgaactcgactag

SEQ ID NO: 423574 - DNA, 960 bp, Serratia marcescens
gtggcaatagctattatcatcggcacacacggggctgcagcggaacaactgctgaaaacggcggagatgctattgggcgagcaggacaacgtcgcctttatagacttcgttcccggtgagaatgccgagacgttaatcgtcaagtacaacgaaaaaatcagtgggttggataccagtggcggcgtgctgttcctggtggatacctggggcggcagcccgttcaacgccgccagccgcattgcggtcgacaaggaaaactatgaggtcgtcaccggggtcaacattccgatgctggtggaaaccttcatggcgcgggacgacaaccccgccttcgatgaactggtggcgctggcgttggaaaccggccgcgaaggcgtgaaagcgctgaaaaaaccgcaggaagaacccgcaaaacccgcagcacccgtcgccaaagccgctgcccctcaggcgccgctggggccgaatgaccacatgaaaatcggcctggcgcgcatcgatgaccgcttgattcacggccaggtcgctacccgctggaccaaagagaccaacgtcagccgcattatcgtcgtcagcgatgaagtcgccgccgaccatgtgcgcaaaaccctgctgacccaggtcgccccgccgggcgtcaccgcccacgtggtggacgtggcgaaggccatccgcgtctggaacaacccgaaatacgccaacgaccgcgtgatgctgttgtttaccaacccgaccgacgtcttgcgtctggtggagggcggcgtggatattcaatccgtcaatatcggcggcatggcgttccgtcaggggaaaacccaggtgaacaacgccgtttccgtcgatgaaaaagatatcgaagcgtttaagaaactgaacgatcgcggtatcgagctggaggtacgcaaggtctcgtccgacagccggctaaaaatgatggacctgattaacaaactcaattag

SEQ ID NO: 423575 - DNA, 1545 bp, Serratia marcescens
atggaatttttaatggacccctctatttgggcggggttgctgacgctggtggtgctggaaatcgtgctgggcatcgacaacctggtgttcatcgccattttggccgacaagctgccgccgaagcagcgcgataaggcgcgcattatcggcctgtcgctggcattgctgatgcgtttgggcctgctgtcggtgatctcctggatggtaaccctgaccacgccgctgttcagcgtcggcgatttcagcttctccggccgcgatttgatcctgctgttcggcggggtgttcctgctattcaaggccaccatggagctgcatgaacggctggaagggcagacgcatcaagacggcgctaaccgcggttacgccaagttctgggcggtggtggtgcaaatcgtgatcctcgacgcggtattttcgctcgacgcggtgattaccgccgtgggcatggtgaacgatctgccggtgatgatggcggcggtggtgatcgcgatggcggtgatgctgttggcgtcgaagccgttgaccaacttcgtcaacgcgcacccgaccatcgtggtgctgtgcctgagcttcctgttgatgatcggcctgagcctgatcgccgaaggcttcggtttgcacattcctaaaggctacctgtatgccgctatcggcttctcgatcctgattgaattgttcaaccagatcgcgcgccgcaactttatcaagcatcaagcgcgccgtccgatgcgcgagcgcaccgcggaagcgattatgcgcctgatggggcagcagcgtgcgcagcagacggacgatgcggtcgccttgccgagggatgaaacctttgcggcggaagagcgctatatgatcagcggcgtgttgacgctggcctcgcgttcattgcgcagcgtgatgacgccgcgcaccgacatttcctgggtcgactgcgagcgctcccgcgaggaggtgcgcgcacagctgctggatacgccgcacagcctgttcccggtgtgccgcgattcggtggatgagatcgtgggcgtggtacgcgccaaggatctgctggtggcgctggagcaaggggaagatatcgccgagttcgccgcccgcacgccgccgatcgtggtgccggaaaccatggacgtcatcaagctgctggcggtgctgcgccgcgccaaagggcggctggtggtggtcaccaacgagttcggcgtggtgcaggggctggtgacgccgctggacgtgctggaagcgattgccggtgaattcccggacgaggacgaaacgccggacatcgtggcggaaggcgacggctggctggtgaagggcggaaccgatctgcactcgctggaacaggcgctggcctgcgatgacctggtcagccccaccgccgactatgccaccctggcggggctgctgttggcccactacgggcagatgccggtggcgggagatagcattgagctgaaccacctgcggttcgatatcgttgaggtgtccgaataccgtatcgaactggtgcgcgttacccgcgtcgtcctggacgagacggcgcacgcgtaa

SEQ ID NO: 423576 - DNA, 1587 bp, Serratia marcescens
atgttgatgacccacctcgccgcgtcccgatatcgttactaccgttggctgctggccggagcggtgggcgcggctattctgttggtatcgctgtatacccgttactatcaagaggtcaaaagcatcgagttgagccaacacacgttggccacccgcaccgtcggcaagctcaaccagttgctgacgccggcgcagctgcaggcggaacgcagcatggacatgctgaaccagtcctgcgagaacgtgtcatctaccctgcgctttcgcgccgcgcaaaatcaggcgctgcgcgccatgttgctggtgaagaacggcattatttactgctccagcctgtttggcgcccgtcattatcagctggccgcggtgatgccctccttcgtcaacagcgacgccaggctggcgctgcgcccctcgctggcggtgagcaaaggtctgcccacgctggtgctgtggacgccatcgccccgcgataaaaccagcggcgtgctgcacgtattcaatatcgagctgctgtccaactttttactcgagccgcaggagccttacgttcagcgcgtggtgctgaacgtggccgacagcagcctggaatacggccgccgcgaaatcctgagccgcgataccctgaccaacgatctgcgctacaccgccggctccgcgctgtatccgttctcgatttcgctgttcggcccgcagatcggcatgctggcgctttccgccctgccgcgccatattccgctggcgctgctgatcagcctgttggccgcctatgtggtctatctgctcaccgccaaccgcatgagcctgtcttatcacatcggccatgccatcacccatcgcgagttccgcgtctactgccagccgatcatccacagcgataccgggcgctgcgccggcgtcgagatgctgctgcgttggaaaaagaaacggcaagggtggatctcgcccgacgtgtttattccgctggccgagcagcatgagctgatcattccgctcacccgctatctgatgagcaccgtgacggaaaatctgcagctgttcccgccccggccgtcgttctacatcagcatcaacgtcgccgccgagcattttaaaacgctcaatatcatcgacgatatccgccagatctggctgccggcgcacccgatgccctcgctgatgctggagctgaccgaacgcaccgcgctgtcggcaattcagtatgaccagattcgcacgctgaaagacatggggatcatgctggccatcgacgatttcggcaccggccacagctcgctgagctacctgaagaacctcagcccggacgtcttgaagatcgatcgcgggtttaccgccgccatcggcaccgacgcggtcaacgccacggtgaccgacaccatcattacgctggcgcagcgcctgaagctgaaactggtggcagagggggtggaaacggaggaacaggccgactatctgcgctcacgcgaggtcaatgccctgcagggatattatttcgccaagccgatgccgatccacgttttcccgctgtggttgcagcagtacgaatcgcgcgtcaggaaagcggaagaggatccgccggaggcctga

SEQ ID NO: 423577 - DNA, 1365 bp, Serratia marcescens
gtgattagcgttttcgacatgtttaagatcggcatcggcccgtccagctctcatacggttggaccgatgaaagccggcaaacagtttgtcgacgatctggtaaataaaggcctgatgccttctatcacgcgtgttgccgtagacgtttacggctcactctcattgaccggaaaaggtcaccataccgatatcgccatcattctcggcctggccggcaacatgccggacaccgtcgatatcgatagcattccaggttttattcgcgatgtagaacaacgtcaacgcctgatgctggccaacggcctgcatgaagtcgatttcccgcgcgacggcggcatggtcttccgcagcgacaacctgccgctgcatgaaaacggcatgcagatccacgccttcgccggcgataaagaagtgtacagcaagacctattactctatcggcggcggtttcatcgtcgacgaggagaacttcggtaaggacgccgagcaagagctgcaaatgccctatccgttcaactccgcgcgcgaaatgctcgatcactgccgcgagaccgggctgtcgctgtccggcatggtgatgcagaacgaactggcgctgcacagcaagcaagagatcgagacctacttcggcaacgtctggcaaaccatgcgcgcctgtatcgatcgcggtctgaacaccgaaggcgtgctgccggggccgctgcgcgtgccgcgccgtgcctccgcgctgcgccgcatgctggtggcgtcggacaaactgtccagcgatccgatgaacgtgatcgactgggtcaacatgttcgcgctggcggttaacgaagaaaacgccgccggcggccgcgtggttaccgcgccgaccaacggcgcctgcggcatcgtgcctgcggtactggcttactacgatcacttcatcgagtccgtcagcccggacatctacatccgctactttatggcggcgggcgccatcggcgcgttgtacaagatgaacgcctccatttccggcgccgaagtcggctgccagggtgaagtcggcgtagcctgctccatggcggcggccggcctggccgaactgctgggcggcagccctgaacaggtgtgcgtggcggcggagatcggcatggaacacaacctgggtctgacctgtgacccggtcgccggccaggtgcaggtgccgtgcatcgagcgcaacgccatcgcctcggtcaaggcgatcaacgccgcccgcatggccctgcgccgcaccagcgagccgcgcgtttcgctggataaggtgatcgagaccatgtacgaaaccggcaaagacatgaacgccaagtaccgcgaaacgtcacgcggcggcctggcaatcaaggtgcaatgcgactga

SEQ ID NO: 423578 - DNA, 579 bp, Serratia marcescens
gtgatcccatcgaactcaccggcctcgctgcacgcctttatcagccgttttcaactgcagctgccgcaggcggcgcagatctcgcacaatgtgcgcccggcggcggtgcttatcccgatcgtctgccgcgccgagccgacgctgctgttgacccgccgcgctgactcgctgcgcaaacatgccggccaggtggccttccccggcggcaagaccgacgccgaagatggatcggcgatcgtcacggcgctgcgggaagcgcaggaagaagtggcgataccgccgcacgcggtgaccgtcctcggccaaatggcgccgctcgacagcagcaccggatttcaggtcacgcctatcgtcggcctgatcccgccggacgtgcagttccgcgccaacgagggcgaagtggcggacgtgttcgagatgcccctgcgggaagcattgaccctgtcgcgttactacccgctggatattcaccgcgccggccgcacgcaccgcatttatctctcctggtatcacagccagtttatctgggggctgaccgccgccatcattcgccgcctggcgcaacaggtcagtatttag

SEQ ID NO: 423579 - DNA, 1281 bp, Serratia marcescens
atgctgctgcattctggcttcgccgaccattcgcataaccgcttcgatatcctggtcgcacagccgcgcgttacgctcaccacccagggcgccggcacgacaatcgaaagtgacggcgtcaccattgagtctcaggaggatccgttctccctgctgcagcagcagctggcggcgcaaggctggcagccggcgtttaacccggatctgccgtttcagggcggcgccctggggctgttcggctacgatctcgggcgccgggtggaaaccttgccgcagttggctgaagccgacctcgctctgccggacatggcggtgggcatttatgactgggcattgatcgccgaccaccaattgcaaaccctgacgctgctcagctatggcgatgtggagcagcgctggcgctggcttactagccaaaccgcgccgacggagcgccccttcacgctgctaagcggctggcgtgccaatatgagccgccggcaatacggcgagaagttccaacgtattcagcactacctgcgcagcggcgactgttaccagattaatctggcgcagcggttctccgccgactatcagggggatgaatggcaggcgttttgccgactgagcgcctgcaaccgcgcgccgttctccgctttcctgcggctgccgcacaacagcgtgctgagcgtctctcccgagcgcttcctgtggctggcgcagcagcgcatccaaacccgcccgatcaagggcacgctgccgcggctggcggacgcggaacaggacgccgcacaggcgcgccgattggccgattcgcccaaggatcgcgctgaaaatctgatgatcgtcgatctgctgcgcaacgatatcggccgcgtcgcccagcccggcagcgtacgggtgccggaactgttcgtcgtggagccgttccccgccgtgcaccacctggtgagcaccattaccgccaccctgccggagcaggcctcggccaccgagctgctgcgcgcctgcttccccggcggttcgatcaccggcgcgcccaaggtgcgcgcgatggaaatcatcgaagagctggagccgcagcggcgcaacgcctattgcggcagcatcggttacctgagcgcctgcggcaccatggataccaacatcaccatccgcacgctcgtcaccgaaaacggccgcatccactgctccgctggcggcggcatcgtggcggacagccaggagcaggcggaataccaggagaccttcgacaaggttggccgtattctgccgcagcttggggagtatgccccgtcgtga

SEQ ID NO: 423580 - DNA, 1002 bp, Serratia marcescens
atgtcgttaatgctgagcgtgatcgtcccgatgcacaatgcgggggaattattggagcctttcctggcctcgctgctggcccagcgtgagcagcggttggaggtgatcatcgtcaacgatggttccaccgacggttcgggggagatcgcacaccgttacgcggcagcgcatccgcatattcgtgtgatcgatcaggccaatgccggtgtttctaacgcgcgcaatgccgggctcgccgttgcccgaggcaaatatgtggcgtttcccgatgccgacgatgtgctggcgccggacatgtattccacgctgctggaacaggcggaacaacaccaattagacgtgatgcaatgcaatggcgaacgctatttcaccagccaggatgaattgcagccgatttttcccgaggcgcgtttgcgcaccaccgacgttatcaccggcgtacagtggtttgaacgtgcgctgaaatcgcgaaagtttattcacgttgtatggctggcaatatatcgcctcgactttattcgccagcatcggctttatttcgagccgggattgcatcaccaggatattccctggacaacggaagtcatgtttaatgccaaacgggtcaaatatttaagcacgccgctgtaccgtcaacgggtgcacgacaaatcgatcagcaaccgccgtcgcaccggtcaggcgaacgtggattatcaacgccactatatgaaaatcgtcgagatgctggagcggctcaaccggcgctatgccggcactgtcgccattcgtccggctttccattggcaaatcacccgcgaagcgctgggcatttgccacagcattcgtcgtgaaccggatccggcagcccagagtcagatcaccgaagagttctatcagcgcggcatcgacagagcgatgttcgccaatgcgcgcggcctgaaacaggggtggcatgtcatgctgtggcggcatcggctgaagcagtggcgcagcgataacggctgctcgcaaccggcctga

SEQ ID NO: 423581 - DNA, 246 bp, Serratia marcescens
atgcatgcaggtatgccattactgagtcacgcggagcagcaggaagcggcggatcgcatccatcaactgatggagcagggcatgagcagcggtgaagccattgctcgcgttgcgcaggaaattcgcgagaagcatcagggcgctcaggttgcggtactgttcgatgacgatgatgaagacgagcagcatgaggccgccccggaggcgtcgcggaatgacgatgctgaagaagacgaagactattga

SEQ ID NO: 423582 - DNA, 1179 bp, Serratia marcescens
atgttaacgattggaaccgccctgcgcccttccgccacccgcgttatgttgctcggctccggggagctgggtaaagaagtcgccattgaatgccagcgcctcggcctggaagtgatcgccgtcgatcgctatcccgacgcccccgccatgcacgtggcgcaccgcagccacgtcatcaatatgctggacggtgacgcgctgaaagccgttatcgaacaagagcggccggactatatcgttcccgaaatcgaagcgatcgccaccgccatgctggtcgagcttgaacgccagggccaccgcgtggtgccctgcgccgaagccacgcgcctgaccatgaaccgtgaaggcatccgccgtctggcggcggaagagcttggcctgcccacctccagctaccgctttgccgacagcgaggcgactttccggcaggcggtcgagcacatcggctacccgtgcatcgtcaaaccggtgatgagttcttccggcaaaggacaaagcctgatccgcacgcctgagcaactgcaaagcgcctgggattacgcccaacagggcggccgcgccgggggcggccgggtgatcgtcgaagggctggtaagatttgattttgaaattacgttgttgaccatcagcgccgtggacggcgtacatttctgcgcgccgatcggccatcgtcaggaggatggggactatcgcgaatcctggcagccgcagcgcatgtcagccgcggcgttgagccgcgctcaggctatcgcggagaaggtggtgaaggccctgggcggtttcggcctgttcggcgtggagctgttcgtctgtggtgacgacgtgatcttcagcgaggtgtctccgcggccgcacgataccggcatggtcacgttgatctcacaggatctgtccgagttcgccctgcacgttcgcgcatttctcgggttgccgattggcgccatccgccagttcggcccttccgcttcggcggtgatcctgccgcagctgaccagcagcgatgtgcgcttcagcggcctggaacacgcgctgcgcgggcacagccagctgcgcctgtttggcaaaccggagatcgccgggcagcgtcgcctgggcgtggcgctggcgacggcgagcaccacggaacaggcggtggagcaagcgaaacaagccgccgccgccgtggcggtcaacggctga

SEQ ID NO: 423583 - DNA, 210 bp, Serratia marcescens
atgagcaagatcactggtcacgttaaatggttcaacgaaagcaaaggtttcggcttcatcacgcctgccgacggttctaaagacgttttcgttcatttttccgctatcgttagcgatggtttcaagaccctggctgaaggccagcaggttgagttctccatccaggacagccaacgtggcccagccgcagccaacgtcgtcgccatttaa

SEQ ID NO: 423584 - DNA, 1383 bp, Serratia marcescens
gtgagcacagtttctttttcttccctgccgctgccagccgaacagttggccaacctcaacgaactggggtacgccaaaatgacgccggtgcaggccgccgcgttgcccgccattctgcaagggcgggacgtgcgcgccaaggcgaaaaccggcagcggcaaaacggcggcgttcggtattggtctgctgaataatatcgtcgtcgctcaggtcgccacgcaggcgctggtgctctgtcccacccgtgaattggccgatcaggtgagcaaagagctgcgtcgcctggcgcgtttcacgcaaaacatcaaaatcctgacgctgtgcggtggccaaccgatggggccgcagctcgattcgctggtgcacgcgccgcacatcgtggtggggacgccggggcgcattcaggagcatctgcgcaagaaaacgctgctgctggacgaactgaaggtgctggtgctggatgaggccgaccgcatgctggacatgggcttcgccgacgatatcgacgatgtgatcagctacacgccgccgcagcgtcagacgctgctgttttccgccacctatccggcgggtatcgaacgcatcagcgaacgcgttcagcgccagccgctgagcgtcgaagtggacgatgacgaagcgcagaccgccatcgaacaacgcttctatgagaccacgcgcgatcagcgcccggcgttgctggtgtcggccattcgttatcatcaacccgcgtcctgcgtggtgttctgcaataccaaacgcgattgtcagacggtgcttgaggctctggaggcccgcggcatcagcgcattggcgttgcatggcgatctggagcagcgcgatcgcgaccaggtgttggtgcgcttcgccaaccgcagttgccgggtgttggtggcgaccgacgtcgccgctcgcgggctggacatcaaagaactggagctggtggttaactacgaactggcgttcgatcccgaagtgcatgtgcaccgtatcggtcgtaccgggcgcgccggcatgagcgggctggcgatcagcctgtgcacgccgcaggaaatggcgcgggcgcatgcgattgaagactacctgcagatggccgtagattgggcgccggtgtccgagttgagcggggccgccaacggctcgctggaggcggagatggtaacgctgtgcatcgacggcggccgcaaggcgaagatccgccccggcgatatccttggcgcgctgaccggcgatgccgggctgacggcggcggaagtgggcaagatcgacatgttcccggtgcacgcctacgtcgcgatccgtaaagccagcgcgcgcaaggcgctgcagcagctgcagcagggcaaaatcaaaggcaagagctgcaaggtgcggctgctgaaataa

SEQ ID NO: 423585 - DNA, 324 bp, Serratia marcescens
atggcggttgaagttaaatatgtggtggtgagaaacggtgaggaaaaaatgactttcgcgagcaagaaagaagccgacgcctacgacaaaatgctggatttggcggataacctcggagagtggctgcaacaggcgccgctgaacctggacgatgaacagcgcgaagggctgagcttcttcctggcagagaataaggatgcgctgggtctgattctgcgcggcgcatcgccggcggaaaccggtaaaaaaccgacggaagcgaaagcgaaaaaaacggtctctaactcaaaagagggatctacgtcagaaaagcaagcggcataa

SEQ ID NO: 423586 - DNA, 309 bp, Serratia marcescens
atgagccgtgaaataactttcttcagccgctttgagcaagacattctggccgggcgcaaaaccatcaccattcgggatgccagtgagtcgcacttcgaaccgggcgaggtattgcgcgtaagccgcaatgaagacggcgtgtttttctgctttatcgaagtgctgtcggtaacgccggtgcacctggatgcgctgaccgaacgccacgcacagcaggagaacatgtcgctcggcgaactgaagcaggtgatcaaggaaatctatccgggcctggatgcgctgtttgtcatcgagttcgtcaaacggtaa

SEQ ID NO: 423587 - DNA, 360 bp, Serratia marcescens
atgaaaaaaacggctttggctatcgccttgttggccatgatgggagcatcgactgcggtgtgggcgcaggttcaagagcaacgcagcgccaaggtggggcagtgtgcggggctgcagccggcggatatcgccgcccaggtcaagcgcgacttcttgcagaaccgcatcacgcgctgggaggcggacaaaaaactgctgggcaccgcaacgccgatcgcctgggtcagcccggatgccatcaccggcaaggatcaggtgtggcaggtgccgctgacggtgcgcggcaccaaggcggataaaacctacaacgtgacgctcaactgcaacaccggcgagatcgcctacagcgcgccgcagtaa

SEQ ID NO: 423588 - DNA, 564 bp, Serratia marcescens
atgaagaagatcctgatgggcacagccgccctgctgttcgccggcgtattggccggttgcaatcaactgacccagtacaccctgagcgagcaggaagtgaatgattacctgcagaaacacaacgactatcagaagcagatcggcgtgcccggcctggtggacgccaacatcgtactgacgcagctgcaaagccagatcggccgcagcgagccgggcaaggtcaccctttccggcgacgccaaggtcaacatcacgtcgattctcggcccgcaggcggcggatctgaagctgacgctgaaagcgcagccggtttacgaccgtgcacagggcgccatttacctgaaagacatggaactgaccgattacagcgtgcagccggaaaaaatgcagacggtgatgaaagcgctgacgccatatctgaatcagtcgctgaagtcttacttcgaccaaaagccggcttatgtgctgaatcctgacaacagcaaaaccgaagcgctggcgaaaaaactggcgaagggattggaagtgaaaccgggtgagttggtgatcccgtttagcgactga

SEQ ID NO: 423589 - DNA, 1641 bp, Serratia marcescens
atgttgaaaatggtgctcgccaccgctcgcgatcgggcgcggctgaaggaaattacctccgttctgattcgttatggcctgcaagacgttctgcgtctgctgggcctgggggctttgctgcgcggcgcccgcgctgaatccgcccaacaggacgcacaaaccctgcctgagcggctgcgcgaagcgctcgaggcgctgggccctaccttcgtcaaattcggtcagatcctggccacgcgttccgacctgctggatccggcctggaccgacgaactggatcgtctgcacagccaggcagcggtgttgccatgggaaacgctggcgccgcagatcgttgccgacctgggcggcgaacccgagcggctgttcgccgaattcgatcgtacgccgctggcggcggcgtcgatggcgcaaatctaccgcgcacgcctgcacagcggcgaacaggtcgtggtcaaagtgctgcggcccggcctggcgaaaaccatccacgccgatctgcggctgctggcctcgctggcggaaaccgtggagcagcagagccccgcgctggcgcgctatcggccgcggcagatggtcagagcgctggcgacggcgctcaatcatgaactggatttgacccacgaagggcataactgcgaccgcgtcgccgggatgtttgcgcgtcaacctgacgtcgtcgtgccgaaaatctattggcaagggtcttccccgcgcctgttagtgcaggaatacttgcccggcaccgcgccggaaaaccctcagcagctggcggcagcgggctttgacggcccactgctggcgcaacgcggcgcccgcgcctttatgagcatggtactggagcacaggctgtatcacgccgatccccaccccggcaacgtcatggcgctgagcggtgaccgcgtcggctttatcgacttcggcatggtgggccagctgtccgagcggcgacgcaatcagttgctcctgctgctgcaggccatcgccgatcgtcagtccgaaggcatcgtcaacacgctgatcgcctggtcggacagcgaaccgctggatctgatggatctggagctggcggcgcaaaacttcctcgacaaacaggccgccgccaccctgaccttgggcaaggccctgaccgatctgctggtgatggcgcgtgaacaccagctggcgctgccgcccgatctggtgctgctgttcaaggcgttaatcaccgccgacggcgtgctgcaccgattggatccggcctttgacatcgtggccacgctcaaaccgatgctgcaacaaaccgtgctgcaacgctatgcacccgctgccgtgcgccagcggttgttggccctgggcggggaagcgctcgacgccggagaggagctgccgcaaaccctgcggctattggttcgccgcctaaaacgcgggcggctcaatgccgatatcaacgtcagtaatcttggccagttgagcaaagcgctggaacgcgccgccgttaccctggctatcgccatcgtcaccgccgcttttgccctgggcctggcgccttatctgatgcattcttcgctgcggctgtggggcattcccctgttcccgctgttggggggcgcggcctgcctggccggcgtggcgctcttggcgctgcgattgcggcgttga

SEQ ID NO: 423590 - DNA, 648 bp, Serratia marcescens
atgaaactgttcatttacgatcattgcccattctgcgtgaaagcccgcatgatttttggcctgaaacgtctgccgattcgcttggtcacattgctcaacgacgatgagacgaccccgttcaacctgatcggccaaaaaatggtgcctatcctggtcaaagacaacggcgatgcgatgccggaaagcctggatatcgtgcgctatgtcgacaaccttgacgacaaaccggtgctgaccggccgcaccaacccggccattgccgagtggctgcagcgggtcggcggttacagcgcaaaattgctgttgccgcgaattgcgcatgccgatttcgaagagtttgccaccgacagcgcccgccgttactttatcgataaaaagcaggcgtctatcggcgattttgccgagcatctcgccaacagtgccgatctgatcgccgaactggaagccgacctgcaaacgctgtcgccgctgatcgcctccgccgacgcggtgaacggcgaactgtccgaggacgatatccacctgttcccgctgctgcgctcattgtcgatcgtcgccggcgttgcgctgccggataacgtggaagcctaccgcaaccgcatggcgcagcgcagcgaggtgccgttgctgctggatatggaacaataa

SEQ ID NO: 423591 - DNA, 249 bp, Serratia marcescens
atgagcgaagaagcaaaattaccgcaactactcgaacatatgatactgaacttgcgcatgatttatgcgcgttccaccttggtggaaaaggcactggcccatatcctcgccagcgacgccggcctgaaaaacgatattatcaaacagctgcaggtcgtcaccgccaccaacgaacgtgacagaatcgacctcgaagaagctcgcaatcacctgatcgatgtgctcaactcagtaccggccaagaaataa

SEQ ID NO: 423592 - DNA, 1206 bp, Serratia marcescens
atgtctctggtgtcgcaagcgcgcagcttgggtaaatattttctgttgctcgataatctactggtggttttaggcttctttgtcgtttttccgcttatttcgatccgctttgtcgatcaattaggatgggcggcgctgatcgtcggcatcgcactgggtttgcgccagctgttgcaacaagggctcggcatctttggcggcgccatcgccgatcgcttcggcgccaagccgatgatcgtcaccggcatgttgctgcgcgccgccggtttcgccaccatggcgatggccgatgaaccctggatcctgtggttctcttgtgccctgtccgccctcggcggcacgttattcgatccgccgcgcaccgctttggtgatcaaactgacccgtccgcacgagcgcggccgttttttctcgctgctgatgatgcaggatagcgccggagcggtggtcggcgcgctgatcggcagttggctgctgcagtacgatttccactttgtctgctgggtcggggcagcgatcttcgtgctggccgccggctggaacgcctggctactgccggcttaccgcatctctaccgtgcgtataccgatgaaggaaggcatgctgcgggtcctgcgcgatcgccgtttcctcacctatgtcctgacgctgaccggttattacatgttagcggtacaggtgatgctgatgatgccgatcgtggtcaacgaaatcgccggttcaccggcggcggtgaaatggatgtatgcgattgaagcagcgctgtcgctatcgctgctctatccgctggcgcgttggggagaaaaacacttccggcttgagcagcgcctgatggcgggtctgttgctgatgacgctcagcctgctgccgatcggtctcgccaccagtttgcagggcgtgttcacgctgatctgttgcttctatctgggatcgatcatcgccgaaccggcgcgcgaaacgctgagcgcttcgctggccgatccgcgtgcgcgcggcagctatatgggctttagccgcctgggcctggcgctgggcggcgcgttgggttataccggcggcggttggatgtacgataccgggcggacgatgaacatgccggagctaccctggttgctgctgggggcagtgggcttcgctacgctgctggcgctgtactggcagttcagcccgcggcgcagcgcgtcgatgatgctgcaccgcggttga

SEQ ID NO: 423593 - DNA, 585 bp, Serratia marcescens
atgttcggctatcgctctgcatcgccaaaagtacgtcttacaaccgaccggatggtggtccgtttagtgaatgaacgggatgcctaccgtctggcggattattatgccgagaaccgagcctttctcaaaccctgggagccggtgcgcgacgaaagccactgttatccttccggctggcaggcgcgtctgggcatgatcaccgaaatgcaaaagcagggcagcgcctactattttatcctgctcgatccagaagagcaggaagtgcgcggcgtggcgaacttcagcaacgtgctgcgcggttcgtttcatgcttgtttcctcggctattcgctgggggaaaagtggcaggggcaagggctgatgttcgaagccttgcagtccgccatccgctatatgctgcgccaacagcgcatgcaccgcatcatggccaactatatgccacacaaccagcgcagcggcgcattgctgacgcgtctgggattcgaacgcgaaggttacgccaaggattacctgctgatcgacggccagtggcaagaccacgttttgacggcatacaccaataaagagtggctacccccacgttga

SEQ ID NO: 423594 - DNA, 648 bp, Serratia marcescens
atgaaatatgaattgaacgccagagaggcgcgggtcatcggctgcctgttggaaaaacaggtcacgacaccggatcaatacccgctttcgctgaatgccattacgctggcatgcaaccaaaaaaccaaccgcgaaccggtgatggacctgagcgaaagcgaagtgcagcaactgctcgatctgttgctgcgcaaacatttcctgcgcaccctcagcgggttcggcaatcgggtggtgaagtacgaacagcggttttgcaactctgagtttggccagctgaaactctcgcctgccgaactggcggtgatcgccaccttgctgttgcgcggcgcgcaaacgccgggcgagttgcgcacccgcaccaatcggatgcacgagttcagcgatgtcagcgaggtcgaacaggtgctgcagcaactggccacgcgcgaagatggcccgttcgtggtgcgcctggcgcgtgagccgggcaagcgcgaaagccggttcatgcatctgttcagcggccagattgatgaagcgccgccggcggcgttcgacgctgaggacgacggcgaactgagcgccagagtcagcgcattggaaagcgaagtggcggagctgaaacggcagttgcaacagctgttggcgagggatgcgaatgactaa

SEQ ID NO: 423595 - DNA, 921 bp, Serratia marcescens
atgactaaattgcgtgtaggcgtggtggggttgggcagtatcgcgcagaaggcgtatctgccaatcctcggccaggcggcggattggacgctggtgggcggtttttcgcccaatcagcaaaaagcgcagccgctgtgcgacagctaccgcatggcctgtttctctcgtctggacagcctggccgaacagtgcgacgcggtctttgttcacagcagcaccgccagccatttttcggtgataggcgagctgctgaaccgcggcgtgcacgtttacgtcgataaaccgctggcggagacgctggagcagggcgagcaactgcttgagcaggccgagcggcgaggcaaaacgctgatggtggggttcaaccgccgtttcgcgccgctttaccggaagctcaaacagcgaatgaatcagccggcctccattcgcatggataaacatcgggcggacagcgtcggcccgcacgatctgcgttttaccctgttggatgattacctgcacgtggtggacactgcgctgtggctggcgggcgggcgggagcaactgctgagcggcagcttgcgcgccaacgccgccggtgaaatgctgtacgccgagcatcacttcgcctgcggcgacacgcaggtgacgaccagtatgcatcgccgcggcggcagccagcgcgaaagcgtgcaggcggtgaccgacggcgcgctgtatcagttgaccgatatgcgccactggctgcgtgaagatgcgcagggcgagttggagcagccggtgccgggctggcaaagcacgctggtgcaacgcggcttcgacggtgcggtgcggcatttccttgatgccgtcgccaaccagagcgcgccggaaaccggcggcgaacaggcgctggccgcccagcgggtggtcgagcgtttgctgcgggataactctatgtaa

SEQ ID NO: 423596 - DNA, 1536 bp, Serratia marcescens
atgaacctactcaaatccttggctgccgtcagctcgatgacgatgttttcgcgggtgttgggctttgcccgcgatgcgatcgtcgcgcgcgtgttcggggccggcatggcaacggacgcctttttcgtggcgttcaaactcccgaatctgttacgccgtatctttgccgaaggggcgttttcgcaggccttcgtgccgatcctggccgaatacaagagccagcagggtgaagaggcgacgcgcacttttattgcctatgtctccgggctgctgacgctggtgctggcggtggtgacggtgctggggatgctggccgcgccctgggttatttacattactgcgccgggctttaccgatacgcccgacaagtttgccctgacgtcggcgctgctgcgcatcaccttcccctatattttgttgatctcactggcgtcgctggtgggggcgatcctcaatacctggaaccgcttctcgatcccggcttttgcgccaacgctgcttaacgtcagcatgatcggtttcgcgctgttcgccgctccgtatttcaacccgccggtgctggcgctggcctgggcggtggtggtgggcggcgtgctgcagctgggttatcagctgccgcatctgcgcaagataggcatgctggtgctgccgcgcctcaagctgcgcgatgccggggtctggcgagtgatgcgccagatggggccggcgatcctcggggtgtcggtcagccaaatctcgctgatcatcaacaccattttcgcttcgttcctggtgtccggctcggtgtcctggatgtactacgccgaccgcctgatggagtttccctccggcgtgctgggcgtggccttgggcaccatcctgctgccgtcgctggccaaaagcttctcgagcggcaaccacgacgagtattcgcgcctgatggattgggggctgcgcctgtgcttcctgctggcgttgccgagcgccatcgcgctcggcattttggccaagccgttgaccgtttcgctgttccagtacggcaagttcagcgcctttgacgcggcgatgacgcaacgcgcgctggtggcttactcggttgggctgatggggctgatcgtggttaaagtgctggcgccgggcttctattcgcggcaggacattaaaacgccggtcaagatcgccatcatcacgctgattatgacgcaggtgatgaacctggcgtttattggcccgctgaagcatgccggcctggcgctgtcgatcggtttggcggcctgcctgaacgcctcgctgctgtattggcaactgcgcaagcagaagatcttccagccgcagccgggttgggcgctgttccttaccaagctggtgatcgccgtgctggtgatgtcggcggtgctgattggcgtgatgtggctgatgccggcctgggatcagggcaatatgctggaacgtttgctgcgtttggctgcggtggtggtggccggtgtggtggcctactttggcgtgctggtagggttgggcttccgcccgcgcgactttgcgcgccgcgccgcctga

SEQ ID NO: 423597 - DNA, 1731 bp, Serratia marcescens
gtgaatattcaggttcttctttcagataaagtcagccaggcgctgatcgccgctggcgcgccagccgattgcgaagcgcaggtccgcccttccgccaaggcgcagtttggtgattaccaggccaacggcgtgatgtccgtcgccaaaaagctgggcatgccgccccggcagctggcggaaaaagtggtgcaactgctggatctcggcgacgtcgccggtaaagtggaaatcgccggtcccggctttatcaacattttcctgaacagcgactgggtcgcccgccaggccgaccagatgctgaacgcaccgaaactgggcattgcgccggttgagccgcaaaccatcgttatcgactactccgcgccgaacgtggcgaaagagatgcacgtcggccatctgcgctccaccatcatcggcgacgccgcggcgcgtacccaggagtttctgggccataaagtgatccgtgccaaccacgtcggcgactggggcacccagttcggcatgctgattgcctacctggaaaaaatgcagaacgaaaacgccagcgacatgggcctgtccgatttggaacagttctatcgcgaagccaagaagcattacgacgaagacgccgagttcgccgagcgcgcgcgcgcttacgtcgtgaagctgcagggcggcgatcagtactgcctgaaaatgtggcgcaagctggtcgacatcaccatggcgcaaaaccagctgacttataaccgcctgaacgtcacgctgaccgaagacgacgtgatgggcgaaagcctgtataacgcgatgctgccgggcatcgtcgccgatctgaaagccaaagggctggcggtggaaagcgaaggcgccaccgtggtgttcctcgacgaataccagaacaaggacggcgatccgatgggcgtcatcatccagaaaaaggatggcggctatctctacaccaccaccgatattgcctgcgccaagtaccgctacgaaaccctgggcgccaatcgcgtgctgtattacatcgactcccgtcagcatcagcacctgatgcaggcctggaccatcgtgcgcaaggccggttacgtgccggagtccgtctcgctggaacaccacatgttcggcatgatgctgggcaaagacggcaagccgttcaaaacccgctcgggcggtacggtgaagctctccgatctgctggatgaggccatcgaacgcgccgaacagctgatcgccggcaaaaacccggatatgccggaagacgaaatgaaaaccgtggcccgcgtggtcggcatcggcgcggtcaaatacgccgatctgtcgaaaagccgcaccaccgactatgttttcgactgggataacatgctggccttcgaaggcaataccgcgccttacatgcaatacgcctatacccgtgtggcatcggtattcaaacgcgccgggatcgacgaaagcagcctgacgctgccgctgacgctgaccgaagagcgtgaaattgcgctggccacccgcctgctgcagttcgaagaggtgctcaccaccgtcgcgcgtgaaggcacgcctcacgtcatgtgcagctacctgtacgatctggccggcctgttctccggtttctatgagcactgccagatcctgaacgccgacagcgaagaagcgcgtcagagccgcctgaagctggcgctgctgacctcgaaaacgctgaaaaccggtctggatacgctgggcatcgaaaccgtcgaacgcatgtaa

SEQ ID NO: 423598 - DNA, 567 bp, Serratia marcescens
atgaccactcccttgcaggccattgccgagcttgacgatctgaagctcgacctgccgcgtttcgaacaggcgttgcaccaatttgccgccaaattgcggcttgatctgtccgcgtttaccgccgatcacatctcactgcgctgtcaccagaacgctaccgccgagcgctggcgccaagggctgatgcagtgcgggacactgctgtccgaatcgatgatcaacgggcggcctatctgtctgttcgacttgtctcagccgctggccgttgggccatggcggatagactgcatcgaactgccgtatccgggggagaaacgctatccgcacgaaggctgggaacacgtcgaattagtgctcagtggcgatccgcagacgctgtacgcccgggcgttgagccacctggccgatgaagcgttgctggcgccggggatcaagctgaagcaaagctcgccaaaaggcgagggcgaacggctgccgaacccgacgctggccatcaccgatggaacggtcacgatcaagtttcatccttattccattcgagacatcgtcgccagcgaacaaggttag

SEQ ID NO: 423599 - DNA, 1149 bp, Serratia marcescens
atggcattcaattttgatcaatgggtagaccgcagtcacagtgacagcgttaagtgggataaatatcgcggcagcgacatcatcccgctttgggtcgccgacagcgatttcacctcaccgccggcggtgatcgaagccttgcagcggcgcgtggcgcacggcgtattcggctacactcacccatcccctgatcttattgaggtttttacccgccgcatggtagagcgctacggctggcacatcaagcctgaatggatcattttcctgcctgggctggtgtgcggcctgaatttgtgcgtgcgcgcctgcaccgaagaacaccagagcacgctggccccctctcccatttatccgccgtttcgcaaagcggccaaattcgccgggcgcgagcacctcgcggtgccgctgaaggcgaccggtcaacgctgggtgctggatttttcctcgctgcatgatcggctgagtggcaacgagaaactcctgttgctgtgcaacccgcagaaccccggtggcaccgtttatcgccgggatgagctgttgcagcaccatcagttcgctcgcgaacacgatttaatcgtctgttccgatgagatccactgcgaactgctgcttgagcccggcgtgcggcatatccctttcgccaccctgaatgacgacgcggcccaacgcagcgtgacgctgatgtcgccgtcaaaaacgtttaatctcgccggactgggcgcttcactggcgatcgttcccaacgaagcgttgcgacaaaagctgaaacgcgcgcgcagcggtattgtcccggaggtcaatctgttggcgctggtggcggcgcaggcggcttatcaatacgggcaaccctggctggatgagcagttgatttatctgcgcgccaatcgcgatcggctgataaagcgtatcaacgccatgccgggtttgacgttgctgcctgtcgaggccacttacctggcctggatagactgcagcgcgttgccggtggataacccgcatcagttcttcgaacgtgcgggcgttgggctaagcgccggtttggatttcggcgatcggcgctttgtgcggcttaactttggttgccgatgggccctgctcgatgaagcgctcgatcgcatggcgcgagcctgtgcggcactgcctggctaa

SEQ ID NO: 423600 - DNA, 759 bp, Serratia marcescens
atgataaaactggaagtttgttgctttagcgtcgactgcgcgctgacggccgaacgggcgggcgccgatcgcattgagttgtgcgccagccagagcgaggggggattgacgccgagctatggcacgctgcgtctggcgcgcgagcgggtttcgatcccggtgcatccgatcgttcgccctcgcggtggcgatttctgctacggcgcggtggatttcgaggtgatcaaacaggatctccgccagatccgcgagatggggttccccggcgtagtggttggcatgctggacgaagaagggcacatcgatctgccgcgcatgcgcgaagtgatgaggctgtgcgagggcatggcggtgacgttccatcgcgcgttcgatatgtgccagaacccgatggtggcgttggagcaactgagcgagctgggcgtggcgcgcattctgacctccggccagcagcagagcgccgaactgggcctgccgttgctgcgcgatttgcgccaggccagtcagggcccggtaatcatggcgggtgccggcgtgcgcctcagcaatctgcacaagtttgtcgatattggcctgcatgaactgcacagttcttccggtcacctggtgccgtcgaccatgcgttaccgcaaggcgggcgtcaccatgtgctccgataacgagtttgacgaatttagccattattgcgtggatggcgaaatggtggaggcgatgaaaaacgcgctggccttggttgatcccctggcgcaaagcgcataa

SEQ ID NO: 423601 - DNA, 405 bp, Serratia marcescens
atgacccgaacggcacactgtttgaccgctgcgcttttgctgaccttgaccctgagcggctgtcagaccgccaagcggcctgtttctgcattaagtaagccgcccagtgcagaagacattgcggaacaagacaagcggcagcgtgaagccgagcgtatacagcagtgccagcgcgagttggatgccatgcgcggcatggataacgaaaaataccaaaaattcaaacgcgaattcgataccttgatgggcggcgccgcgcagtatgccggggtgcgccagcgggtcaacacgggcacgcaggaaaccgtcgacgccctgtatcgttatcgcaccagccgtctgtgcgcggacatcagttctgccatgatgaccggcctggctgagcgcggagagcgcgcccaatga

SEQ ID NO: 423602 - DNA, 1704 bp, Serratia marcescens
atgacccctcgtgcgagaaaggcgttgctgagcctgatgataccgctggcgtttgcgccagcgatggccgcagcggatgacgatgtgccggcattactgcagttcgccgagcgctaccagctgcaggacgccccggcagctgacgccgcggttactccctcccgggaaacccaaaagccggcgccccggccggttcaaccgcgtgaaacgagctcgcagcgaaagcaactggcgcagttgcaaaagacgctgcgcgagaaagaggctcgattggagcaacagcaaaccgctattcaatcactgcagcaggagctgaccgcgttgcgggttgcgtcgtccctgacggctgccgataaaccgacagctgctcccgatctgagcgcgttgagcgacttcgccagcggcgtgcgacgggcgctgaacctgacgccgcaggagcgcaaggctcaggcgcagatcgccgaggcgcaggcagcgttagcgcaggaaaaacaacaaaccgaggagcgcgatcggcgtatcgccttgctggaacaacggctggcggcgttgcctgaacaggcggataacgcctggcaggagaaactgacggcggcgcagaccgccaacgataaagcgcgccagcgttatgagcaggacaaacaagcggccgccgctgagctggcgcaacagaaggcggaagccgccaaggcgacgggagaacttcagcagcagctggcactgcggcagaaagagctggatgaacaacgccaacaggccgagcggcaagagaaaagcctgaaaacggcgctggaacagcaaaaggccgaagccgccaaggcgacgggcgaacttcagcaacagctggcgcagctacaggaaaaaaacaagacgcaaaccgagcaggcgaaggcattggcgcagcggctggcaacggcggtggcggaaagcgaaaaatcaacgctgcaactggcgaaaacgacggagcaggcgaaaaaaaacgcattggcgctagcggacgccaaccaaacgcagcaggcattgcgtgaggagctggatgggctgcgctctcgcgccaaatggttgccggatgcacaggcgctcgagaaaaagccggcgcaacagagctatgctgccggtgtcgctttggggcgcgatattcaaacgatgctggcggagcgtaaaaattggggcatcaatcccgataaaaccgtgctgctggcgggcgtgatcgataccttcaacggccattaccagctaagcgatgcgcagttgacccgtgcgctggcggagtcggaaaaagcggtgaacgacgcccggaaccaggcagcgaaggtgcaaaccagcaagggcgaggcgttcgtcaccgagtttaaaaagaaaaagggcacgcagaagtcgccttccggtttctggtatcgcatcgattatgcgggtgatgaagccattaaggaaaacgcgcgggtggacatcgtggtgaaggaaagtttaaccgacggcagcgtgattcaggatatggatcgcagtgggaaggtgatgtcacagccgctctctgcctatccgccgttgttccgcgaggcgatcggccatctgaaaaatcatggttcgctgacgatggtggtgccgccggcgttggcgtacggtgaaacgggctatgcgccgcagatcccgccgaacgcgaccatggtgtatgagctgcggattgtcgatgtcaacaacgggtaa

SEQ ID NO: 423603 - DNA, 972 bp, Serratia marcescens
atgatcgagttcggtgatttctatcaacgcatcgccaaaagccccctcagccattggctggacacgctgcctgcgcagctgagcgcctggcaacgcgaatcgctgcacggcaaattcaaacagtggttcaactcggtcgagcatttgccgacgctgaccccaacccgcctcgatctgctgcacggcgtgcgcgccgagatggagccgggcctgtcgccgggccagcttgaaggcatcgagaaaatgctgcgcaccctgatgccatggcgtaaagggcccttctcgctgtatggcatcgatatcgataccgaatggcattccgactggaagtgggatcgcgtgctgccgcacatttctccgctggccggccgcaccattctcgacgtcggctgcggcagcggttatcacctgtggcgcatgattggcgccggcgcacacctcgccgtcggcatcgatccgatgcagctgttcctgtgtcagttcgaagcggtgcgcaagctattaggcggcgatcagcgcgcccacctgctgccgctcggcatcgagcagttgccggaattggcggcattcgacaccgtgttctcgatgggggtgctgtatcaccgccgctcgccgctcgatcatctgtatcagctgaaaaaccagctggtggctgaaggtgaactggtgctggaaacgctggtggtggaaggcgatcgccaccaggtgctggtgccgggcgatcgttatgcgcagatgcgcaatgtgtatttcatcccttccgccgaggcgctgaaatgttggttggagaagtgcggcttcgtcgacgtgaagatcgccgatatgtgcgtcaccagcctcgaagagcagcgccgcaccggctggatgaccagcgaatcactggccgaattcctcgatccgagcgatcgcagcaaaacgatcgaaggctatccggcgcccctgcgcgccgtgctgaccgccaaaaagccctag

SEQ ID NO: 423604 - DNA, 744 bp, Serratia marcescens
atgccaaaccgcgatacccttttttccgcccccatcgccaaactgggcgactggacctttgacgaacgcgtcgccgaagtgttccccgacatgatccaacgctccgttcccggctattccaacatcatctcgatgatcggcatgctggccgagcgctttgtgcaacccgacagccgggtgtatgacctgggctgctcgctgggtgcggcgacgctgtcgatgcggcggaatatcaaggtgcccggctgcaatatcgtcgccgtcgacaattcgccggcgatggtggaacgttgccgccgccatatcgacgccttccgcgccgacacgccggtcgatgtcatcgaagccgacattcgcgacatcgagatcgagaacgcctcgatggtggtactgaactttacgctgcagttcctcgaaccggccgatcgcctgcgtctgctggagaaaatctatcgtggcctgcgcccgggcggcgcactggtgctgtcggagaagttcagctttgaggacgctgaagtcggcgagctgctgttcaacatgcaccacgatttcaaacgcgccaacgggtacagcgagctggagatcagccaaaaacgcagcatgctggaaaacgtgatgctcaccgactcggtggaagcgcacaaggcgcgcctgcaacaggccgggttcgagcatgccgaagtgtggttccaatgcttcaacttcggttcgctgatcgccctgaaagcgggggatgcgcaatga

SEQ ID NO: 423605 - DNA, 396 bp, Serratia marcescens
atggtaagcgcgctttatgtggtgctcggcgcattgttgttgatcaaactctcttatgacgtagtcagattaaggatgcagtaccgcgtagcctatggcgacggcggtttctacgaattgcagaccgccatccgcgtgcatggcaacgccgttgaatacattccgattgctgccgtcttgctggtgattatggaaatgaacggcgcggaaatctggatgattcacctttgcggcctgatgctgatggccgggcgactggtgcattactacggtttacgcaaccgcgaggttcgctggcgccgttcgggcatggccgcgacctatatctctttgttgttgatggttctggcaaatatcttctatctgccctgggatctgattttcagcctgcactga

SEQ ID NO: 423606 - DNA, 819 bp, Serratia marcescens
gtgatctacatcggactgccgcaatggcaacatgcagcctggaatcgcatcgggctgcgtgatttggcggattacagccgctatttcaactgcgtggaaggcaataccaccttctacgcgctgccgaagctggaaatcgtgcagcgctggcgcgacatgaccggtgacgattttcgcttctgcttcaaattcccgtcggacatcagccacaaggccgccctgcgcaactgcgccgccgagctgcaggcgttttaccactgcctgagcccggtgcatcaacgcatcggccaactgtggctgcagttgcccgccgccttcggccccgatgagctgccgcacatgtggcagttcttcgcaagcctgccgaaggaattcacctacggcgtagaagtgcgtcatccggcgtttttcgccaagggcgaggaagagcgtgcgctgaatcagggattgcaccagcgcggcatcaatcgggtgatcctcgacagccgcccggtgcatcacgccgcccccaacaccgccgccgtgcgcgatgcccagcagaaaaagccgaagctgccggtgcacgctctggtcaccgccgaccaaccgctggtgcgctttatcggcggtgaccaattggccgacaacctgcgctggttcgaggcctggcagcaaaaactgccgctgtggcagcaacagcatcagccctatctgtttattcatacgccggacaacggcgattcgccccagcaggcgcaaaaaatttggcagcagctacggctggcgatccccgatttgcctgcgccgccggactggccagaacaagatgcactgttttga

SEQ ID NO: 423607 - DNA, 579 bp, Serratia marcescens
atgctgaaacttgacgcccaaaccaccgctctggtgctgatcgatttgcaaaacggcattctgccctacgccggcggcccgcacagcgccgaccaggtggtggcgaacgccgccctgctggccgcccgttttcgtctgctgggcgcgccggtgctgctggtgcgcgtcggctggtcagactccttcgccgaagcgctgaaacagccggtggacaaaccggctcccgcgcccgccggcggcttgccggccagttggtgggaattccccgcgccgctggcggtctgcgacagcgatattctggtcaccaagcgccaatggggcgccttctacggcaccgatctggatttgcagctgcgccgccgcggcatcaaatccgtggtattgggtggcatatccaccaatatcggcgtggaatccaccgcccgcgccgcctgggagcatggctatgagctggtgatcgccgaagatgtctgcagcgcgcagaacgcggaaatgcaccgtttcgcgttcgaacatatcttcccacgtttggcgcgggtgcgcgacaccggcgaaattcttgccgcgctcgagcggtaa

SEQ ID NO: 423608 - DNA, 1785 bp, Serratia marcescens
atgcgtactgaatattgcgggcagttgaatctgtcccacgtgggccaggaagtcactctgtgtggttgggtcaatcgtcgtcgcgatctcggcggcctgatctttattgatatgcgcgaccgcgaaggcatcgtgcaggtgttcttcgatccggaccagaaagtggcgttcgacaaggcctacgacctgcgcaatgagttctgcatccagatcgtcggcaccgtgcgtgcgcgtccggacagccagatcaataaagatatggctaccggcgaagtggaagtgttcgcccacgcgctggagatcatcaaccgctccgagccgctgccgctggactccaatcaggtcaacagcgaagaagcgcgcctgaaataccgctacctggatctgcgccgcccggaaatggccgagcgtctgaagacccgcgccaaaatcaccagcttcgtgcgccgcttcatggacagccacggcttcctcgatatcgaaacgccgatgctgaccaaggcgacgccggaaggcgcccgcgattacctggtgccgagccgcgtacacaagggcaaattctacgcgctgccgcagtccccgcagctgttcaaacagctgctgatgatgtccggcttcgatcgttactaccagatcgtcaaatgcttccgtgacgaagacctgcgtgcggaccgtcagcctgaattcacccagatcgacgtcgaaacctctttcatgaccgccgatcaggtgcgtgaagtgatggagaagttggcgcgcgaactgtggctggacgtgaagggcgtggatctgggcgatttcccggtcatgaccttcgccgaagcgatgcgtcgctttggctccgacaagccggacctgcgtaacccgctggagctggtggacgtggccgacctggtcaaagacgtcgagtttaaagtcttctccggcccggccaacgacgccaaaggccgcgtggcggcgatccgcgtaccgggcggcgcgcagctgacccgcaagcagatcgacgagtacggcgctttcgtcaacatctacggcgccaaaggcctggcgtggctgaaggtcaacgaccgcgccgccggcatggaaggcgtgcagagcccgatcgccaaattcctcagtgcagacgtgctggaaggcatcctggcgcgcaccgatgcgcagaccggcgatatcctgttcttcggcgccgacagcgtcaagattgtcaccgatgcgatgggcgcgctgcgcctgaagctggggcgcgatctggcgctgacccaactcgacagctgggcaccgctgtgggtggttgacttcccgatgttcgaagaagacgacgagggcggcctggcggccatgcaccacccgttcacctcgccacgcgacatgagcccggaagagctggcggcagcgccggtcaacgccatcgccaacgcctatgacatggtgatcaacggttacgaagtgggcggcggttcggtgcgtatccaccgtagcgaaatgcagcagacggtgttcagcattctgggcattaacgaacacgaacagcgcgagaagttcggcttcctgctggacgcgctgaagtacggtacgccgccgcacgccggcctggccttcggcctggatcgtctggtgatgctgttgaccggcaccgacaacatccgcgacgtcatcgccttcccgaaaaccaccgcggcggcctgtctgatgaccgacgcgccgagcttcgccaacccggctgcgctgcaggagctggcgatcagcgtggtaaagaaagccggtgcggaacaagagagcgagtga

SEQ ID NO: 423609 - DNA, 447 bp, Serratia marcescens
atgagttacaagcgccctgaatctatcctggtagtgatttacgcgaaatccagtggtcgggtgctgatgttacagcggcgcgacgataccgagttctggcagtcggtcaccggcagcctggaacaggatgagtcgccgccgcatgccgcgcggcgtgaagtcatggaagaggtcggcatcgatatcgaagcagagcatctgccgttgttcgattgccagcgctgcgtggagtttgaactctttgtccatttgcggcatcgctatgcgccgggaaccacgcgcaataaagagcactggttctgtctggcgttgcccgaggagcgcgatccggtgattaccgagcatcacgcttaccaatggcttgaggcggccgaggccgtcaagttgaccaagtcgtggagcaatcagcaggcgattgaagagttcgtgatcaattcagtccagtag

SEQ ID NO: 423610 - DNA, 744 bp, Serratia marcescens
atggcaggtcatagtaagtgggccaacacaaagcaccgtaaagcggcgcaggacgccaagcgcggtaaaattttcaccaagattattcgtgagctggtcacggccgccaagctgggcggcggcgatccggattccaacccgcgtctgcgcgcggcgatggacaaggcgctgtcgaacaacatgacgcgcgacaccatgaaccgtgcaatcgcgcgcggcgtgggcggcgatgatgataccaatatggaaaccatcatctatgaaggttacggccctggcggcaccgccgtgatgatcgaatgcctgagcgacaaccgtaaccgcaccgtggcggaagtgcgccacgccttcaccaaatgcggcggcaacctcggcaccgacggttccgtggcttacctgttcaccaagaagggcgtgatcacctacgcaccgggcctggatgaagacaccgtgatggaagcggcgctggaagccggtgcggaagacatcgtgacctatgacgacggcgccatcgatgtgttcaccgcctgggaaagcctgggcgcggtgaaagacgcgctgaccgcggcgggcttcgaagccgaagcggcggaagtgtcgatgatcccatcgaccaaggccgacatggacgcggaaaccgcgcctaagctgctgcgcctgatcgacatgctggaagactgcgacgacgtgcaggaagtttaccataacggtgaaatctccgacgaagtggcggcgacgctgtaa

SEQ ID NO: 423611 - DNA, 522 bp, Serratia marcescens
atggcgatcatactcggtatcgatcccggctcacgcgtcaccggctatggccttatccgccagcaggggcgtcagttgagctatattgccagcggctgcatccgcacggtggtggacgacatgccgacgcggctgaagctgatttacgccggcgtcagcgagatcatcacccagtttcagcccgacttcttcgccgtcgaacaggtgtttatggccaagaacccggactcggcgctcaagctcggccaggcgcgcggcgtcgcgatcgtcgcggcggtgaatcagaatctggaagtgttcgagtatgcggcgcggcaggtcaaacagaccgtggtcggcaccggcgcggccgaaaaggcgcaggtacagcacatggtgcgctcgctgctcaaactctcggccaacccgcaggcggacgccgccgatgccctggccatcgccattacccactgccacctcagccagaacgtactgcggatgagcgaagggcggttgaacctggcgcgcgggcgtttgcgctga

SEQ ID NO: 423612 - DNA, 615 bp, Serratia marcescens
atgataggtcgtctcagaggaaatattctggaaaagcagccgccgctggtgttactggaggcgaacggcgtgggctatgaggtacacatgccgatgacctgcttttacgagctgccggaactggggcaagaggccatcgtgtttacccacttcgtggtgcgtgaagacgcgcagctgctgtatggtttcaacgacaagcaggaacgcgcgctgttccgcgagctgatcaaggtcaacggcgtcgggccgaaactggcgttggcgatcctgtcgggcatgtctgcgcagcagttcgtcagcgcggtggagcgcgaagagatcaccgcgctggtcaagctgccgggcgtaggcaagaaaaccgccgagcgcctggtggtagagatgaaagaccgcttcaaagggctgaacggcgatctgttcaacagcagcagcgagatcagcctgccgtccgccgccgccaacgcgccggaagcggacgcagaagccgaagctgtctcggcgttggtggcgctgggctataagccgcaggaagccagccgcatgatcagcaaaattgccaaaccgggcgccgactgcgagaccctgatccgcgacgcgctgcgcgcggctttgtaa

SEQ ID NO: 423613 - DNA, 1005 bp, Serratia marcescens
atgattgaagccgatcgcctgatctccgccgaaccgatcaacgaggaagaagtcctcgatcgcgccattcgtcccaagctgttgaccgaatacgttggccagccgcacgtgcgcgagcagatggagatcttcatccaggcggccaagcagcgcggcgacgcgctcgaccatctgctgatcttcggcccgccgggcctggggaaaaccaccctggccaacatcgtggccaacgaaatgggcgtgaatctgcgcaccacctccggcccggtgctggagaaggcgggcgatttggcggcgatgctgaccaacctcgaaccgcacgacgtgttgttcatcgacgaaatccaccgtttatctccggtggtggaagaggtgctgtatccggcgatggaagactatcagctggatatcatgatcggcgaagggccggcggcgcgttcgattaagctcgatctgccgccgtttaccttggtgggcgctaccacccgcgctggctcgctgacctcgccgctgcgcgatcgcttcggcattgtccagcggctggagttttatcaggtggcggatctgcagcacatcgtctcgcgcagcgcaggctgcctggggctggagctgtccgacgagggcgcccatgaagtggcccgccgtgcgcgcggtacgccgcgtatcgccaaccgcctgttgcgccgggtgcgcgactttgccgaggtgcgcgccaacggcgtgatcagcggcgcggtggcggcgcaggcgctcgatatgctcaacgttgacgccgaaggtttcgactatatggatcgcaagctgctgttagcgattatcgacaagtttaccggcggcccggtcgggctggacaacctggcggcggcgatcggcgaagagcgcgaaaccatcgaggacgtgatcgagccgttcctgatccagcagggctttatccagcgcacgccgcgcggccgtttggcgacccagcatgcctaccggcatttcgggctggaacgcgaagcataa

SEQ ID NO: 423614 - DNA, 786 bp, Serratia marcescens
atgatcgaactgttacttcccggctggttggccggcgtgttgttggccggcgccgccgggccgctgggctccttcgtggtctggcgccgcatgtcctactttggcgataccctggcgcacgcctcgctgctcggcgtcgcctttggtctgctgctcgacatcaatcctttctatgcggtgatcgccattacgctgctgctggctctggccctggtgtggctggaacgccgcccgcagctttcggtggataccctgctcggcattctggcccacagcgccctgtcgctgggcctggtagtggtggcgctgatgtccaacgtacgggtcgatctgatggcctatctgttcggcgatctgctgtcggtcacgctgagcgatatcatgatgatcgccggcggcgtcgccgtggtgctgttggtgctgtggtggcagtggcgcgatctgctgtcgatgaccatcagcccggagctggcgcacgtcgacggcgtcaatctggcgcgggcgcgcaccgtgctgatgctggtgaccgcgttgaccatcggcctggcgatgaaattcgtcggcgcgctgatcatcacttcgctgctgatcattcctgcagccaccgctcgccgcttcgcgcgcacgccggaacagatggccggcgtcgcggtactgctcggcatggtggccgtcaccggcggcctgactttctcggcgtgttacgatacgccggccggcccttcggtagtgctctgcgccgccgtgctgttcacgctgagcctgttcaaaaaacagcaggcttga

SEQ ID NO: 423615 - DNA, 759 bp, Serratia marcescens
atgtctacactgataacgctaaaaaatatctccgtcgccttcggcagccgcaaggtgctgtcgaacatttccctcagcctgcaacccggccgtattctcacgcttctgggcccgaacggcgcaggcaagtctacgttggtgcgcgtggtgctgggattggtcaaaccgaccgacggcacgctggagcgtgagcccgatctgcgcatcggctacgtgccgcaaaagttgcacctcgacgccaccctgccgctgaccgtcagccgctttatgcgcctcaagcccggcgtcaagaaagccgacattctgccggcgctcaagcgcgtgcacgccgcccacctgctcgaccagccgatgcaaaagctctccggcggtgaaaaccaacgcgtgctgctggcgcgagcgctgctgaacaaaccgcagctgctggtgctggacgaacccacgcagggagtggacgtcaacggccagctggcgctgtacgatctgatcgatcaactgcgtaaagagctcggctgcgccgtgctgatggtgtcgcacgatctgcatctggtgatggcgaaaaccgacgaggtcttgtgcctcaatcagcacatctgctgctcaggggcgccggaagtggtgtcgatgcatcccgaattcatcgccatgttcggcaaccgcggcgcagagcagctggcggtatatcgccaccatcacaatcaccgccacgacctgcagggaagaattgtcttgaagaaaaccgggagccgcgaagcatga

SEQ ID NO: 423616 - DNA, 948 bp, Serratia marcescens
atgatggcaaagaaaaataaatggctgcagcgcacgctgctggccagcgcactgttgatggccggcccgctgagcagcgcttccgcggcggtggtgacctcgattcgtccgttgggctttatcgcttcggccatcgccgacggcgtgacgccgaccgaagtgttgctgccggatggcgcttcaccgcacgattttgcgttgcgtccttccgatattcagcgcttgcgttccgcggacctggtgctgtgggttgggccggacatggaagcgttcctgaacaaggcgctggtgccgatctcggcgacccgaaagctggccatcagcgaactgccggcggtgaagccgctgctgatgaaaggcgaagaggacgacgatcatgatcatgcaggcgaagcgcataaccatgccgatgacgatcatgggcatcatcacggcgagtacaatatgcacgtttggctgtcgccggagatagcaaaagtgaccgcgatcgcgattcacgacagattgttggaacttatgccgcaaaataaggacaaattagacgcaaacctgcgccagttcgagaatctgctgacgcaaactgacaaaaatgttggtaacatgcttacgcctgtgcaaggtaagggttattttgtttttcatgatgcttacggctactttgagaaacactacggtttgagtccgctgggccatttcaccgtcaatcccgaaattcagcctggagcacagcgcctacaccaaattcgaacacagttggttgagcagaaagcggtatgcgtttttgctgagccacaattcaggccggccgtaatcaatgccgtcgccaagggtaccaaagtgcgttccggaacgctggacccgctgggcatcggcatcgcgctggggaaggacagctacgggaaattcctgactcagctgtcaaaccagtacgtgagctgcctgaagtaa

SEQ ID NO: 423617 - DNA, 1323 bp, Serratia marcescens
gtgcagcagatagtccgaactatcgctctggcgtataacaacctgccacggccccaccgcgtcatgctggggtcgctgacagtcgtcacattggccgtcgctgtttggcggccttttgtttaccacccagaacacaatcccatcgccaagagcgtcgagttagaatccagccagatgcggtcattgctccccgaagccagtgagccgattgatgccgaccaacccacccccgatgacgaaatcccgcaggatgagctggatcagaaagacgccggcgacgatggcgtgcatgaatatgtggtttccaccggcgacaccctcggcagcattctgacgcaatatggcatcgatatgtcggatgtcacgctgctggcctcgcaaaaccgcgatctgcgtaatctgaagatcggccaacagctgtcgtggaccgtgaacgatgcgggcgatctgcagcagttgacctgggaagtttcccgccgcgaaacccgcacctatgaccgcgtcggcaacagcttcaaagagtcgaaagaggcgcagcagggcgaatggcgcaacaacgtgatcagcggccgggtcaacggcagcttcgtcagcagcgccggcgacgccgggctgagccgtaacgaaatcaactcggtgattaaggcgctgcagtggcagctcgatttccgcaagctacgcaaaggcgaccagttctccgtgctgatgtcgcgcgagcatttcgacggcaagaaatcgcaaagccagctgttgggcgtgcgtctgcgcaccggcggcaaggattactacgcgatccgcgccgaagacggcaaattctacgatcgccagggctcaggcctggcgcgcggcttcatgcgtttcccgaccatgaaacagttccgcatctcctccaacttcaacccgcgccgcgtgaacccggtgaccggccgcgtggcgccgcacaaaggcgtcgattttgccatgccggtcggcacgccggtgctggcggtcggcgacggtgaagtggtgatcgccaaacgcagtggcgcagcgggcaactatgtggcgatccgccacggtcgtcagtacaccacgcgttatatgcacctgaaaaagctgctggtgaaaccgggccagaaggtgaaacgcggcgatcgcattgcgctctccggcaacaccggccgctccaccgggccgcacctgcactttgaactgtggaccggccaacaggcggtgaacccgctgacggccaagctgccgcgttccgaagggctgagcggcaaagatcgcagcgattatctggcgcaggtgaaggaagtggttcctcaactgcagttggattaa

SEQ ID NO: 423618 - DNA, 969 bp, Serratia marcescens
atgcaaaacgagaagaaatcgaacgtagagttcatcccgcagtttcaaaaagcctttttatatccgcgctactggggcgtgtggttgggaaccggcctgatggccggcatttcgctggtgcccgcgcgcctgcgcgatccggtgctgggtgcggtcggcaaactggccggcaagctggcgaagggcgcgcgccgccgtgcccgcatcaacctgctgtattgcttgccggggctgccggaaagcgaccgcgagcacattatcgaccagatgttcgcctgtgcgccgcagtcgatggtgctgatggctgagctggcttgcaccaagcccgagaaagtgctcaagcgcgtgcgttggcacggtgaagaggtgttggacaagatccgggcggaagggcgcaacgtgattttcctggtgcctcacggctgggcggtggatgtgccggcgatgctgatggccgcgcgcggccaaccgatggccgcgatgttccacaaccagcgcaatcagctgatcgactacctgtggaacgccgtgcggcgtaaattcggcggccgcatgcacgcgcgcaacgacggcatcaaaccgtttatcagttcggtgcggcaggggtattggggttactatctgcccgatcaggatcacggcgccgagcacagcgagttcgtcgatttcttcgccacctataaggcgacgctgccggcggtggggcggctgatgaaggtgtgtcgtgcggcgatcgtgcctttgttcccggtgtacgacggcaaaaccagtatgctggatatttatattcgcgagccgatggacgatctggccgaagccgacgatccgcacattgcccgccgcatgaatgaagaagtggaaaatctggtgggcccgaacccggagcagtacacctggatcctcaaactgctgaagacgcgcaaggaaggggagattgaaccttactcgcgcgacgatctgtatcgttaa

SEQ ID NO: 423619 - DNA, 882 bp, Serratia marcescens
atgctccaccaacacactcccgcagcgagcggtgatgagctcgatctcgacggccacagcctgacgcagctcgacgaatcgccgttagccggcggcgcgctgcgcaagattagcctgtacgacaatcaactgacggccctccctgtcgccctcttccggcaccgaaatctgcgggtgctgaatatctcctgcaatcagctcgaccgcctgccgccggagattggccagttgcaacagctcgagatgttcgactttggccacaatcgcgcaaacgaactccccgaagaactggggcagctgcatcggttgaaatacctctatctgagcgataacggctttagcgatctgccgcgctcgctggcgcagctgcagcagctggtttacctcaacgcgaccgacaatcatttaaccgttttgccacaggcgataccgaggctggcggcattgcaggagctgcgtttatacaacaaccgcatcggcaacctgcccgccgaaatcgggcaactgcacgcgctgcgcgaactgcatatcatgaaaaatgccctgacctcgctgccggcggaaatggctcagctcggtgagctggagatactcgacgcggctaacaatgccatcgccgagctgccgcaggccttctgtcggctgccgcggctgagcgagctgaacctgcgtttcaatcatctgacgcgtctgccggaaaatatcggcgagctgacggcgctgagaagtctggatctgcgcgccaaccgcctgagcgacctgccggaaagccttggtgaactgagccgactgcgcaaactggacctgcgctggaatgatttcacccgcacgcctaaagtcgtcgacatcctgcgggctcgcggctgtagggtgcatatatga

SEQ ID NO: 423620 - DNA, 1443 bp, Serratia marcescens
atgtccagacggctcagaagaaccaaaatcgttaccaccctgggtccggctactgaccgcgacaataatctggaaaagatcattgccgccggcgccaacgtagttcggcttaacttctcccacggcagcccggaagatcaccaggctcgcgctgacaaagtgcgcgaaatcgccgcaaagctgggacgtcacgtcgctatactcggcgatctgcaagggccgaaaatccgcgtctccaccttcaaggaaggcaaaatcttcctcaacgtgggcgataaattcctgctggacgccaacctgtcaaaaggcgaaggcgataaagaaaaagtcggtatcgactataaaggcctgcctgccgacgtggtgccgggcgatgtcctgctgctcgacgacggccgcgttcagttgaaagtgctcgaagttcagggcatgaaagtgtttaccgaagtgacggtcggcggcccgctgtccaacaacaagggcatcaataagctcggcggtggcctgtcggccgaagcgctgaccgaaaaagacaaggcggacatcgtgaccgccgccaagattggcgtcgactatctggcggtttccttcccgcgcaccggtgaagacctgaactatgcccgccgcctggcgcgcgacgccggctgcaacgccaagatcgtgtccaaggttgagcgcgccgaagcggtctgcagcgacgaagcgatggacgacattattctggcctccgacgtggtgatggttgcccgtggcgatctcggcgtcgaaatcggcgatccggaactggtcggcattcagaagaaactgatccgccgcgcccgtaccctgaaccgcgcggtaatcaccgcaacccagatgatggagtcgatgatcaccaacccgatgccgacccgcgccgaagtcatggacgtggccaacgccgtgctggacggcaccgacgccgtcatgctgtcggcggaaaccgccgccggccaatacccggcggaaaccgtggcggcgatggcgcgcgtttgtctgggcgccgagaagatcccgagcatcaatgtttccaaacaccgcctggacgtgcagttcgacaacatcgaagaagcgattgccatgtcttcgatgtatgctgccaaccacctgaaaggcgttaccgcgctgatcgccatgaccgagtccggccgcactgcgctgatgatgtcacgcatcagctccggcctgccgatcttcgccatgtcgcgtcatgagcatacgctgaacctgaccgcgctgtatcgcggcgtgacgccggtgtatttcgacagccacaaagacggcgtgatcgccgccaatgaagccgtcaatcgcctgcgcgacaagggcttcctggtctccggcgatctggtgatcgttacccagggcgacgtgatggaaaccgtcggcaccaccaataccagccgtatcctgcgcgtcgagtaa

SEQ ID NO: 423621 - DNA, 891 bp, Serratia marcescens
atgagtgactctcgttatatgaatacgctggacaaaatccagagccatctggaactcctgagcaaatctgaaaggaaagtcgccgaggtgatcctggcctccccgcagaccgccattcactccagcatcgccacgctggcgcgcatggccgacgtcagcgaacccaccgtcaaccgtttttgccgccgccttgataccaaaggctttcccgacttcaaactgcatctcgcccaaagcctggctaacggcacgccctacgtaaaccgtaatgtcgaggaagacgacagcgtcgatgcctataccagcaagatcttcgaatcggtcatggccagcctggatacagtaaaggcaaatttggatattgccgcaatcaatcgtgcggttgacctactcacccaggcaaaaaagatctctttcttcggcctgggcgcctccgcggcggtagcgcacgatgcgatgaacaaatttttccgcttcaacattccggtggtctacttcgatgacatcgtcatgcagcgcatgagctgcatgaactccggcgaaggcgacgtggtggtgctgatctcacacaccggccgcaccaagaatctggtggagatggcccacctggcgcgagaaaacgacgccacggtattggctatcacctcgcgcgacaccccgctcgcccaggcagcgaccctcgctctgctgctcgacgtgcccgaagacaccgacgtttacatgccgatggtgtcacggatcgcgcaattaacgctcattgacgtgctagccaccggatttaccttgcgccgaggggctaaattcagagataacttgaagcgggtcaaagaagcgctcaaagaatcgcgctttgataaaggcgtggtcattcccaacagttttgattcgtga

SEQ ID NO: 423622 - DNA, 1476 bp, Serratia marcescens
atggcggtaacctctacagcccaggcgtgtgacctggttattttcggcgcgaaaggtgatttggcgcgccgtaagctgctgccttccctgtaccagttagagaaagccggacacatccacccggaaacgcggatcatcggcgtcggccgcgcggagtgggataaaaaagcctataccgaagtggtcaaggaagcgcttggcaccttcatgaaggaaaaactggatgatgaactctgggccacgctgagcgcacgcctggacttctgcaatctggacgtcaacgacagcaagaactttaccaaattgggtaaaatgctggatcagaaacaccgcaccaccatcaactacttcgccatgccgccaagcaccttcggcgccatctgcaaagggttgggcgaagccaaactgaaccatgagccggcgcgcgtggtgatggagaagccgctgggcaccgatctggcgtcttcccgcgtgatcaacgaccaggtggcggagtacttcaacgaatcccaggtttaccgtatcgaccactatctcggtaaagagacggtgctgaacctgttggcgctgcgtttcgccaactcgctgttcgcatccaactgggataaccgcaccatcgattcggtgcagatcaccgtggcggaagaggtgggcatcgaagggcgctggggttacttcgaccaggccggccagatgcgcgacatgatccagaaccacctgctgcagatcctgaccatgatcgccatgtcgccgccggcggatctgaccactgaccgtatccgcgacgagaaggtgaaggtactgcgttcgctgcgccgcatcgatcagaccaatgtacgggaaaccaccgtgcgcggtcagtacaccgccggtttcgtccagggcaagaaagtgccgggttatctggaagaggaaggggcgaacaagagcagcagcactgaaactttcgtctccatccgcgtggatatcgacaactggcagtgggccggggtgccgttctacctgcgtaccggtaaacgtctgccgaccaaatgctcggaagtggtggtgtacttcaaaaacccaccgcttaacctgttcagcgactcttatcaacagctgccgcagaacaagctgaccatccgcctgcagccggacgaaggcatcgaaattcaggtgctgaacaaggtgccggggctggatcacaagcaccgtctgcagaccaccaagctggatctgagcttctcggaaaccttcaaccaggagcacgtggcggacgcctacgagcgcctgctgctggagaccatgcgcggcattcaggcgctgtttgtgcgccgcgatgaagtggaagaggcctggaagtgggtcgactccatcatggacgcatggaaagccgacaacgaggcgccgaagccttatcaggcgggcacctgggggccggtggcctcggtggcgatgatcacccgcgacggccgttcctggaacgagttcgagtaa

SEQ ID NO: 423623 - DNA, 642 bp, Serratia marcescens
atgaaaaactggaaaaccagcgccgagcagatcctgacggcagggccggtggtgcctgttatcgtgatcaacaagctggagcaggcggtgccgctggcgaaagcgctggttgccggcggcgtgcgggtattggaggtgacgctgcgcaccgcctgcgggctggaggcgatccgcgctatcgccaaagaggtgccggaggccattatcggcgccggtacggtgatcaatccgcagcagctgcgggaggtgaccgaagcgggggcgcagttcgccatcagcccggggctgaccgaagccttgctgcaggcggcgacggcggggtctatcccgctgatcccgggcatcagcaccgtttccgagctgatgcagggcatggatcacggcctgcgcgagttcaaattcttcccggcggaagccaacggcggcgtgaaggcgctgcaggcgatcggcggcccgttcccgcaggtgcgtttttgcccgaccggcggcattacgccgaacaactaccgcgattatctggcgctgaacagcgtactttgcatcggcggttcctggctggtgccggcggacgcgctcgaaagcggcgactacgcgcgcatcactgaactggcgcgcagcgccgtcagcggggccgcgttgtaa

SEQ ID NO: 423624 - DNA, 369 bp, Serratia marcescens
atgatttattggatctttttaggtttggccatcatgaccgaaatcatcggcaccttgtcgatgaaatacgccagcgtcaatggcggcatgatcgggcacatcgtgatgtacgtgatgatcaccgcgtcttatgtgttgctgtccgtagcggtaaaacgcgtggcgctgggcgtggcctatgcgctgtgggaaggcatcggtattctgttcattaccctgttcagcgtgctgtggttcgacgagccaatctcggcgctgaaggtgctgggcctggctacgctgatcgccggcatcatgctggtgaaatccggtacccgcaaagagcgaaaacaggtcagcccgcgaggtaacaaccatgcaacagtttga

SEQ ID NO: 423625 - DNA, 330 bp, Serratia marcescens
atgcaacagtttgagttgtaccacattgggttcctggggctggcgatcgtgctggaaatcatcgccaacatcttcctgaagatgtcggacggcttccgtaaaatttggctggggctgttgtcgctgctgtcggtgctcggcgcgttcagcgccctggcgcaggcggtgaagggcatcgatctgtcgatcgcttatgcgctgtggggcggtttcggtatcgccgccaccatcgccgcaggctggatcatgttcggccagcggttgaacgccaaaggctggattggcctggcgctgctgctgatggggatggtgatccttaaactatcctga

SEQ ID NO: 423626 - DNA, 345 bp, Serratia marcescens
atgaatatcgaaagaattgatcccgatcagcgctggtccgaagccgtggtgcacaacgagaccgtttactacaccagcgtgccggagaacctggacgacgacgcgaccgcgcagaccgccaacgccctcgccgccatcgacgtgctgctggcgcgcgtcggttcggacaaaagccgcattctggacgccaccatcttcctggccaacagcgccgacttcgccgcgatgaacgccgcctgggacgcctgggtggtcgccggcagcgcgccggtgcgctgcacggtgcaggcgcagctgatgaatccgaagtacaaggtagaaatcaaaatcatcgccgcgctgtaa

SEQ ID NO: 423627 - DNA, 1917 bp, Serratia marcescens
gtgacagacgattttgcaacagacggcgcattggcgcaggctatcaagggattcaaaccgcgtgagccgcagcggcagatggcgcaagccgtcaccgaggcaatcaatttcaagcaggagctggtggtggaagccggcaccggcaccggcaaaaccttcgcttatctggcgccggcgctgcgcgccgatcgcaaagtgatcatctctaccggttcgaaagcgttgcaggatcagctgtatgcgcgcgatctgcccaccgtcgccaaagcgttgaagtacaaaggcaagctggcgctgctgaaggggcgctctaactacctgtgtctggagcggctggagcagcagtcgatggccggcggcgagctggcggggcagacgctgatcgatctggtgcagctgcgcaagtggtcgtcgcagaccaaagagggcgacatcagcacctgcagcgaagtggcggaagacagcttcgtctggccattggtgaccagcaccaatgacaactgcctgggcagcgattgcccgctgtatcaggattgcttcgtggtcaaggcacgccgccgcgcgatggatgcggatgtggtggtggtaaaccatcacctgttcctggcggatatggtggtgaaagagggcggtttcgccgagctgatcccggaagccgaggtgatgattttcgacgaagcgcaccaaatccccgacatcgccagccagtatttcggccaacagctcaccagccgccaactgttggatctggcgaaggacatcaccatcgcctaccgcaccgaggtgcgcgacgccgctcaactgcaaaaaagcgccgaccgtctcagcctgagcacgcaagatttccgtctgaatctgggcgagccgggttttcgcggcaatctgcgtgacgtgctcggtgaaccgaacgtgcagcgcgctctgttgctgctcgatgacgcgttggagctgtgttatgacgtgatgaaactgtcgctggggcgttcggcgctgctggacgccgcctttgagcgcgccacgctgtaccgcgcgcgcctcaagcggctgaaggcggtgacggagcctggctacagctattggtatgaatgcaactcgcgccatttcgtgctggcgctgacgccgctgacggtagccgatcggttccgcgaaatgctggacgagaagccgggcagttggatctttacctcggccacgctgtcggtcaacgatcggttgggccacttcaccgaacggctggggctgaccaaggccaaaacgctgctgttgccgagcccgttcgactatgccaagcaggcgctgctgtgcgtgccgcgctttttgccgtcgccgaatcagcgcggcggggcgcgccagctggcgcgcatgctgcggccattaattgaagccaacaacggccgctgcttctttttatgcacctcgcaccagatgatgcgcgagttggcggaagagttccgcgccaccatgacgttgccggtgctgttgcaaggggaaaccagcaaagggcagctgctggcgcagttcgtcgccgccggtaacgcgctgctggtggcgaccagcagcttctgggagggggtggacgtgcgcggcgatgcgctgtcctgcgtcatcatcgataaactgccgtttacctcacctgacgatccgctgctgaaggcgcgcattgaagattgccgcctgcgcggcggcgatccgttcaatgacgtgcagctgccggatgcggtcatcaccctgaaacagggcgtcggccgtttgatccgtgataccgacgatcgcggcgtgctggtgatttgcgataaccgtctggtcatgcggccctacggcgaggtgttcctcaatagcctgccgcctacgccgcgcacccgcgatttgaagcaggcgatcgccttcctgcaggccgccgacacgtcggccacgtga

SEQ ID NO: 423628 - DNA, 702 bp, Serratia marcescens
atgtccacgcgaattttagcgatcgataccgcgacggaagcctgttccgtcgccgtctggaatcaaggcgaaatccacgccctgtttgagctgtgcccacgcgagcatacgcaacgtattttacctatggtgcagcaggtgctggcggaatccggcctggcgctcaaccagctcgatgcgctggcctttggccgcggccccggcagctttaccggggtgcgcatcggcattggtatcgctcagggcctggcgctgggcgccgatctgccgatgctcggtatttccacgctgcaaaccatggcgcagggcgcctggcgcgtctgcggcgcggagagggtgctggcggcgatagatgcgcgcatgggtgaagtctactgggggcagttcgaacgccaagcggacggtagctggttggaaagcgaaggcgaggcggtgttgtcgccggcgcaggcgctggagcgtgcgcagcgcctgcagggcgaatgggcccatgtcggcaccggctggcaaacctatcccgatctggtcaaggggtctacgctgagcgtgcgtgacgggcagatgctgttgccgcaggcgcaagacatgctgccgctggcgctgcacgcctggcaacaggggctggcggtggcggtggaaaacgccgagccgacctatctgcgcaatgaagtcacctggaaaaaactgccgggccgcgagtaa

SEQ ID NO: 423629 - DNA, 591 bp, Serratia marcescens
atgttaatccgcactgcaagtaaaaagctgtcgctgctggccgtcgcctgcggcgcgctggttctgtccgggtgcgtcaccgtaccggatgcgatcaaaggttccaccccttcgccggtgactcagctttcctcggtacaaaatgcacctaatctgtttaccggcgcggaagcccgcttcggcggcaccgtagtaaacgtcgccaacgagcaagggcgcacggtgctggagatcgcggcggtgccgctcgacagcggtgcgcggccgattttgggtgaaccgtcgcgcggccgcttgctggccacggtaaacggcttcctcgaacctgttgatttcaaaggccagttggtgaccgtcgtcggccccattaccggcctgaaagaggggcgtatcggtatgacgccgtatcgcttcgtgacgatgaacgtgaccggtttcaaacgctggcacctggtgcagcaggtggtgatgccgcctgcgccaatgggcccctggggctggcgcggtggcccgtggggacccggttggggcgcaggctatggttggtacaatcctggcccggcacaggtgcaaaccatcgtaaccgagtag

SEQ ID NO: 423630 - DNA, 1689 bp, Serratia marcescens
ttggataaggtctggttaaaacggtatccggcagatgtgcccgcagagattgatgccgatcgctattcgtcgttgatcgaaatgtttgagcatgccgtgcagcgctatgccgatcagcccgcctttatcaacatgggcgaggtgatgaccttccgcaaactggaagagcgcagccgggctttcgcggcttacctgcaaaatgaactgggcctgaagaagggcgaccgcgtcgcgctgatgatgcctaacctgttgcaataccccatcgccctgttcggcattctgcgcgccggtatggtggtggttaacgtcaacccgctgtataccccgcgcgagctggaacaccagttgaacgacagcggcgccagcgccatcgtcatcgtctccaactttgcccatacgttggaaaaagtggtgttcaacactcaggtcaagcacgtgatcctcacgcgcatgggcgatcagctttcggccgccaaaggcacgctggtcaactttgtggtcaagtacatcaagcgcctggtgcctaaatataacctgccggacgccatttcattccgcagcgcgctgcagcgcggacgccgtctgcaatatataaagccggacatcattaataccgatttggccttcctgcaatacaccggcggcaccaccggcgtagcgaaaggcgcgatgctgacgcaccgcaacatgcaggccaacctcgaacaggccaaagccgcctactcgccgctgttccgtgaagggcaggaactggtggtgacggcgttgccgctgtaccacattttcgcgctgacggtgaactgcctgctgtttatcgatctgggcgggcgcaatttgctgatcaccaacccgcgcgatattccggggctggtgaaggagctgggcaaatacccgttcaccgccatgagcggggtgaataccttgttcaacgcgttgctgaacaacgaagagttccacaaactcgacttctccacgctgcgtttctcggtcggcggcggcatgtcggtgcaaaaagcggtggccgagaagtgggagaaaaccaccggcaaacacctgctggaaggctatggcctgacggagtgcgcgccgctggtggccggcaacccttacgatctgaaacactacagcggcagcatcggtttgccggtgccgtcgacggatattcggctgttggacgacaatggccaggatgtgccgccgggagaaccgggcgaactgtgggtcaaaggcccgcaagttatgttaggctattggcaacgcccggaagctaccgacgaagtgctgaaagatggctggttggcgaccggtgatgtggtgaccgtggacgagcaggggtttgtgcgcatcgtcgaccgtaagaaagacatgatcctggtctctggtttcaacgtttacccgaacgagatcgaggacgtggtcagccagcatccgaaggtgctggaatgtgcggcgatcggggtacccagcgaggtctccggcgagacggtgaagatctgcgtggtgaagaaagacgcctcgctgaccaaggaagagctgttgacccattgccgtcggcacctgaccgggtataaagtgcctaaaattgttgagttccgcgatgaattgccgaagtcgaacgtcggcaagattttgcggcgagaactgcgcgatgagctaaaaacgccgaaaccggccgatgccgcctag

SEQ ID NO: 423631 - DNA, 1122 bp, Serratia marcescens
ttgaattatcagttgatcactaccgatgccggattgcagcaggtctgcgagcaggcgagaaagcatgcccagattgcgctggacaccgagtttgtcagaacgcgcacctactatccgcagctgggcctgatccagctctacgacggtgaacaactctcccttatcgatcctctgccgatcaagcaatggcagccgtttgtcgacctgctggccgataccgccgtggtgaagttcctgcatgccggcagtgaagatcttgaagtgtttctcaacgcctttaaaacgctgccgacgccgatggtcgatacccagatcctggcggcgtttaccggccggccgctctcctgcggtttcgcgacgctggtggcggagtatatgaaagttgagctggacaagagcgagtcgcgcaccgactggctggcgcgcccgctgaccgaaaggcagtgcgtgtacgcagccgccgacgtgttctatctgctgccgatggctaaacagctggtgcaggagaccgaagaggccggttggaccgcggcggccaacaacgagtgcctgctgctgtgccagcgccgcagcgaggcgctggcgccggaattggcctatcgcgaaatcagcaatgcctggcagctgcgcccgcgtcagctcggttgtttgcagaagttggcagaatggcggctgcgccaggcgcgcgagcgcgatctggcggtgaacttcgtggtgcgtgaggaaaacctgtggcaggtggcgcgctatatgccgtcttcgctgggagaactggattcgctgggcctgagcgggccggagatccgttatcacggtaaaacgctgctggcgctggtggcggaggccgaagcgctggacgaatccgagctgccggcgccgttggcaaacctgatcgatcagccgggctacaagaaggtgttcaaagacatcaaggcggcgatcgctaccgtcagcgagcaaagcgggttgagcagcgaactgctggcatcccgtcgccaaattaaccaattgctgaactggcattggcaactgaaagacggcgaaagtcgccctgaattaatcagcggctggcgcggcgatctattaatggcaccgctgcaggacatcctgaaagattattaa

SEQ ID NO: 423632 - DNA, 270 bp, Serratia marcescens
atggccttattagacttctttctgtcccgcaaaaaacagacagccaatatagccaaggaacggctgcagattatcgtcgcagagcgtcgtcgcggggacagtgagcccccgtatctgcctgatctgaaacgcgatattctggcggttatttgcaaatacattcagatcgatcctgaaatgctgcacgtgcagttcgagcagaaaggggacgatatttcggtacttgaacttaacgtgacattaccggaatcggaagaagcagctaaatga

SEQ ID NO: 423633 - DNA, 813 bp, Serratia marcescens
atggcacgcattattgttgttacatcgggtaaagggggcgttggcaagaccacttcgagcgcggccatcgctaccggcctggcccagaaaggcaagaaaaccgtcgtgatcgatttcgatatcggcctgcgtaatcttgacctgatcatgggctgcgaacgtcgggtagtgtatgatttcgtgaacgtgattcagggcgatgccacgctgaatcaggcgttaatcaaagacaaacgcactgaaaacctctatatcctgcctgcttcgcagacgcgcgacaaagacgcgttgacccgcgaaggcgttgaaaaaattctcaacgatctcggcgagatggattttgacttcgtggtgtgcgattcaccggccggtatcgaaaccggtgcgctgatggcgctgtatttcgccgacgaagctatcatcaccaccaacccggaagtatcttcggtacgcgactccgaccgtatcctgggcatcctctcctccaagtcacgccgcgccgagaaaggcgagtcacccatcaaggaacacctgctgctgacccgttacaacccgggccgcgtcagccgtggcgacatgctgagcatggaagacgtgctggaaatcctgcgcattccactggtgggtgtaatcccggaagaccagtccgtgctgcgcgcttccaaccagggtgagcctgtcattctggatgccgagtcagacgccggtaaggcgtacgacgataccgtttgccgcttgttgggggaagaacgcccattccgcttcattgaagaagagaagaagggtttcctgaaacgcctttttgggggataa

SEQ ID NO: 423634 - DNA, 696 bp, Serratia marcescens
atgtcacaatcgccaattgagctaaaaggcagcagttttaccctatcggttgttcatttgcataattcgcagcccgaggtaatacgtcaggcgttacaggaaaaagttgagcaagcgcccgcttttctgaaaaacgcccctgttgttatcaacgtcgcaacgctggaaggcgatgcgaactggaaagaacttcaacaggctgtcgcggcagcaggtctgcgcgttgtgggtatcagcggttgcagagatgagcgtcaaaagcgcgcgatagcccgcgccgggctgccgctgctgagcgaaggcaaaggccagaaaatggcggcgccggagcctgcacctgcgcccgtggtggcggataacgcccccgccaaaacgcgcatcatcagcacgcctgtccgttccggccaacagatttacgcccgcaactgcgatcttatcgtgaccagcagcgtcagcgccggcgccgaactgattgccgacggcaacattcatgtctacggcatgatgcgcggtcgcgcactggcaggcgcgtcaggcgacacgcaatgtcagattttttgcacccacctggcggctgagctagtctctatcgcagggcagtactggttgagcgaccaaatcccgtccgattacgtcgggcaggccgtacgactcagcctgttggataacgctttaaccatacaacctttaaattaa

SEQ ID NO: 423635 - DNA, 273 bp, Serratia marcescens
atgctttgtgtgatctatagaagcccgaaacgcgatcaaacttatctttatgtcgaaaaaaaagacgatttctctcgtgtgccagaggatctgatgaaaagtttcggcgtgccgcaattcgccatgatgctttcgctcgatgagcgcaagaaattggcctcggcggatatcgaaaaggtgaagcaggcgttgaaagacgaaggctattacctgcagttcccgccgccggttgaaaacctgctcaatcagcatctggcgggcgacaaggcctga

SEQ ID NO: 423636 - DNA, 1023 bp, Serratia marcescens
atgacacgttcggcgagaagaaccgtattggccgcttggctggcgctgggcggtgtgctgatgcccggcgcgccgcaggcggctcaggagacgacgctggcggcgagcggccgcgatccggcgcagttcccggcgtatgtcgagcagctcaagcgccgggcgcgggaacagggcatcagccagggcacccttgaccgcgcttttgcgcaaatccatttcgtcgatcgggtgatcaaggccgatcgcaatcagccggagcagaaaattaccctggacgactacctgcggcgggtgatgtcgcccgtcaagatgcgtcaagggcgcgaactgtatcggcagcgccaggcgcaatgggcgcgcgccagcgagcgctaccgggtgccggggcgctatatcattgcgctgtggggcatggagagcgcctacggcaagattcaggggcgggaagatgtggtgtccgcgctggcgacgctggcgtttgaagggcgccgcgaggcctttttcagccaggagctgatggcggcactgcggatagtcgagcaggggcacgtcggcgatacgccgctgaaaggctcctgggccggcgcgatggggcaatgccagtttatgccgagctccttcttgcgctacgcggcggacggcgacggtgacgggcgcatcgatatctggaataacattgatgacgtctttgcgtctacggccagttatttgtccaaagagggctggcagcccggtatcggctgggggcgcgaggttaaactgcccgccggtttcaagcgatccgagctggggttgaaagacgcgcaggcgcgcagcgtcaacgcctggcaacagcgcggggtgcgtcgtgcggatggcagtgcattgccgcatgccgtccagcgcggttggatcatcgcgccggatgatctccaggggcggacgttcctggtctatgataatttccgcaccctcatgcactggaatcgctcttactatttcgccatcgccgtgggtatgatggcggacgcgatcgggcattga

SEQ ID NO: 423637 - DNA, 657 bp, Serratia marcescens
atgtatcaacatagagactggcagggttcgctgctcgattttccggtgaacaaggtggtttgtgtcggcagcaactacgccgatcacatcaaagaaatgggcagtgcggtttccgtcgagccggtggtgttcatcaaaccggaaacggcgctgtgcgatattcgccagccggtggctatccccaaagagttcggtgcggtgcaccatgaggtggagctggcggtattgatcggcacgccgttgaaacaggccaacgaagaccgcgttgcgcgggcgatcgccggctacggcgtggcgctcgatctgacgctgcgcgatctgcaggcgggttttaaaaaggccggtcagccgtgggaaaaggccaaggctttcgatggttcctgcccgatgtcggggtttatcccggtggcggaatttggcgatccgcaaaacgccgagctgtcgttgaccgttaacgatcaactgcgccagcagggcaatacgcgtgacatgatcacgccgatcctgccgcttatcagttacatgagccgtttcttcacgctgcgcgctggcgacatcattctgaccggcacgccgcagggcgtgggcccgatggcctccggcgacatgctgaaaatcagcctgaacggcaaaacgctcagtacccgcgtgatctga

SEQ ID NO: 423638 - DNA, 447 bp, Serratia marcescens
atgtcacaactcgctttttggcaacagaaaacgctggcggaaatgtcagaacaagagtgggaatcgctgtgcgacgggtgcgggcaatgctgtttgaataagctgatcgacgaagataccgacgagatttattttaccaacgtagcctgcaaccagctcaacatcaaatcctgccaatgccgcaactacgagcggcgcttcgagctggaagaagactgcatcaaactgacgcgcgagaacctcaccaccttcgattggttgccgccgacctgcgcctatcgcctgatcggcgaaggcaagccgctgttcccctggcatccgctgctgagcggctccaaggcggcgatgcacggcgagcgcatcacggtgcggcatatcgcggtgcgcgagagcgaagtggtggactggcaggaccatatcctcaacaagccggactgggccagataa

SEQ ID NO: 423639 - DNA, 531 bp, Serratia marcescens
atgttgcaattctttaaccgctgttcacaaggacgcggcgcctggctgctaatggccctgacagcgttggtgttggaactggtcgcgctctattttcagcacgttatgctgctgcagccgtgcgtgatgtgcatttatgagcgttgtgcgctgttcggcattctcggtgcctctctggtgggcgccatcgcgccgaaaaccccgctgcgctacgcggcgatcttgctgtggatctacagcgcctgggaaggcctccagctggcgtggaagcacaccatgatccagttgcacccttcgccgttcaatacctgcgacttcttcgtgagcttcccttcgtggctgccgctggacaaatggctgccggcggtgttccacgcttccggcgactgctccgtgcgccaatggcaattcctgacgctggaaatgccacagtggctggtcggcatcttcggcgcctatctgctggtggcgctgattgtgctgatcgcacaatttgttcgcccacgtcgccgcgatctgttcggccgctga

SEQ ID NO: 423640 - DNA, 1566 bp, Serratia marcescens
atggaaacaaccttgcgcagcgccctgctcaaaaattttctggggcaatctcccgactggtacaaactgaccattctcatttttctggcgatcaaccccctggtgttctttttcgccagcccgtttatcgcgggctggctgctggtggtcgagttcatctttaccctggcgatggcgctgaaatgctatccgctgctgccgggcggcctgctggcgctggaggcggtggccatcggcatgaccagcccggcgcaggtttcgcaggaaatcgaacataacctggaagtgctgctgctgctgatctttatggtggccggcatctactttatgaagcagctgctgctgttcgtgttcaccaagctgctgctcaatatccgttcgaaaacgctgctgtcgctggcgttctgcctggccgccgccttactttccgccttcctcgacgcgctgacggtcgtggcggtagtgatcagcgtggccaccggcttttattccatctatcacaacgtgacctcgaatcgccccgatggcgacatcggcgatgacagcgatttcgccggtgaagagcgtaaacagacgctggagcaattccgcgcctttctgcgcagcctgctgatgcacgccggcgtcggcaccgcgctcggcggggtcatgaccatggtgggcgagccgcagaacctaatcatcgccaaaaacgcgggctggggctttatcgatttcttcctgcgtatggcgccggtcacgctgccggtgttggtgtgcggcctgctggtttgttggctggtagaacgttttcgcctgtttggctatggcgcgcagttgccggaggcggtgcgcgacgtgctgaaagagtatgaccgcaaggccaccgcgggccgcagcaagcaagaacggctcaaactggtgatgcaggcgctgatcggcgtttggctggtgctggcgctggccttccacctggcggaagtggggctgatcggcctgtcggtgatcgtgctcgccacctccctgtgcggcgtgaacgatgagcacgccatcggcaaagcgttccaggaagcgctgccgttcaccgctctgctgacggtgtttttcaccgtggtcgcggtgatcatcgaacagcacctgttcagcccggtgatccagttcgtgctgcgcgccgagcccgcctctcagctttcgctgttctatctgttcaacggcctgctgtcgtcggtttccgacaacgtgttcgtcggcacggtttacatcaacgaggcgcgcaccgcgctggaaaccggcgctatcgggctgaagcagttcgagctgctggcggtcgccatcaataccggcaccaacctgccatcggttgccacccctaacgggcaggcggcgtttctgttcctgctgacgtcggcattggcgccgctggtgcgtctgtcgtatggccgcatggtgtggatggccctgccttatacggtggtgctgacggtggttggcttgctgtgcgtccagttcacgctggaaccggcgaccgagctgttgacgcagtggcattggctgacgctgccgcccatcgacgccgtcggccactga

SEQ ID NO: 423641 - DNA, 720 bp, Serratia marcescens
atggtcataaaggcgcagagtcctgccggtttcgcggaagagtacattattgagagtatttggaataatcgcttcccccctggctctattttgcccgcggagcgtgagctttcggagttgattggcgtcacgcgcaccacgttacgtgaagtgttgcaacgtctggcccgcgatggctggttgaccattcagcatggcaaaccgaccaaagtgaacaatttctgggaaacgtccggcctcaatatccttgagaccgtagcccgtctcgatcacaaaagcgtcccgcagctgatcgataacctgctgtccgtgcgcaccaatatcgcgtcgatctttattcgcgccgcggtgcgcaatcatcctgagcaggcgcaggaagtgctggcgaaagccgccgaggtggaagatcaggcggacgctttcaatctgctcgattacgagatcttccgcggtttggcgttcgcttccggcaacccgatctacggcctgattttcaacggcctgaaagggctgtatacccgcgtgggccgttactacttctccaacccggaagcgcgcaagctggcgctggccttctacagcaagctgtccacgctgtgccatgagaagctgtacgaccaggtgatggataccgtgcgcaactacggtaaagacagcggggcgatttggcagagcatgcagggcaccatgccgagcgatctgaccgaagcgcgtcgctaa

SEQ ID NO: 423642 - DNA, 1536 bp, Serratia marcescens
atgactacttcaacacatgaaaaggtcaaggatgacaaacgtctgagcgatggaccggactggacgttcgaactgctgcaggtgtatttggagcagattgaccgcgtcgccaagcattaccggctcgacacctacccccatcagatcgaggtgatcacctccgagcagatgatggacgcctattcgagcgtcggcatgccgatcaactatacccattggtccttcggcaagaaattcatcgaaaccgaacagcgctacaaacagggccagcaagggctggcgtatgaaatcgtcatcaactccaatccctgcatcgcctacctgatggaggagaacactatcaccatgcaggcgctggtgatggcgcacgcctgctatggccacaactcgttcttcaagaataactatctgttccgcagttggaccgacgccagctccatcgtcgattatctgctgttcgcccgccactacatcagccagtgcgaagaacgctacggcgtcgatgaagtggagcggctgctggactcctgccacgcgctgatgaactacggggtcgacaggtacaaacgcccgcagaaaatctcactggtggaagagaaagcacgccagaaaagccgcgaagagtatctgcaaagccaggtgaacacgctgtggaagaccctgccacgcgtcgaacgtgaagagtcgccggagcaggcgcgccgctatccgagcgagccgcaggaaaacatcctctattttatcgagaaaaatgcgccgctgctggaaccctggcagcgtgaggtgctgcgcatcgtgcgcaaagtcagccagtatttttatccgcaaaaacagactcaggtgatgaacgagggctgggccactttctggcactacaccatcctcaaccatttgtacgacgagggccgtgtgaccgagcggtttatgctggagtttttgcacagccacaccaacgtggtgtatcagccgccgtacaacagcccgtactataacggcatcaacccttatgcgctgggcttcgccatgttccaggacatcaagcgaatctgccagtcgccaaccgaagaagaccgctactggttcccggacatcgccggcaaagactggctggacaccttgcacttcgccatgcgcgacttcaaggacgagagctttatcagccagttcctgtcgcccaaagtgatgcgcgatttccggttgttcaccgtgctggacgacgatcgcaacaactatctggaaattgccgcgatccacaacgaggccggttaccgggcgatccgccaggagctgtcggcgcaatacaacctgagcaatcacgagccgaacattcagatctggaacgtggatctgcgcggcgaccgctcgctgacgctgcgctacatcccacaggaacgcgcaccgctggataagagccgccgcgacgtgttgaagcacctgcatcgcctgtggggcttcgacgtgatcctcgaacagcaaaacgaagacggcagcgtggagttgctcgatcgctgcccgccgcggccgacgccgctgtaa

SEQ ID NO: 423643 - DNA, 651 bp, Serratia marcescens
ttggcgaggcattttggcaaactggcggtggcgctggccgcactgtttatcagcgggcaggcgtttgcccacgggcatcattcacatggcaagccgctgacggaggtggaaaaaaaagcggaggcgggcgtgttcgacgataaggacgtcaaagatcgcaatctggcggattgggagggcgtctggcaatccgtgtatccttatctgctcaatggggatcttgacccggtgttcaagaagaaagcggcaaaggataagagcaagaccttcgcggaagtaaaagcgtattaccgaaaagggtatgctaccgatgtggataccatcggcattgaaaacggcgtcatggagtttcatcgcggcgaccaatccagcgcctgtcagtataagtacgccgggcataagatcctgacgtatgtctctggtaagaagggcgtgcgttatctgttcgaatgccaggatgccggcagcctggcgccgaaattcgtgcagttcagcgatcatattatcggcccgcgtaaatcggcgcatttccatatctttatgggcaacacgtcgcaggaagcgttgctgaaagagatggacaactggccgacttattacccattccaactgcagaccaaagaagtcgtggacgagatgctgcatcattga

SEQ ID NO: 423644 - DNA, 318 bp, Serratia marcescens
atgttcatcgccatctaccggttctcagtcaaaaccggacacgaacacgcctttcgcctggcctggcttgagttgacccaagggatctatctgcagcgcggcagcctcggctcgcgcctgcatcgagatatgagcgggaagtttatcggctatgcgcagtggccaagccgagccgcatgggaaagcgccggtgatattcagctggatgagcgctatcgtcacgcccgggaacgaatgcgcgcgacgttattggcggatgaaacgttatttgaaatggcagtgacggacgattacctgcaaatcaggccgtttgcctga

SEQ ID NO: 423645 - DNA, 1305 bp, Serratia marcescens
atgcgagtggtaattttaggtagtggagtggtgggcgtagccagtgcctggtatttggcgaaggcagggcatgaggtgacggtgatcgatcgtcagcctggcccggcactggaaaccagcgcggcgaacgccgggcagatttcaccgggctatgctgctccctgggcggctccgggcgtgccgctgaaggccatcaagtggatgttccagcgccatgcgccgttggcgatccgcctcgacggcagcagcttccagctgagctggatgtggcagatgctgaaaaactgcaacaccgaacactacatgactaacaaaggccgcatggtgcgcctggcggaatacagccgcgattgtatcaaggcgctgcgtcaggagactggcatccagtacgaaggtcgccagggcggcacgctgcagctgttccgcacccaacaacagttcgaaaacgcagcgaaagacattgcggtattggaagatgccggtgtgccttacagattgctggaagccggccaactcggcagcgtcgagccggcgctggcgcaggtggcgcacaagctgaccggcggcctgcaactgccgaacgacgaaaccggcgattgtcagctgtttacgcagcagctggcgaaaatggcgcagcaggcgggcgtaaccttcctgttcaaccgcagcgttgaccgcctgctggttgagggcgacaagatcgccggcgtgcagtgcggcgaggacgtgtttaaagccgacagctacgtggtggcgttcggttcgtattccacggcgctgctgcgcggcctggtttctatcccggtttatccgctgaagggctattcgctgaccattccgatcaccgatgaagcggcggcgccgttctccacggtgttggacgagacgtacaaaatcgccatcacccgtttcgatcagcgcatccgcgtcggcggcatggcggagatcgtcggtttcaatacgcagttggagcaaaaacggcgcgaaacgctggagatggtggtgcgcgatctctacccgaacggcggcagagtggaagacgcgacgttctggaccggcctgcggccgatgacgccggacggtacgcccattgtcggccgcacttcgctgaagaacctgtatctcaataccgggcatggcacgttgggctggacgatggcctgcggttccgggcagttgttgtccgatctgatgtccggcattacgccggcgatcccttccgatgatctggcggtggcgcgttacagcgccgggtttcgccagcaacacgcggttccgctgaacgacgtgcatcccgcgcgttaa

SEQ ID NO: 423646 - DNA, 1074 bp, Serratia marcescens
atgccccgtccgataaccgccacgatgcatcttggcgcaattgaaaataacctgcaggtggtgcgccgtttcgcccccggcgccaaagtctgggcggtggtcaaggccaacgcctatggccacggcatcaaacacgtttggcgtagcatggcgcaaaccgacggcttcgccatgctggatctggccgaagcggtgctgctgcgtgagtcgggttggcaagggccgattcttctgctggaaggtttcttccagccgcaggatttggcgttgctcgatcgttatcgcctgacgacggcggtgcacagcgactggcagctggcggcgatcgccgatgccacgctgagcgcaccgctcaatgtctatctgaaagtgaacagcggcatgaatcggctggggttcgcacccgagcggctgcacgaggtgtggcgcagggcgcaggtggttgccaacatcggcgagcttacgctgatgagccatttcgctaccgccgacggcccggaaggcgtgacccagcagatggctaccatcgaggctgccgctgccgatatcccgctgccgcgctgcctggccaactcggccgccacgctgtggcattcttctacccacggcagttgggtacgccctgggatcattctgtatggcgcttcgccgagcgggtgctggaatgacgttgcggcgacggggttgcagccggcgatgacgctgagcagcgagatcatcggcattcagcagctgaagtctggcgatcgcgtgggttacggcggccgttacagcgccgccggcgcgcagcgtattggcgtggtggcctgcggttacgccgacggctatccgcgtcatgcgccgaccggcacgccggtatgggttgacggcgtgctgacacgtaccctgggaacggtatcgatggatatgttggcggtggatctgacgccctgtccgcaagtcgagctgggcgccgaagtggagctgtgggggaaacgcctgccggtggacgaggtggccacggcggcaggaacgttgggctatgagctgctgtcggcgttagcggcacgggtgccggtcgccattgaagcctga

SEQ ID NO: 423647 - DNA, 1194 bp, Serratia marcescens
atgcaaaagtttctgtttatgcttctcagcctggtgctgctcggcccattaggcatcgatctttacctgccgaccattcccgccattgccgtcggcctgggcagcagcgaagcgctgatccaatccaccatttcactgtttattctggtgcttggcctcggccaggtcatcgccgggccgctggtggataactatggccgcaagccggtggcgctggccggcattatcctctacatgatcggcgccgcgatggcggcgctggccaccagcccgacgattttcatcgcttcgcgtctgctgcaaggggtggcggtttgctgcaccgccgtcgtcgccttcagcggcgtgcgcgatcgcctgaatggcgacgatgccgcccgcgctttcggctttctcaacggcacgctgaacatcatccctgcgctggcgccgctgctcggcggcctgctcgccgaagccttcggctggcgcgcccccttctggttcctggtcggctacgcgctgctggtgttggtgctgatcgcgctgcgcctgccggaaactcgccctgccgacaccgtgccggtcaaagggttgccggtgcgccaatacgcgcgcatcctcagcgatcgccgtttcctctcctttgcggtggtgaactccggggcgatgggcatggcgctgacctacgtttctctggcgccgaacgtgctgatgggcaccgccggcctgaccccgctgcaattctcgctggtgttcggcgccaacggtttctggatcatgctggtcagcttcttcgccaaccgcatcatccacaaggtcggccgcccggtttgtctggcgaccggcggcatgttgatggggctgggctgcctgggcctgctgctgggcgtcatgctactgcccgcgacggcgcaagcgcactggctggcgtatatgttgccggtcgccagcgcctgcgccgggttggcattcgtgatgggcccggccaccagctacgcgctggagccgtattccaatgaggccggcgtcgcgtccgcgctggtcggtttcgtgcagatggcgggcggtgccgcgctgggtctggtggcgatggcgttgccgctgcaaccgaagctgtcgctggcgctggtgatgctggcgggctgcctgctggcgctgcacgcgcggcggctcagcaagcagattaaagggcagatcagaaaagtcgcctga

SEQ ID NO: 423648 - DNA, 561 bp, Serratia marcescens
atgcaccatctgatgttagacattgaaaccctggatataaaacccagcgccgtcattctggtggtggcggcggtgtttttcgatccccgaaccggggagctgggcgccgaattcgaagccgccgtcagcagccagaaagaccagccgggccgtaccattagcctggatacggtcgcctggtgggcgaaacagtccgatgaggcccgcaaacaggccttcagcggcaccgagagcctgaaacgcgtgctgagcagcctcagccgctttatccatatgaacagcaccgacacggtgaaagtctggggcaacggcaaagagttcgactgcgcgatcctcgaacacgccttccagcaattagaaatgccctgcccgtggaaattctgggatacccaggacgtgcgcacggtgatcacgctggcggaactgcacggctttaacccgaaaaaagcccgcccgttcgaaggtatgccgcatcgcgcgctggatgatgctcgccaccaggcccgttatgtggccgataccgtctcggcgctctattaccgccaaggggcgcagcgctga

SEQ ID NO: 423649 - DNA, 192 bp, Serratia marcescens
atgatattcgggatactcttgtcaggttggtcgctatcggtgagaacgcttatctttattctgtgcatggtcggctacttgctgctgctgggctaccttggcatgttcgtcacggacaagatctgtgagaaggcgggtaactacactaaaatctgccgtatcgtagacatttccgaaccgcacatcccctaa

SEQ ID NO: 423650 - DNA, 393 bp, Serratia marcescens
atgaaaccggacgcactctctctgccgccgaacccgaaaaagctcaaggtcatctacggctggtatatttacgtgatctatagcctgctggttttcaacatttacatggcggtctacaacgtctgcgttcggcatccgatcgaggccccgctgctgtcgctgtttcacagcctgttcctcgcgctgatgctgcagcaggtgctcaagaagaacgtcgttttcgcctgggtcttgctcagctattttattctgatgcgcctgtattacgccaatgtgctgcatgttgagttcacgctggtgagccgtggcctggtgctgctgattctgacgctgctgcttaccggcgccgtggccgtcgggcaactggccacgccgccgcagcggcatgactag

SEQ ID NO: 423651 - DNA, 294 bp, Serratia marcescens
atgaaagattataaaaacacctcgggcacaaaaatcctgctgctgttcagcctggcgttttatacgttgttgccgccgttgttgacggcggccgtgtttgaccgtttcaatcttaacccgtttgcgatcgttaaatttttccactttaacccgttttcagccgatcggggcatacccggttatcagacgttcttctacttgctgatgttatggttggggttgaatatttttctctggctgctggtgtggggcgcagggcggctgtatcaacgctggcgtgcgccgcgcggctga

SEQ ID NO: 423652 - DNA, 183 bp, Serratia marcescens
atgaaaattggaagcaatgtgagcaatgtcgtgccggatcggggggcacagaaggagacaacccttttcccctcaccggcgattcaaatgataatacgtctcattattgaatgtaaagtcatttccctgcgtaactcttcccccctggaaaaatatcagccgcgcggcgcacgccagcgttga

SEQ ID NO: 423653 - DNA, 177 bp, Serratia marcescens
atgtcgtcgctgtgggttgcaacgcaatactgttattttatcggcctgttagtttctatgattttcacctacctggttagccgggacaccgtcaaaattcgctttatcagcgcactgaccatcgggttaacctggccgttaagcctgccggtggtgttgctgttttcgctgttctga

SEQ ID NO: 423654 - DNA, 231 bp, Serratia marcescens
atgatcgattacaccctctatggcctcaacaagcacgatgttgatgaataccataagcaaatatgctgcctgcttggcaaaaacgtgctgctggtgctgaccgccaacaagccgataaccaaacagaacctgctcgccagccttatccaggagatagaaaaacagcccgatgattattttcagcggttgcatcgtgcagccatagaaatgatcggcgttaacggacgctaa

SEQ ID NO: 423655 - DNA, 1269 bp, Serratia marcescens
atggcctatttcattgaccggcggctgaacggcaaaaacaagagcatggtgaaccgccagcgcttcttgcgccgttacaagtcgcaaatcaaacagtcgattgccgaagccatcaacaagcgttcggtcaccgacgtagacagcggggagtctgtctccatccctactgacgatatcaacgaaccgatgtttcatcaggggcgcggcggcactcgccatcgcgttcacccgggcaatgaccacttcgtgcagaacgatcgcgttgagcggcctcagggcggcgcaggcggtggcggcggccagggcaacgccagccaggacggtgaaggccaggatgaattcgtcttccagatctccaaagacgagtacctcgatctgctgttcgaggatctcgccctgcccaacctgaaaaagaatcagtacaagcagctgaccgagttcaaaacccatcgcgccggctataccgccaacggcgtgccggccaacatcagcgtcgtgcgttcgctgcagaactcgttggcgcgacgtaccgccatgaccgccggtaaaagacgcgcgttgcacgagctggaagacgcgctgacccagctggaaaacaccgaaccggtgcaattgctggaagaggagcggctgcgcaaggaaattgccgaactgcgcaagaaaatcgaaagcgtaccgtttatcgataccttcgacctgcgctacaaaaactatgagcgccggccggagccttccagccaggcggtgatgttctgcctgatggacgtgtccggttcgatggatcaggcgaccaaagacatggccaagcgcttttacattctgctttatctgttcctgagccgaacctacaagaacgtcgaggtggtctatattcgccatcacacccaggcgaaagaggtggacgaacaggagttcttctattcgcaggaaaccggcggcaccatcgtctccagcgcgctgaagttgatgaacgacgtggtcgaagagcgttatgacccggcgcaatggaatatctacgccgcgcaagcgtcggacggcgacaactgggctgacgactcaccgctgtgccatgagctgttggcgaagaagatcctgccgatggtgcgttattacagctacatagaaatcactcgccgcgctcaccaaacgctgtggcgcgaatatgaggatctgcaggcaagattcgataacttcgccatgcagcatatccgcgaaccggacgatatctatccggtattccgcgaactgtttcgcaaacagaccgtgtga

SEQ ID NO: 423656 - DNA, 1935 bp, Serratia marcescens
atgaacatatttgaccactatcgccagcgctacgaagctgccaaggacgaagagttcacactgcaggaatttcttaccatttgccggcaagatcgcagtgcctatgccaacgcggccgaacgtctgctgatggctatcggtgaacctgtgatggtcgacactgcgctagaatcacgcctgtcgcgcctgttctccaaccgcgtgatcgcacgctatccggcctttgaagaattctacggcatggaagaggccatcgaacagatcgtctcttacctgaaacacgccgcgcagggcctggaagagaagaaacagatcctttacctgctgggcccggtgggcggcggtaaatcctcgctggcggagcgtcttaaggcgttgatgcagcgcgtgcccatctacaccctcagcgccaacggcgaacgcagcccggtcaacgatcatccgctgtgcctgttcaacccgcaggaagatgcctcgatcctggagaaagagttcaacatcccgagtcgctatctcggcaccatcatgtcgccgtgggcggcgaagcgcctgcatgagttcggcggcgacatcaccaagtttaaagtcgtcaaagtgcgcccatccatcctggagcagatcgccatcgccaaaaccgaaccgggcgatgagaacaaccaggacatctcggcgctggtcggtaaagtggacatccgtaagctggagaaccatgcgcagaacgatccggacgcctacggctactccggcgccctgtgccgcgccaaccaggggattatggagttcgtcgagatgttcaaagcgccgatcaaggtgctgcacccgctgctgacggcgacccaggaaggcaactacaacggcaccgagggcatctccgccctgccgttcaacggcatcattctggcgcactccaacgaatccgagtgggtgaccttccgtaacaacaagaacaacgaagcgttcctcgaccgcgtgtacatcgtcaaggtgccttactgcctgcgcgtgtcggaagagatcaagatttacgacaagctgctggatcacagcgagctgacccacgcgccctgcgcgccgggcaccctcgaaacgctcgcgcgctttagcgtgctgtcgcggctgaaagagccggaaaactcgagcatttactcgaaaatgcgcgtgtatgacggtgaaagcctcaaggataccgatccgaaagccaagtcctatcaggagtaccgcgactacgctggggttgacgaaggcatgaacggcctctccacccgtttcgcctttaaaatcctctcgcgggtattcaacttcgatcacgccgaggtggcggccaacccggtacaccttttctatgtgctggaacagcagatcgaacgcgaacagttcccgcaggatttggccgagaaatacctggagcatctgaaaggctatctgatcccgaaatacgccgaatttatcggcaaagagatccagaccgcctatctggaatcctactcggaatacgggcagaacatttttgaccgctacgtgacctacgcggacttctggatccaggatcaggagtatcgcgatcccgacaccggtcagctgttcgaccgcgagtcgttgaacgccgaactggagaaaatcgagaagcaggccggcatcagcaacccgaaagatttccgtaacgaaatcgtgaacttcgtgctgcgcgcccgcgccaacaacaacggccgtaatccgaactggaccagctacgagaagctgcgcaccgtgatcgagaagaaaatgttctccaataccgaagagctgttgccggtcatttcgtttaacgccaaaacatcgacggacgagcagaagaaacacgacgacttcgtcgaccgcatgatggagaaaggctatacccgcaagcaggtgcgcctgctgtgtgaatggtatctgcgggtcagaaaatcctcataa

SEQ ID NO: 423657 - DNA, 765 bp, Serratia marcescens
atggaaaaagaaccagtgaagatttcaaaactcaaaacgctagcaattatcgcttccgcaatggtttgtgcgcaaagtgctcaggcgggaacctggtcactcggcgccggcgcgctggttagcccggacgcgtatcgcggttatcaggatcgcgtatatccggtgcccgtcatcgactatgaaggtgacgacttctacttccgtactctgaccgccggttactacctgtggaaagatcaagaaaaccagctgagcatcatgggttactacacgccatggggctaccgccctggcgacagcgatgacgatcgcatgaagcgtctcgacaaacgccgcggcacgctgatggccggcctggcttattcgcaccacgcggagtggggcaccctccgcaccaccttcaccggcgacacgttgaactacagcaacgggctggtgggcgatgtggcttatctgtacaagtttgatctggacgcgctgacgctggttccgggcgtaggcgtgatgtggaacagcaaaaaccagaacaaatattactacggcgtcagcgccaatgaatcgcgccgcagcggcctggacagctataccccaggcgatagctgggcgccgtaccttgagctgagcgccaattaccagatcaataaaagctggaacgccttcttcctcggccgctatgtgaagttgtcggatgaagtgaaagacagcccgatggtggataaatcctacaccggtttgttgatgacgggtgtgagctacaccttctaa

SEQ ID NO: 423658 - DNA, 876 bp, Serratia marcescens
atgaacgagaaaattttcaccctgcccgtttccgaacagatttcgccttacatcagccagcggcaactcgatgagctgggcgtggttgtggtgtcgcatccgaaagtgcgcgcggccgtcgcgctgcaaggcgcccatttgctggcctggcagcccagcggtgagcagccggtgatttggctcagcaacaatacccccttcgccaaaggcaaggccatccgcggcggcgtgccgatctgctggccgtggttcggcccggtggcgcaaccctcccacggttttgcccgcaaccagccctggagcctgacggcgcacgatgaagatgacaacggcgtcatcctgacctttacgctgaaagacaatgagcagacccgcaaactgtggccgcacgctttcacgctgattgcccgcttcaagctgggtgcggagtgcgaaatcgaactggaatcgcacggcgattatcaggccacggcggcgctgcacagttacttccaggtcggcgacatcgatcgggtcagcgtggcgggcctgggcgagccttatatcgacaaggtggcgggcggcgcagaggcgcttcaggaaggcgaagtgaccttcgtcggccaaaccgaccgcgtctatacccgcccggaggccttcagccagatccgcgatccggcgctcgcgcgcaccatagaggttcaccaccatcatatgagcgacgtcatcgcctggaaccccggcgtggagctctcctgcagcatgggggatatgccgaacgacggttacaagaccatggtctgcatcgagaccgggcgcgtcagcaaaccgctggtcgccgccggcgagcaacccgcccgtttgggcgtgaccttccgcagccgtaagaaggcctga

SEQ ID NO: 423659 - DNA, 996 bp, Serratia marcescens
atgactatcaaagtaggtatcaacggttttggccgtatcggtcgcattgttttccgtgctgctcaagagcgttctgacatcgagatcgttgcaatcaacgacctgttggacgcagagtacatggcttacatgctgaagtatgactctactcacggccgtttcaacggtacggtagaagttaaagacggccacctggttgttaacggcaaaaccatccgtgttaccgcagagaaagacccggctaacctgaagtggaacgaagtgggtgttgacgtggttgctgaagcgaccggtatcttcctgaccgacgaaaccgcacgtaagcacatcaccgccggcgccaaaaaagtggttctgactggcccatccaaagatgcgaccccaatgttcgtgcgcggcgccaactttgataaatatgccggccaggacatcgtgtccaacgcctcttgcaccaccaactgcctggcgccactggctaaagtcatcaacgacaacttcggtatcgttgaaggcctgatgaccaccgttcacgcgaccaccgccactcagaaaaccgttgatggcccgtcccacaaagactggcgcggcggccgcggcgcatcccagaacatcatcccttcttctaccggcgcagcgaaagcggttggcgttgttctgccagagctgaaaggcaaactgaccggtatggcgttccgcgtaccgacgccaaacgtatccgttgttgacctgaccgtgcgtctggaaaaagcggctacctacgaagaaatcaagaaagccatcaaagacgccgctgaaggttctatgaaaggcgttctgggctacgttgaagacgacgtggtttccaccgatttcaacggcgaagtgctgacttccgtgttcgatgccaaagccggtatcgcactgaacgacaacttcgtgaaactggtttcctggtacgacaacgaaaccggttattccaacaaggttctggatctgatcgctcacatctccaagtaa

SEQ ID NO: 423660 - DNA, 414 bp, Serratia marcescens
atggctaaagagacaacccccggtcatccggtcacggaactgaatgaaatccaacgttatgtgacgcaacagcgcggcaccgaagcgccgttcagcggcaaattgctgcacaacaagcgcgagggcgtgtaccattgcctgtgttgtaaccagccgctgttctattccgaaaccaaatacgattccggctgcggctggccgagcttttatgagccggtttccgccgatgctatccgttatcttgatgataattcacataatatgcatcgtgttgaaatccgctgcggccattgcgacgcgcacctggggcacgttttccccgatggcccgcagccgaccggcgatcgctactgcgtcaattccgcttcactgagctttaccgatggcgaaaatggcgaccaaacggctggttaa

SEQ ID NO: 423661 - DNA, 273 bp, Serratia marcescens
atggacgtgaaagatctgattgcggcgatgacgcccgagatataccagcgcctggtacaggcggttgagctgggcaaatggccggacggcgtggcgctgacgccggagcaaaaagaaaacagcctgcaggcggtgatgctgtggcagtcgatgaacaacgtcgatccgcagcacatgagcatcggcaccgacgggcagatcgtgatgaagagcaagcaagagctgaaacagcagttcgttgccgagccgttggccaaactcaaaccgcagtaa

SEQ ID NO: 423662 - DNA, 1278 bp, Serratia marcescens
atgaaaataacccgaaaactgctgcctttgctggcggcggtgcagttggctatggccggcgcaggcacggcccaggcggcttatctctccgtcggctacttcaacggcggcggcgacgtcaccgccggccccggtggcgacatcgacaagctggacgtcacgcaaatcacccacctcaactattcgttcggactgatctacaacggcgagaaagacgaaaccaatgcggtgttgaaagaccccgctcgccgccaccagatctacctgtcgccgaaggtgatggccgatctgcaacggctaccgacgctgcgcaagcagaaccccgagctgaaagtgctgctgtcggtcggcggctggggcgcacggggtttctccgccgccgcggcaactgcggaaaaccgggcgatattcatccgttccgcgctgcaggtgatcgcccagtatcagctggatggtatcgatctggactgggaatatccggtgaacggcgcctgggggctggtggaaagccaaccggcggatcgcgacaacttcaccctgctgctgaaagagcttcatcaggcgctgggtaaaggcaagctgttaaccatcgccgtcggggccaacgtcaaaagcccgcaggaatgggttgatgtgaaaagcatttccccttacctcgactacatcaatctgatgacctacgacatggcttacggcacgcagtacttcaatgccaacctgtacgattcaaagcgttggccaaccgtggcggccgccgatcgctacagcgccgatttcgtggtcaagaattatctggctgccggcctgaaaccggcgcagatgaacctgggcatcggtttctacggccgggttccgaaacgggcgaccgaggcgggtatcgactgggacaagccggacgccgccaaacatccggtgacgcaaccttacttcagcgcgcgagaaaccgccctgttcaacgcgctggggctggatctcagcaaagacacttactttaaataccacgatatcgtcagcaaattgctcaacgatccgcagcatcgttttcgcgagcactgggatgacgacgccaaagtgccttacctgacactgcaatccgccgaaggcaagccgctgttcgcaatctcctacgagaatccgcgttcggtggccatcaaggccgaatacatcaaaagtcagggattgggcggtgcgatgttctgggaatacggcgcggatgacaacaatcggctggcgcagcagctggcggaatcgctgggaattaagggcgaaaaacggtga

SEQ ID NO: 423663 - DNA, 633 bp, Serratia marcescens
atgaaaacggccctgttgttgatcgatctgcaaaacgatttctgccccggcggcgcgctggcggtcacggcgggcgacgccgtcatcccggtggccaatcaggcgatcgccgcctgtctggcgcgtggcgaaccggtggtagccagccaggactggcatcccgccaatcaccgcagttttgcggtgaactcccatgcgcaggtcggcaccctcggcgagctggaaggcctgccgcaggtgtggtggccggtgcactgcgtgcaagggagccacggcgccgattttcacccccagttacagcggcaacatatcaatgccgtttttcgcaaagggcaggatacggatatcgacagctacagcgcattcttcgataacggccaccgagcgcagaccgaactgcacggctggctgcaatcgcagggcgtccagcggctggcaatcatgggcctggcgaccgactactgcgtcaagttcagcgtgctggatgcgctggccgccggctatccaacgcaggtgatcgtcgacggctgccgcggcgtgaatctgcagccggacgacagcgagcgggcgctgcaggacatggcgtgcgccggtgcgcaactggttaccctgtcacaattcctcgccaactaa

SEQ ID NO: 423664 - DNA, 1023 bp, Serratia marcescens
atgaccatgcaaaagaaatccatttacgtcgcctacaccggcggcaccatcggcatgcagcgttccgatcacggctatatcccggtttccggccacctgcagcgccagctggcgctgatgcccgaattccatcgcccggaaatgccggatttcaccattcatgaatatgcgccattgattgactcttcggatatgacaccggaagactggcagcacatcgccgacgacatcaagcagaactacgatcgctacgacggcttcgtgatcctgcacggcaccgacaccatggcgttcaccgcgtcggcactctccttcatgctggaaaacctggctaaaccggtgatcgtcaccggctcgcagattccgctggcggagctgcgctccgatggccagaccaacctgctcaacgcgctgtatctggcggccaaccatccggtgaatgaagtcagcctgttcttcaacaacaagctgttccgcggcaaccgcaccaccaaagcgcacgccgacggcttcgacgccttcgcctccccgaatctgccgccgctgctggaagccggtattcacattcgccgccagcaaggcatcgacagcccgccatgcaacggcgcgctgcgggtgcacgacattacgccgcagccgatcggcgtggtcactatctatccgggcatttccggcgcggtggtgcgcaacttcctgctgcagccggtcaaagcgctgatcctgcgttcctacggcgtcggcaacgcgccgcagaaggccgagctgatcgacgagttgcgcgcggcctcagaacgcggcatcgtggtggtgaacctgacgcagtgcatctccgggcgcgtcaatatggaaggctacgccaccggcaacgcgctggcgcacgccggggtgatcagcggtttcgacatgacggtggaagccgccctgaccaagctgcactacctgctgagccagccgctgacgccggaacaaatccgcgccctgatgcagcaagacctgcgcggcgagctgagcatcaacggttaa

SEQ ID NO: 423665 - DNA, 1857 bp, Serratia marcescens
atgcgcacattgtggcaaattattgccggcattttccggtggacatggcgtctgctgaattttatcagggaactgatccttaacctgttcctggtcttgctgatcctggttggggttggcatctatctgtccttccaaagttcctccaccacgacggccccggcgcgcggcgcgctgctggtcgatttaagcggcgtggtggtcgatcagccctcggtaaacaaccgggtgcggcaatggggccgcgagctgttgggcgcctccagcagccgtctgcaggaaaactcgctgttcgacgtggtcgatagcatccgcaaggccaaagacgataaaaacattaccggcatggtgttgcagctgaatgacttcgtcggcgccgatcagccgtcgctgcgctatatcggcaaggcgctgcgcgagttccgcgacagcggcaaaccgatcttcgccatcggcgacagctacaaccagacgcaatacttcctggccagctacgccaacaaggtctatctgtcgccgcagggcgcggtcgatctgcacggtttcgccaccaacaacctgtattacaagtcgttgctggacatgctcaaggtcaccaccaatatcttccgcgtcggcacctataaatcggcggtcgaaccactgatccgcgacgatatgtctccggcggcgcgcgaagcggacagccgctggattggcggcctgtggcagaactatctggaaaccgtcgcggccaaccgccagctgacgccacagcagctgttcccgggcgccgccggcgtgctgagcggcctgcaggcagccggtggcgacaccgctcgctatgcgctggacaataagctggtggacgagctggcctcgcgcaccgcgatcgaaaatcagctggtcaagaccttcggctgggataaacaggcgaacgatttcaacgccatcagcatctacgactatcagccgaagccggacgccaatcagggcggcaagatcgccgtggtcttcgccaatggcgccatcatggacggcccgcagacgccgggtaacgtcgggggtgataccaccgccgccgaactgcgtcaagcccgtctggatccggccatcaaggccgtggtgttccgcgtcaacagcccgggcggcagcgtcagcgcatccgaagtgatccgttccgaactggccgccgtgcgcgccgccggcaaaccggtggtggtttcgatgggcggcatggccgcgtcgggcggctactgggtttcgacgccggccgactacatcatcgccagcccgagcaccctgaccggttccatcggcattttcggcatcatcaacacctacgagaaaaccctggatacgctgggcgtgcacaccgatggcgtggcgacctcgccgctggccgacattgcggtcaccaaggcgctgccgcaggagttctcgcagatgatgcagctgaacatcgaaaacgggtataagaacttcctcgatttggtcgccaaatcgcgcaagatgaccccgcagcaggttgaccaaatcgcccagggccacgtctggctcggcagcgacgccaaggccaacggcctggtcgatcaattgggcgatttcgacgacgcggtgaaaaaagccgccgagttggcgaagctgcagcagtggcagctcaactggttcgtcgataccccaagcctgagcgatatggtgctcagccagttcggcgtttccgttcacgccatgctgccggcggcgattcaggccatgctgcccgctccgctggcctcggtcgccaacgcggtgaaagaacagccgggtttgttcaataacctgaacgatccgcaaaaccgttatgcgatctgtctcacctgcggagaagtccgctaa

SEQ ID NO: 423666 - DNA, 552 bp, Serratia marcescens
atggatgctctggatcttttattgaatcgccgctcggcttcgcgcctggcggaaccggcgccggcgggggaagtgcgccaaaatatcatcaacgcgggcctgcgtgcgcccgatcacggcgcgctgcagccgtggcgtttcgtgatgatcgaaaatcagggtctggagcgcttcagccagctgctgcaggcggcggcgaaacaggatcagctggacgaagcggcgatcgaaaaggccaccaaggcgccgttccgcgcgccgctgatcatcaccgtcattgcgcactgcactgaagagaccaaggtgccgcgctgggaacaggtggtttccgccggttgcgcggtgcaggcgatgcagatggcggcgctggcgcagggctttaacggcatctggcgcaccggcgcctggaccgagcatgcgctggtgcgcgaagccttcggctgccgcgagcaggacgagatcgtcggtttcctctatctgggcacgccgcagctgaaggccgccaccaaggtgacgccgccggacagcacgcctttcgtcagctatttctga

SEQ ID NO: 423667 - DNA, 1044 bp, Serratia marcescens
atgacatcgccagcgatccgtttaacccagtacagccatggcgctggctgcggctgcaaaatctcaccgaaagttctcgaaaccatcttgcacagcgagcgagaaaagtttgtcgatccgcgcctgttggtcggcaatgaaacccgcgacgacgcggcggtgtacgacatcggcaacggcgtcggcatcatcagcaccactgactttttcatgccgatcgtcgacgatccgttcgatttcggccgcattgcggccgccaacgccatcagcgacgtgtatgcgatgggcggcaaaccgatcatggcgatcgccattctcggctggccgatcgccaagctgccgccggaggtggcgcagcaggtgatcgacggcggccgtttcgcctgccagcaggcggggatcgcgctggccggcggccattccatcgatgcgccggaacctattttcggcctggcggtcaccggcgtggtcaatatcgagcgggtgaagaaaaacagcgcggcacaggccggggcgaaactctatctgaccaagccgctgggcatcggcgtgctcacgaccgccgagaaacaaagcaaactgcgcactgagcatcagggcctggcgaccgaagtgatgtgccgcctgaacaagccgggcgccgattttgccgaggtggcgggcgtcacggcgatgaccgatatcaccggttttggcctgctgggccacctgagcgaggtgtgccagggctccggtctgcaggcgacggtctggttcgatcgggtgccgaagctgccggacgtcgaggcgtatatcgccgaagggtgcgtgccgggcggcaccgggcgcaacttcgacagctatggccatctggtgggcgagatgagcgatttgcagcgccagctgctgtgcgatccacaaacctccggcggcttgctgttggcggtattgccagaggcggaagcgcaggtgctggcgattgccgggcagcacggtatcaccctcaacgctatcggtgaattgcatgccgcacagaccgggcagccactgatcgaggtcgtgtag

SEQ ID NO: 423668 - DNA, 1119 bp, Serratia marcescens
gtgtcccacatgcaaggaaggccggacagcgacgattacccacgcattttcctgcaggacgtgccgctgattgacgtgcgcgcaccgatcgaatttcagcagggcgccttcgcacaggcggtgaatttaccgctgatgatcgacagcgaacgccaggcggtcggcacctgctataagcagcatgggcagcaggcggcgatcgcgctcggccacagcctggtgaacggcaaactgcgcgaacagcgcaccgccgcctggctggcggcctgcgcagcgcggcccgcaggctatatttactgcttccgcggcgggctgcgctcgcagctggtgcagcaatggctgcacgaggccggcgtggattatccgcgtatcactggcggttataaggcgctgcgcaattatctgctcggtgtactgacgcaaagcgcgcaattgccgatggccctggtgggcggcaataccggcagcggcaagacgctgctggtcaacgaactggccgacggcgtcgatctggaaggcgcggcgcgccatcgcggttcatcttttggccgaacgctggcggggcagagctcgcagatagattttgagaatcgtctggctgtgttattgctgaaaaaacagcatggtggcagccgccgttgggtgctggaagacgaagggcggatcatcggcagcaacaatctgccgttgccgttgttcaacggcatgcagcaggcgccggtggcggtgatcgacgatccgttcgatattcgtctggcgcgtctgcaggccgaatatatcgacggtatgcgcgaacagttcgaacaggcctatggcatggaagagggctggcggcagtacgacgactatttgcatcatggcctgttcgccattcgccgccgtttgggcctggagcgcttccagcagttgacgcagcggctggaggcggcgctgcgggcgcagcgcctcagcggcgagggcgacgcgcaccgcgagtggttggcgcctctgttgcagcagtactacgatccgatgtattgctatcagctggaaaagaaagcccagcggatcgtcttccgcgggaactatgcagaagtaagagaattcttgatgacgttcagccagaaaaacggtgattaa

SEQ ID NO: 423669 - DNA, 1926 bp, Serratia marcescens
atgcgactgttcatagccgagaaaccgagtttggcgcgcgccattgccgacgtcttgcccaagccgcatcgccgcggcgacggctatatcgcctgtggcaacaacgacgtggtgacctggtgcgtcggccatctgttggagcaggcccagcctgacgcctatgacagccgctatgcgcgctggtcgttggcggatctgccaatcatccccgaaaaatggcgcttgcagccacgcccttcggtcagcaaacagctcaacgccattaaaaagctgctgcacgaagccgatgaagtggttcacgccggtgacccggatcgcgaggggcaactgctggtggatgaggtgctggactacctggatttgacggcggagaagcgccagaacgtgcgccgctgtctgatcaacgatctcaatccgcaggcggtggagcgtgctgtcgagcgtctgcgcgacaaccgtgatttcattccgttgtgcgtgtctgcgctggcgcgttcgcgcgccgactggctgtacggcatcaatatgacccgcgcctatacgctgctgggccgcaacgccggttacgacggcgtgctgtcggtgggcagggtgcagaccccggtgctcggattggtggtgcgccgcgatgaagagatcgaaaacttcgtgccaaaagacttctttgaggtcaaggcgcacatcgtcacgccgaaagaagagcgcttcgtggcgctgtggcaacccagcgagtcctgcgaaccttatcaggatgaagaggggcgtttgctgcaccggccgttggcggagcacgtggtcaagcgcatcgaggggcagcctgccctggtcacgtcctataatgataaacgggaatcagataccgcgccgctgccgttctcgctctctacgctgcaaatcgaggcggcccggcgctataacctcagcgcgcaacaggtgctggacgtttgccagcggctgtacgaaacccacaaattgatcacctatccgcgttccgactgccgctatctgccggaagaacatttcgccggccgccacgcggtgctgaacgccatcagcgtgcaccagcctgagctgtatccgcagccggtgatcgacagcgatcgccgcaaccgctgctgggacgataaaaaggtcgatgcgcaccacgccattattcccaccgcccgcgccggcaaggtgaatctgacgcaggatgaacggaatgtgtatgggctggtggcgcgccagtacttgatgcaattctgtccggatgcggtgttccgcaaatgcgtgatcgagctggatatcgccggcggcaaattcatcgccaaggcgcgtttcctggcggaggccggttggcgtacgctgctgggcagcaaggagcgcgacgaggaaaacgaaggcgcgccgctgccggtggtggccaaggacgatgagctgctgtgcgagcgcggtgaagtggtggagcgccagacgcagccgccgcggccgtttaccgacgccagcctgttgtcggccatgaccggcatcgcgcggttcgtacaagataaagcgttaaagaaaatcctgcgggcgaccgatggtttaggtacggaagcgacgcgagcggggatcatcgaattgctgttcaaacgggcgtttctgtacaagaaggggcgctatattcactccagcgaaaccgggcgcgcgttgattcactcgctgccggatcttgctgcgcgtcctgatatgacggccaactgggaagccacgctgacgcaaatcagcgagaaatcctgccgctatcaggactttatgcagccgttggtcggcacgctgcaagagctgatttatcaggccaagcagagccgggcgagcatggcgtttcgtgggttgccgccgccgccttccagcgggggcaaaaaacgcaggaaaagcgccggcaaggcgcaggagaagagtgaatga

SEQ ID NO: 423670 - DNA, 297 bp, Serratia marcescens
atgaagcatggactcagtggggttttagtcgccgcagtcttggcgttttccggcctggccgccgccaatcgcggcgatgtggacgtggtgttgccggtttcgccggagatttggggcacggccaaaaacggcgtcaacccgccgccggcgcagccctgcaaccgctgttgcgtctaccagaaccagaattattccgaaggggcggtgctcaaagtcgaaggggaagtgctgcagtgcgtgcgtgagcctaacaccatcggcaccaaccccttgatttgggtgcgattgaagaagtga

SEQ ID NO: 423671 - DNA, 402 bp, Serratia marcescens
atgaaaattatcgacgtggtagccgccattctggaacagaacggccgcattttgctggcccagcgcggcgcaggcagcgatcaggccggtctgtgggagtttcccggcggcaaggttgaagccggcgaaagccagccagaggcgctggcgcgcgagctggatgaagagttggggatttgcgcccgtatcggcgagcatgtgggcagcaatcagtggcagcaaggcgaacgcctcatccggctgcatgcctggcgagtcgcggcgttctccggtgaattgcagctgcattgccactcggcgctggtctgggtcacgccgcaacaggcgcaggaatacgccctggcgcccgccgacgttccactgctggcggactatatcgccgcgcaaggcgatgcgcgctga

SEQ ID NO: 423672 - DNA, 807 bp, Serratia marcescens
atgaagtttgtctcttttaatatcaatggactgcgcgcgcgtccgcatcagctggcggcaattatcgaacagcaccagcccgacgtgatcggcctgcaagaaacgaaagttcacgacgacatgttcccgctggaagaagtcagccagcacggctatcacgtgttctatcacgggcaaaaaggccattacggcgtagcgctgctgaccaaagcggagcctctggccgtgcgccgcggtttcccgaccgatgaagaagatgcgcagcgtcgcatcatcatggccgatctggctacgccgcagggcacgctaacggtgatcaacggctacttcccgcaaggtgaaagccgcgaccacccgatcaaattcccggctaaaacacgcttttatcaggatctgcaaaactacctggagcagcagctgtcggcggaatccccagtgttgattatgggtgacatgaacatcagcccaagcgattatgacattggcatcggcgaagacagccgcaaacgctggctgcgcaccggcaagtgttccttcctgccggaagagcgcgaatggatggagcgcctgctgaactgggggctggtggacacctaccgccacgccaacccggggcgcagcgacgaattctcgtggttcgactaccgctccaaagggttcgacgacaaccgcggcctgcgtatcgatctgctgctggccagcaccccgctggcttcgcgctgcatcgccaccggcatcgattaccaaacccgtgggatggagaaaccttccgaccatgcgccggtgtgggcggaattcacgctgtaa

SEQ ID NO: 423673 - DNA, 573 bp, Serratia marcescens
atgcgaaacaatatttgcgttttttgtggcgccagtgaaggcgtcaatcccgcttatgccgagcaggctcgtcaactggggcagctgctggccgcacaggggcgccgtttaatctacggcggcggcaagaaaggattgatggggatcgtggcagatgccgtgttggcggcgggcggtgaagctgtcggcattatccccgagcgcctggttgaagcggaaaccgcgcatcgcggcctgaccgaactggaagtggtgcctgatatgcatacgcgcaaagcccgtatggccgcgctggcggacggttttatcgccctgcccggcggcatcggcacgttggaagagttgtttgaaatctggacctggggacaaatcggctatcacaacaagccggtcggcctgctgaacgttaacggcttctaccgcccgctgagccaattcctcgaacacgtcgccgatcagggctttatgcgccacgactacctcggcaccctgcacatcagtgaatcggcgcaaacgctgctgcaacagtttgacgattatcaacccaaaaattacgaccgctgggcgaaataa

SEQ ID NO: 423674 - DNA, 849 bp, Serratia marcescens
atgccacaccaaaatgtacaacggaaagtgttacgcaccatctgcccggacgccaaagggctgatcgccaagatcaccaacatctgttacaagcacgaactcaatatcgtgcagaataatgagttcgtcgatcaccgcaccgggcgtttcttcatgcgcaccgagctggaaggcattttcaacgacaacacgctgctggccgatctggacagcgcgctgccggaaggttcgctgcgtgagctgcacagcaccgggcgccggcgcatcgtggtgctggtcaccaaagaggcccactgcctgggcgatctgttgatgaaaagcgcctatggcggcctcgacgttgaaatcgccgccgtgatcggcaaccacgacacgctgcaatcgctggtggagcgtttcgatattcctttccatctggtgagccacgaaggcctgacgcgtgaacagcatgaccgcgaaatgacggccaagatcgatcaatatcagccggattacgtggtgctggccaaatatatgcgcgtgctgaccccggccttcgtgcaacattacccgaatcaggtgatcaacattcaccattcgttcctgccggcgtttatcggcgcgcgcccttatcaccaggcctatgagcgcggggtaaaaatcatcggcgccaccgcccactacgtcaacgacaatctcgacgaaggcccgatcatcatgcaggacgtgatccacgtcgatcacacctattccgccgaggatatgatgcgcgccggccgcgacgtggagaaaaacgtgcttagccgcgcgctgtatcaggtgctggcgcagcgcgtcttcgtctacggcaaccgcaccgttattctctaa

SEQ ID NO: 423675 - DNA, 465 bp, Serratia marcescens
ttgcccgaatcatgcccatgcggcagcggacaggcgtataacgcgtgctgcgccccttttatcagcggcaatcagccggcgcccacgcccggtcagctgatgcgttcacgcttcaccgcctacgtgagtcataacgtcgactatctgatcgccacctggcaccccggctgcggcgccgaagcgtggcgcaatgcaatcgtcgacagctttaaaaataccgaatggttaggcctgacgatcgtggaagagaaagccggtcatgagccggaagaaggcttcgtcgaattcatcgcccgctttatcgatggcgaaagcggcgaaccgcaggcgatgcatgagcgctcgcgcttccttcgtcgcgatcaacgttggtattatatcgacggcaccaaaccccagcccggcagaaatgcgatgtgtccctgtggctcagggaaaaaatacaagaagtgctgcgggcgctag

SEQ ID NO: 423676 - DNA, 903 bp, Serratia marcescens
atgcggcaaatcaagatcggactggcgctgggggcgggctcggccaaaggctgggcgcacatcggcgtgattaatgcgataaagaaactggggattgaggttgatatcgtggccggttgctccgtcggcgcgttggtgggggcggcgttcgccagccaccgtttgccggcgatggagcagtgggtgcgatcgttcagctattgggacgtgattcgcctgatggatttttcctggcaccgtggcggcctgttgcgcggcgagcgggtgtttaacgccgtcggacagttgttgaagatcaatgatatcgccgaatgtgcgctgaagttcggcgccgtgacgaccaatctcagcaccgggcgtgagctgtggctgaccgaaggtgatattcatcaggcgatacgcgcctcctgcagcatgcctggcctgttggcaccggtgtgggccgacggctattggctggtggatggcgcggtggtcaatcccgtgccggtgtcgctttgtcgcgccatgggtgccgatatcgtcatcgcggtcgatctgcagcatgacgcgcacctgatgcagcaggatctgttctcgatacgtatcgaggaagaaagcccggacgatgcgcctgcggccacctggcgcgggcgtctgcgggagcgcatcggcagaatgcggcagcgcaaaccggcggcggcgcccacggcgatggaggtcatgggcacctcgattcaaatgctggaaaatcgcctgaagcgcaaccggatggcgagcgatccgccggatgtgctgattcaacctttttgcccgcaaatctcgacgctggatttccaccgcgccaatgaagcgatcgaagcgggattgctggcggtggaaaaacaactggatcggttgttgccgttgataaaaaatagataa

SEQ ID NO: 423677 - DNA, 1014 bp, Serratia marcescens
atggcattaccacttactcacaagcgcatcttgatcgttgaggacgaacaggtttttcgttcggtgctggtcggttatttggcctcgctgggcgctgaaaccggcgaggcgaccaacggtttacaggcgttgagtgccgtcgatgacttcaagccggatctgattctgtgcgatctcgcgatgccggaaatgggcggtatcgaattcgttgaacacctgcgtttgcagggggtacagatcccggtgctggtgatctcggccaccgacaagatggctgacatcgccaaggtgctgcggttgggcgtgcaggatgtgctgctcaagccgctgaccgatctcaaccgcctgcgtgaagcggtgctggcgtgcttataccccaatatgttcacctctcaggcgattgaagaggttgaactgtttcaggattgggacgcgctgagcaagaatccttccgaagccgtcaaactgcttaaacaattgcagccgccggtacagcagaccattgcgcattgccggatcaactatcggcagttaaccaccggcgaaaatcccggcctggtgctggatatcgccgccttgtcagaaaaggatctggcattctattgtctggacgtcacgcgcgccggcgataatggcgtattggcggctttgctgttgcgcgcgttatttaatgggctgctgcaagatcatctggctaatcaacagcatcgtctgccgcaaatgtcggcattgttaaagcaggttaatcaattattgcggcaggggaaattagacggtcaattccctctgttgttgggatattatcacaccgaaaataaaaacctgatcctggtttctgccgggctgcatgccaacgtcaataccggtgacaatcaaatccagctgaacaacggcgtgccgctggggacgctgggagctacctacatgaatcagatcagtcagcgctgtgccgcctggcagtgtcaggtatggggcagcggtggccgattgcggctgatgctcagcgctgaataa

SEQ ID NO: 423678 - DNA, 918 bp, Serratia marcescens
atgcctgctgtaaatcgcaaagtcagaaaagccgtgatcccggttgcaggcttgggtacgcggatgttgccggccaccaaagccattccgaaagaaatgctgcctctggttgataaaccgctgatccaatacgtcgtcaatgagtgcattgcggcggggattaacgagattgtgctggtcacccactcctccaagaactcgatcgaaaaccattttgataccagtttcgaactcgaagcgatgctggaaaaacgcgtcaagcgccaattgctggatgaagtgcagtcgatctgcccgaaaggcgttaccgtgatgcaggttcgtcagggcaatgccaaaggcctggggcacgcaattatgtgtgcctacccgatggtgggcgatgagccggtcgcggtggtgcttcctgacgtgatcctcgatgaatacagcgccgatccgaaaaaagacaacctgcacgaaatgctgcagcgcttcgaaaccaccggcgtcagccaaatcatggttgaacccgtgccgcataaggatgtcggaaactacggcgtagccgactgcaagggcgtcgatctgcaaccgggcgaaagcgcgccgatggtcagcgtggtcgagaagccgtcgccggataaagcgccttccaacctggcgattgtcgggcgttacgtgttgtccgccgatatttggccgctgttggcgaaaacgcctccaggcgccggcgatgaaattcagctgactgacagcatcgaaatgctgatgcagcaggaaacggtggaagcgtatcacctgaaaggcgtgagccatgactgcggtaataaactgggttacatgcaggcttttgtagagtacagcatgcgtcatgccagcctgggcaaagaattttctcagtggctgcaacaggttgttgccgctgacaagaagtga

SEQ ID NO: 423679 - DNA, 1344 bp, Serratia marcescens
atgaaagtaacagtttttggtattggttatgtggggctggtacaggccgcggtgctggctgaagttggccatgacgttatgtgcatcgatgttgatgagcgaaaagtcgaaaacctgaaaaaagggaatatcccgatttttgagccgggcctggcgccgctggtgcagcaaaactatgaggccgggcgcctgcatttcaccaccgatgccaaagcgggcgtggcgcacgggaatatccagtttatcgccgtcggcacgccgccggatgaggacggctccgccgatctgaaatatgtcaccgcggtggcgcgcaccatcgccgagcacatgaccgatcgcaaagtggtgatcgacaaatccaccgtgccggtcggcacggcggacaaggtgcgtcaggtgatggcggaaacgctggctaagcgcggcagcaacgtgccgttcgacgtggtgtccaaccctgaattcctgaaggaaggcgctgcggtggctgactgcatgcgccctgagcgcatcgtgatcggtaccgataataaagaggtgatcgaacctattcgcgagctgtacgagccgtttaaccgcaatcacgatcgtatgatcatgatggatatccgcagcgcggagctgaccaaatacgccgccaactgcatgttggcgaccaaaatcagctttatgaacgaaatgtccaacctggcggaaatgctgggcgcggacatcgagaaagtgcgtcagggcatcggttccgattcacgcatcggctatcacttcatctaccctggctgtggctacggtggctcttgcttcccgaaagatgtgcaggccttgatccgcacggcggagcagatcggttaccaaccgaagctgttgcaggcggtagagcaggtcaactaccaacagaaagacaagctgagcagctttatcaaagactatttcggcagcgatttgaagggcaaaaccttcgcactgtggggtctggcgttcaagccgaataccgatgacatgcgtgaagcctccagccgcgtgctgatggagcaactgtgggctgccggcgccaccgttcaagcctacgatccggaagcgatgaacgaagttcagcgcatctatggccagcgtgacgatctgaaactgatgggcaccaaagaggctgcgttgcacggcgccgatgcgctggtgatttgcaccgaatggcagaatttccgcgcaccggacttcgacgtgatcaagggtgcgttgaaacagccggtgatcttcgatggacgtaacctgtacgatccggagcgtttggcgaatcgtggctttacctactatgcgattggccgcggcgcatcgattaaaccggttatttaa

SEQ ID NO: 423680 - DNA, 1011 bp, Serratia marcescens
atgaaattcctggttacaggcgccgcagggtttattggttatcacgttgcagagcgtttgttgaccgccgggcatcaggttgtcggcatcgataacctgaatgactattatgacgtgggcctgaaaacggcccgtctggacagactggcggataagccgggattccgctttatcaagctggatttggccgatcgcgaaggcatggcggcattgttcgctgagcatcagtttcagcgcgtcattcatttgggcgcgcaagccggcgtgcgttattcgctggtcaacccgttggcttatgcggacgccaacctgatcggccatttgaacgtgctggaaggctgccggcataataaggtcgagcatttactttacgcgtcctccagctctgtttatggcctcaatcgcaagctgccgtttgctaccgaagattctgtcgaccaccctgtgtcactgtatgcggcaaccaaaaaagccaatgagctgatgtcacacagctactctcatttatacggtcttccgacgacggggctgcgcttctttaccgtatatggtccctgggggcgtccggatatggcgctgttcaagtttaccaaggccatattggcgggggagagcatcgatgtatataaccacggtgaaatgcaccgtgactttacttacattgatgatatcaccgaggcgattgtgcggctgcaggcggttattccgcaggcagatccgtcatggaccgttgaacagggatcgccggcgaccagttccgcgccgtatcatgtttataatatcggcaataactcccccgttaaactgatggaatatatcacggcattggagcaggctttgggggtaacggcccgcaagaatatgctgccgatgcaacctggcgacgtgatggataccagcgcggataccgcagagctttatcgtgacattggttttaagccggaaaccagcgttgaagagggtgtgaagcgctttgttgattggtataaggcattctaccaggttcaataa

SEQ ID NO: 423681 - DNA, 408 bp, Serratia marcescens
atgagcgaagcattaaagattttgaacaacatccgcactctgcgcgcccaggcaagagaatgcacactggaaacgctggaagaaatgctcgagaaactggaagttgttgtgaacgaacgtcgcgaagaagacagccaggctcaagcagaaatcgaagaacgcactcgtaaactgcagcaataccgcgaaatgctgattgctgacggtatcgatccgaatgaactgctgcaaaccatggctgccaacaaggctgccggcaaagcaaaacgtgcagcacgtcctgctaaataccaatataaagacgaaaacggcgaactgaaaacctggaccggccaaggccgtacccctgcggtgattaagaaagctatcgaagagcaaggtaaatctctggatgatttcctgctgtaa

SEQ ID NO: 423682 - DNA, 585 bp, Serratia marcescens
atggctcaactttatttttattactctgcgatgaatgccggcaagtccaccgcgctgctacagtcttcatataactatcaagaacgtggtatgcgcacgctggtgttcactgcggagatcgatcaccgctttggggtgggcaaagtcagctcgcgcatcggtttatcctcgcaggcccagctctataacaacgactcgatgctgtacgccatgattcagcaggagcatcaacagcagccggtgcattgcgtgctgctggatgaaagccagttcctgaccaaggcccaggttgagcaattgtgcgatgtggtggaccaactggacattcccgtattgtgctacggcctgcgtaccgattttctcggtgagctgtttatcggcagccaatatttgctggcctgggctgataagctggtggaattgaaaaccatctgccactgcgggcgcaaagccaatatggtgttgcggttggatgaaaacggccaggcgatgcacgccggtgagcaggtggtgattggcggtaacgagagctatgtctccgtctgccgcaagcattataaagaagcgattcactccctggagtag

SEQ ID NO: 423683 - DNA, 2673 bp, Serratia marcescens
atggctgtaacgaatgtcgctgaactgaacgagcttgtcgcacgtgtcaaaaaagcccagcgcgaatatgccaacttcactcaagagcaagtggataaaattttccgcgctgccgccctcgccgctgctgatgcccgtatcccgttggccaaaatggccgtggaagaatccggaatgggtatcgtcgaagacaaagtgatcaaaaaccacttcgcttccgagtacatctacaacgcctataaagatgaaaaaacctgtggcatcctgtctgaagatgacaccttcggtaccatcaccatcgccgagcctatcggcctgatttgcggtatcgtccctaccaccaacccaacttctaccgcgatcttcaaagcgctgatcagcctgaaaacccgtaacggcatcatcttctcgccgcacccgcgtgcgaaaaatgccaccaacaaagccgccgatatcgtgctgcaagccgctatcgccgccggcgcgccgaaagacatcatcggttggatcgaccaaccgaccgtcgagctgtccaaccagctgatgcaccacccggacatcaacctgatcctggccaccggtggcccgggcatggtgaaagccgcctacagctccggcaaaccggccatcggcgtcggcgccggtaatacgccggtggtggtagacgaaaccgcagacatcaagcgcgtggtcgcgtctatcctgatgtccaaaaccttcgacagcggcgttatctgcgcttccgaacagtcggtcatcgtcgtcgactctatttatgatgcggtacgcgaacgcttcgcttcccacggcggctatctgctgcagggtaaagaactgaaagcggtgcaggacatcatcctgaaaaacggcggtctgaacgcggccatcgtcgggcaatccgcaccgaaaatcgccgagatggcaggcatcaaagtgccggccaacaccaaagtgctgatcggcgaagtgaagctggtcgacgagtccgaacctttcgcccatgaaaaactgtcgccgacgctggcgatgtaccgggccaaagacttcgaagacgccgtcgccaaagccgaaaaactggtcgccatgggcggtatcggccacacttcctgcctgtacaccgaccaggataaccaaacggctcgcattgcctacttcggcgataaaatgaaaacggctcgcatcctgatcaacaccccggcttctcagggcggtatcggcgacctgtataacttcaaactcgcgccttcgctgacgctgggttgcggctcctggggtggtaactccatctctgaaaacgtcggacctaaacacctgatcaacaagaaaactgtagcgaagcgagcagaaaacatgttgtggcataaacttccgaaatcgatctacttccgccgtggctcgctgcctatcgcgctggaagaagtggcgaccgacggggcaaaacgcgccttcatcgtgaccgaccgtttcctgttcaacaacggctatgccgaccagatcaccaaggttctgaagtctcacggcatcgaaaccgaagtgttcttcgaagtggaagccgacccgacactgagcatcgtgcgtaaaggcgccgagcagatgaactccttcaaaccggacgtcatcatcgcgctgggcggcggttcgccgatggacgctgcgaaaatcatgtgggtgctgtacgaacatcctgaaacccacttcgaggatctggcgctgcgcttcatggacattcgcaagcgtatctacaagttcccgaaaatgggcgtgaaagcgaagatgatcgctatcaccaccacctcaggcaccggttcggaagtcacgccattcgccgtcgtgaccgacgacaccaccgggcagaaatacccgctggccgactatgcgctgaccccggacatggcgattgtcgacgccaacctggtgatgaacatgccgaaatccctgtgtgccttcggcggtctggatgcggtcacccacgcgctggaagcctacgtctcggtgctggcgaacgaatactccgacggccaggcgctgcaggcgctgaaactgttgaaagagtatctgccggccagctataaagaaggcgcgaaaaacccggttgctcgtgaacgcgtgcacaacgccgccaccatcgccggtatcgctttcgccaacgccttccttggggtttgtcactccatggcgcacaagctgggttcggagttccacattccgcacggcctggccaacgcgatgctgatttccaacgttattcgctacaatgcgaacgacaacccgaccaagcagacggccttcagccagtacgaccgccctcaggcgcgccgccgctacgctgaaatcgccgaccacctcgacctgagcgccccgggcgaccgcaccgcgcagaagattgagaaactgctggcctggctggacgagctgaaaaccgagttgggcatcccaacctccatccgcgaagcgggtgtgcaggaggcggacttcctggcgaaagtcgacaagctgtcggaagacgcgttcgacgaccaatgcaccggcgccaacccgcgctatccgctgattgccgaactgaagcaaatcatgctggataccttctacggccgcgaattcagcgaagcggtagaagaggaagctgccgctccggctgccgccaaagccgcggtaaagaagcccaagaaataa

SEQ ID NO: 423684 - DNA, 645 bp, Serratia marcescens
gtgggccaatctctgttggatctttccggctttatcaagttctttgtcggtctgtttgcgctggtcaacccggtgggcatcttgccggtgtttatcagcatgaccagctaccaggcggaagcggggcgcaataaaaccaacctgaccgccaacctgtcggtcgccatcattttgtggacgtcgcttttcctgggcgaagggatcctgcggatgttcggcatctctatcgattcgttccgcatcgccggcggtattctggtggtgaccatcgccatgtcgatgatcagcggcaagctgggggaagacaagcaaaacaaacaggagaaatcggagagcgcgatccgcgaaagcatcggcgtggtgccgttagcgctgccgctgatggcggggccgggggcgatcagttccaccatcgtgtggagttcccgttatcacaactggcaaagcctgctcggctttacggtggcgatcgccttgttcgccttttgttgctggctgttgttccgcgccgcgccgctgttggtgcgtttgctggggcagaccggcatcaacgtgatcacccgtatcatgggtctgctgctgatggcgctcggcatcgagtttatcgttaccggcattaaggcgatattccccggcctgttgtaa

SEQ ID NO: 423685 - DNA, 1638 bp, Serratia marcescens
atgcagcaaaccctgaagcgtacttctttgaccttgttgattagcggcgcgctgagcgtcggcgccgtaaatagcggttgggcggcgcaggtgccggccggcgttcagttggcgcagcagcagaatattgtgatcaataacggtagcgaagtggcttcattggatccgcataaggtcgagggcgtaccggaaagcaatatcattcttaacctgctggaagggctggtgagcaccgacgccaacgggcatgtggtgccggcggcggcggcgagctgggaaaaccagaattatcagcagtggactttccacctgcgtcccggcgcggtgtggagcgacggcagcccggtgaccgcgcaagatttcgtctacagctggcagcgtctggccgatccgaaaatcgcctcgccctatgccagctacctgcaatacaccaaagtcgagaatatcgacgacatcctgaccggtaagaagagcccgcagaccctcggcgtcaaggcgctggacgatcaaacgctgcaggtgacgctgagcgagccggtgccgtatttcatcagcatgctgagccacacgtcgctcaaaccggtcaaacgggcggtggtggagaaattcggcgataaatggacgctgcctgccaactacgtcggtaacggcgcttaccgcctgaaagagtgggtggtgaacgagcgcatcgtgctggagcgcagcccgagctactggaacaacaagcagacggtgatcaatcaggcgaccttcctgccgattacctcggaagtcagcgacgttaaccgcttccgcagcggcgagatcgatatcaccaacagcgccattccgccatacctgtacgtcaagatgaagcgcgaaatgcctgaacagctgcacgttaacccttatctgtgcaccttctattacgagctcaataacaagcaggcgccgttcaccgatgcgcgcgtgcgtacggcggtgaagatgacgctggatcgcgacatcatcgccaacaagatcatgggccaggggcagatcccggcctacagcttcacgccgaccttcacggaaggcgctaacttcacgcaacccgcgtgggccggctggagccaggaacagcgcaacgctgaagccaggaaactgctggcggaagcgggctacagcgacgccaagccgctgaaattctcgctgctgtacaacacctccgatcaaaacaaacagcaggcgatcgccgccgcgtcgatgtggaagaagaacctgggcgctgaggtcacgctgcgcaaccaggaatggaaaacgtcgctggagagccgtcatcaggggcaatacgacgtggcgcgcgccacctggtgcggggattacaacgagcccagcgcgttcctgaacctggtgctgtccaacagcagcatcaataccgtgttctataagagcccggcgttcgacgccatcatggccgccacgctgaaggcgccggatgaggccgcgcgcgccgcgctctatcagcaggcggaagcgcagctggacaaagactccgcgttggtcccggtttattaccgcgtcagcgcgcggttgatcaagccgacggtgggcgggttcaccggcaaagatccgctggactataccgacgttaaaaatctgtacattatcaagcagtaa

SEQ ID NO: 423686 - DNA, 1638 bp, Serratia marcescens
atgaccaacatcacgaagaaaacgctcattgccgccggcgtcatcgccgcgctgggcatcacagcaaccacctccgcctttgccgccgacgttcctgctggcgtgcagctggccgacaagcaagaaatcgtcaaaaacaacggttccgaagtgcagtcgctggatccgcacaaaatcgagggcgtgccggaaaacaacgtaacccgcgatctgatggaaggcctggcgaacaacagcccggacggttccatcgtgccgggcgtcgcggaaagctgggataacaaggatttcaaagtatggaccttccacctgcgtaaagacgccaaatggtccaacggcaagccggtaacggcgcaagatttcgtctacagctggcagcgcgtggtggatccgaaaaccgcgtcgccttacgccagctacctgcagtacgcccatgtggaaaacgtcgatgacatcatcgccggtaaaaaagacaagtcgacgctgggcgtgaaggccatcgacgaccacaccttccaggtgaccctgagcgagtcggtgccttatctggttgaaatgaccccgcactacgccatgaagccggtttacaaagacgcggtggagaagtttggcgagaagtggacgctgccggccaactacgtcagcaacggcgcctacaaactgaaagactggattgtcaacgaacgcatcgtactggaacgcaacccggaatattgggataacgccaaaaccatcatcaataaagtgacgttcctgcctatttcgtcggaagtgaccgacgttaaccgctaccgcaccggtgaaatcgacatgacttacaacaacatgccgatcgaactgttccagaagctgaagaaagagatcccgaaagaggtgcatgtcgatccttacctgtgcacctattactacgaaatcaacaaccagaaggcgccgttcaccgatgcgcgcgtgcgtgaagcgctgaagctgggcatggatcgcgacatcatcgtcaacaaggtgaaaaaccagggcgatctgccggcctacagctttacgccgccatacaccgacggcgccaagctgaccccgccggagtggttcggctggacgcaggaaaaacgcaacgaagcggcgaagaaactgctggcggaagccggctacggcccgggtaaaccgctgaccttctccctgctgtacaacacttcagacctgcacaagaagctggcgatcgccgccgcctccatctggaagaaaaacctgggcgtggacgtgaagctggtgaaccaggagtggaaaaccttcctggatacccgccatcagggcacctatgacgtggcgcgcgccggctggtgcgccgactacaacgaaccgagttcgttcctgaacatgatgttgtccgacagcagcagtaacaccccgcactacaagagcgccgagttcgacaagctgatggccaacgtgctgaccgcgaagaccaaagacgagcgcgccgatctgtatcagaaagcggaagttcagctggataaggattccgccatcgttccgctgtattactacgtgaacgcccgtttggtgaaaccttacgtcggtggctacaccggcaaagacccgcttgataacgtgtacgacaaaaacctgtacatcatcaagcattga

SEQ ID NO: 423687 - DNA, 921 bp, Serratia marcescens
atgcttaaatttatacttcgtcgcttgctggaagcgatcccgacactatttatccttatcaccatctcattcttcatgatgcgcctggcgcccggcagtccatttaccggggagcgcgcattgccgccggaagttatggcgaatatcgaggccaaatatcatttgaacgacccgatctggaaacagtacggtcattatctggcgcagcttgcgcagggagacttcggcccgtcttttaaatacaaggactattcggtcaacgatctggtcgccggctctttcccggtgtccgccaaactcggcctggccgcgtttctgctggcggtggtgctgggggtgagcgccggcgttgtcgccgcgctgaatcagaacaccaaatgggactacacggtgatggggttcgccatgaccggggtggtgatacccagtttcgtggtggcgccgctgctggtgctgatcttcgccatcacgctgaaatggctgccgggcggtggctggaacggcggcgcgcctaaattcatcatccttccgatggtggcgctgtcgctggcctatattgccagcatcgcccgtatcacgcgcggctcgatgattgaagtgctgcactccaacttcatccgcaccgcgcgtgccaaaggcttgccgatgcgtcgcatcattttccgccacgcgctgaagccggcgctgctgccggtgctgtcctacatgggcccggcgttcgtcggcatcatcaccggttcgatggtgatcgaaaccatctacggtctgccggggatcggccagctgttcgttaacggcgcgctgaaccgcgactactccctggtattgagcctgaccattctggtgggcgcactgaccattctgttcaacgcgatcgtcgatgtgctgtatgcggtcatcgatccgaaaatccgttattaa

SEQ ID NO: 423688 - DNA, 906 bp, Serratia marcescens
atgttgactaaaaagaacagcgaagctctggaacacttcagcgagaagctggaagtggaaggacgcagcctgtggcaagacgcgcgccggcgctttatgcacaaccgcgcggcggtcagcagcctgttcattctggtgttgatcacgctgtttgtggtgctggcgccgatgctgtcgcaatttgcctacgacgataccgattgggcgatgatgtccgccgcgccaagcgtggaatcggggcactatttcggcaccgactcctccgggcgcgatctgctggtgcgcgtggcgatcggcgggcgcatctcgctgatggtcggcgtggcggcggcgctggtggcggtgatcgtcggcaccctgtacggcgcgatgtccggctatctgggcggcaaggtcgactcggtgatgatgcgcctgctggagatcctcaactccttcccgttcatgttcttcgtgatcctgctggtgacctttttcggccagaacatcctgcttatcttcgtggcgatcggcatggtgtcgtggctggatatggcgcgtatcgtgcgcggccaaaccctcggtctcaagcgtaaggagttcatcgaagcggcgctggtgtgcggcgtctccacgcgcaatatcgtgctgcggcatatcgtgccgaacgtgctcggcgtggtggtggtgtatgcctcgctgctggtgccgagcatgatcctgttcgaatccttcctcagcttcctggggctgggcacgcaggagccgctcagcagctggggcgcattgctcagcgacggcgccaactcaatggaagtttcaccgtggttgctgctgttcccggcgggtttcctggttgtcactctgttctgtttcaactttatcggcgatggcctgcgtgacgccctcgacccgaaagatcgttaa

SEQ ID NO: 423689 - DNA, 1017 bp, Serratia marcescens
atgagcaccattgaacatcctcaactgcaaaccggcgccggcgtcaaaacgtcgccgctgctggacgtgaaagacctgcgcgtcacgttctccaccccggacggcgacgtgacggcggtgaacgatctgaacttcgacctgcgcgccggcgaaacgctgggcatcgtcggtgaatccggttccggcaaatcgcagaccgcgttcgccctgatggggttgctggccagcaatggccgcatcggcggttcggccaaattcaacggccgtgaaattctcaacctgccggaaaatcagctcaacaagctgcgggccgaagagatctcgatgatcttccaggacccgatgacctcgctcaacccttatatgcgcgttggcgaacagctgatggaagtgctgatgctgcataagaaaatgagcaaaagcgaagccttcgaagagtcggtacgcatgctcgacgcggtgaaaatgccggaagcgcgcaagcgcatgcgcatgtatccgcacgagttttccggcggcatgcgccagcgcgtgatgatcgccatggcgctgctgtgccggccgaagctgctgatcgccgacgaaccgaccaccgcgctggacgtgaccgttcaggcgcagatcatgacgctgctcaacgagctgaagcgcgaattcaacaccgcgatcatcatgatcacccacgacctgggcgtggtggccggcatctgcaacaaggtgctggtgatgtacgccggccgcaccatggaatacggcagcgcgcgcgaggtgttctaccagccgagccatccgtactccatcggcctgttgaacgcggtgccgcgcctcgacgccgaaggcgaagcgttgctgaccattcccggcaacccgccgaacctgctgcggttgccgaaaggctgcccgttccagccgcgctgcccgtacgccatggagcagtgcgcgagcgctccgccgttggagcaatttggggaagggcgcctgcgcgcctgctttaaaccggtggaggcgttggtatga

SEQ ID NO: 423690 - DNA, 1002 bp, Serratia marcescens
atgacagcggtaaccgacaagaaagtgctgctcgaagtggccgatttgaaagtgcacttcgacattcatgacgacaaacagtggttctggcagccgccgaaaaccctgaaagcggtcgatggcgtcacgctgcggctgttcgagggggaaaccctgggcgtggtcggcgagtccggctgcggcaagtccaccttcgcgcgcgccatcatcggcctggtgaaagccaccagcgggcgcgtcgcctggctgggcaaagatctgctgggcatgagcgacgccgactggcgcaaaacccgcagcgatatccagatgatcttccaggatccgctggcttcgctcaacccgcgcatgaccatcggcgagatcatcgccgagccgctgcgcacctactacccgaaaatgccgcgtcaggaagtgaaggacaaggtcaaggcgatgatgctgaaggtcggcctgctgcctaacctgatcaaccgctacccgcacgagttttccggcggccagtgccagcgtatcggcatcgcgcgcgcgctgatcctcgagccgaagctggtgatctgcgacgagccggtctccgcgctggacgtgtcgattcaggcgcaggtggtgaacttgctgcagcagctgcagcgcgagatggggctgtcactgatctttatcgcccacgacttggcggtggtgaagcacatttccgatcgcgtgctggtgatgtacctgggccatgcggtggagctgggcacttatgacgaggtgtaccacaatccgcagcacccttacaccaaagcgctgatgtcggcggtgccgatcccggatccggacaaggagaaggaaaagcagatccaactgctggaaggggagctgccttcgccgatcaacccgccgaccggctgcgtgttccgcacccgctgcccgatcgccgggccggagtgcgccaagacgcgcccgctgctggagggcagtttccgccatgcggtttcgtgcctgaaggtcgatccgctgtaa

SEQ ID NO: 423691 - DNA, 324 bp, Serratia marcescens
atggatttgaataaccgccttaccgaagacgaaacgctggaacaggcctacgacatcttcctcgaattggccggcgacaatctggatccggcggatattctgctgttcaacctgcagtttgaagagcgcggcggcgccgaactgtacgacccctccgaagactggagcgagcacgtggattacgatctgaacccggacttcttcgccgaggtggtgatcggtctcgcggacagcgacggcgagccgatcaacgacgtgttcgcccgcgtgctaatctgccgcgagaaagaccacaagctgtgccacattctgtggaaagagtga

SEQ ID NO: 423692 - DNA, 1461 bp, Serratia marcescens
atgacaacattttataccgtaatcagttggctcatggtgttcggctactggctgctgattgccggcgtgacgatgcgcattttaatgaaacgccgtgcggttccctctgccatggcctggctgctggttatctacattctgccgctgttcggcatcgtggcctatttatcgttcggcgagctgcatctaggcaaacgccgggccgagcgcgccaaggccatgtggccgtcgaccgcccgttggttgaaggagctgaaagagagccgccgcatcttcgccaccgaatacagcgaagtcgccgaaccgctgttccagctgtgcaaccgccgccagggcatcgacggcgtcaagggcaaccagctgcagctgctcaccaccaccgacgacacgctgaaagcgctgatccgcgacatcgagctggcgcgccacaacatcgaaatggtgttctatatctggcagcccggcggcctggtcgatcaggtggccgaatcgctgatggccgccgcgcggcgcggcgtacactgccgcctgatgctcgactccgccggcagcctgcaatttttccgcagcccctacccggcgatgatgcgcaatgccggcatcgaagtggtggaagcgctgaaggtcaacctgctgcgcgtgttcctgcgccgcatggatctgcgtcagcaccgcaaagtggtgctgatcgacaactacatcgcctataccggcagcatgaacatggtcgatccgcgctacttcaagcaggatgcgggcgtcggccagtggatcgacctgatggcgcgcatggaaggcccggtggccaccaccatgggcatcgtctatgcctgcgactgggagattgaaaccggcaagcgcattctgccgccgccgccggacgtcaacatcatgccgttcgagcaggagagcggccacaccattcaggtgatcgcctccggccccggcttccccgaggagatgatccaccaggcgctgctgaccgcggtctattccgcgcgcgagcagctgatcatgaccacgccgtacttcgtgccgagcgacgatctgctgcacgccatctgcaccgccgccctgcgcggcgtcgaggtcagcatcatcgtgccgcgcgacaacgattcgatgatggtgcgctgggccagccgcgcgttcttctccgagctgctggaggccggcgtcaggatctatcagttcgaaggcggcctgctgcataccaagagcgtgctggtggacgggcaactcagcctggtcggcaccgtcaatctggatatgcgcagcctgtggctgaatttcgagatcacgctggtgatcgatgatgacggcttcggcagcgatttggcctgcgtgcaggaagattacatcgcccgttccaagctgctgaacgccaaagagtggctgaagcggccgttctggcatcgcctggtcgagcgcctgttctactttttcagcccgctgctgtaa

SEQ ID NO: 423693 - DNA, 492 bp, Serratia marcescens
atggcaacggcaaagaaagcagcgaaaacccatatcggcctcgacagtaaacaatcggcaaaactcgccgaagcgctgaacgcgctgttggcgaactatcaggtgctgtatatgaacgtgcgcggctatcattggaacattaccggcccgcagttctttgaactgcacgcgaagttcgaagagacatataacgatctgctgaccaaggtggacgagctggcggaacgtattctgacgctgggctcgcagccgcgtcacgctttcagcgactatctgaaaaccgccgacatcaaggaacacaccaacgtgaccgatgataagggcacgctgcgcggcctgttggaagggtattcaatcttgctgcaacagcagcgtgaactgctgacggtggcggcggacgccggtgacgaaggcaccgcgtcgctgatgagcgattacatcaaagagcaggaaaaacaggtctggatgctcaacgcctatctgggcaaataa

SEQ ID NO: 423694 - DNA, 1473 bp, Serratia marcescens
atgtacgccaagaaccgctggttgatcctgacgatggtcgccagcgccctgttcctgatcgtcatcgatatgacggtgttatataccgccctgccgcgcttaacccaggcgctggacgccagcgcctcgcaaaaactctggatcgtcaacgcctatccgctggtggtggccggcctgttgcccggcgccggcatgctgagcgatcgcatcggccataaacggctgtttctcgccggactgccggtgtttgccgtcgcgtcactgtgcgccgcgttctcgcccaccgccgagtggctgatcgccgcccgggtgttcctcgccgttggcgcggcgatgatgatgcccgccacgctgtccatcgtgcgccacgtctttaccgacgaacgcgaacgcgcgctggcgatcggcatctgggcctcggtggcctccggcggcgcggccatcggcccggtggtcggcggcctgctgctggagtatttctggtggggttcggtgttcctgatcaatgtgccggtcgtgctgctggtctggccgctggcgtggaaactgatcccgcgctgcggtggcgataacccgcgcccttcggacatcgtcggctcggtgcagatcatgattggtctggtcggcgctatctatgcgctgaaggagctgagcaagccgacgcctgatgtgagtgccttgcttgtggcagccctgatcggcgtgttgttcctggccctgttcgtgcgtcgtcagcagcgcagcgcccacccgatgatcgatttctctctgttccgcaaccggctgttcgccggcggcatcggcgtggcgctgctttcgatggtggcgctgatcggcatcgaactggtgctcagccaacgcctacagctggtgctcggcctcagcccgctgcaggcggcgctgtttattttgccgatcccgctggcctcggcgctggcggggcccgtagccggcctgctgttgccgcgctacggcgaacgcagcatcatcctcggcggttttgtcctgaccactctcggcatcgccggtcttgccgcgtcataccagagcggcatggcattgcaattggtcagcctggcgctggtgggctttggcctcggcggcgtgatcaccgccgcttccaccgccatcatgctgaacgcgccggaggaaaaatccggcatggcggcgtcgatcgaggacgtctcctacgaactgggcggcgtgctgggcgtgacgctgctcggcgggttgatgacggcggtttacagccatagcctggcgctgccggcggagctgccggtcaacccgctggcatacgacagcatcgacgaagccctgcgcctggcggccgggatggcggccgatcgcgcgcagcagctgacgcagctggcgcgtctggcctttgatcgcgcgtttattacggtactgatcgccgccgcgctgttaatggcgctgggcgccggggcggtaaaactggcgctgcgcaagtaa

SEQ ID NO: 423695 - DNA, 564 bp, Serratia marcescens
atgggacgtcaacgcagcatcgatcgcgacaaggttttggacatcgccgaagaaatcgtcgccacccagggcgccgccggcttgaccatcgacgccgtcgccaaagcgatggggatctccaagggcggggtgcagtattgctttggcagcaaagacgccctgattgatgccatgttcgatcgctggggcagtgcctatgaaacgctgttcacggctatcgccggcgacgatccttcaccgcagaccgctgtgcgggcgcatatgctggccacccacagttcggatcagaccgccagcgccaaggccgccgggctgatggcgacgctgattcaaacgccggagcatctggcgagcacgcgcgaatggtatcgcagccgcatcgccgggctcgatttgaccaccgaagagggcaagcgcgcgcgcctggcgtttctcgccacagaaggcgcctttatgctgcgttattttggtttgatggatatcgaccaggcggaatgggaaacgatgttcaccgatatgcaggcgttgattttaactgaggatgcctatcgcactgatagctag

SEQ ID NO: 423696 - DNA, 1008 bp, Serratia marcescens
atgaataagaccaagatagcgttgtttgcctctgccctgatgctgggcagcctgtcggcagcccaggccgccccggttaaaatagcggtattgatgtacggcaacaaagccgagttcgtgcaattgatggaaaggttcgggaaggaacacccggcggtgaaaagcggcgaagccgtgctgaccttctacgatgggcgttatgatgcatcggtgcaaaacgatcaggccgccaccgctatccagacgcgcgccgatgccattatcgtcaaccctatggattttgaggccaatatcgatatcgtcaccaatgccaacgaggccaaaatcccggtggtggtcaccaatgcgcgcctgaacacggacgcgatgacgtctgaagtggtgtctaacgacgagttggggggatatctggaagccaaagccgtactggacaaactcgactgcaagaaccataaggtgaacgtggtgattatcgaaggcccgaaaggcggcagcggtgagatccagcgcggcaagggcaatgataaagcgatagccgagtgcggcgccggccaggtcaccgtgcttgaacgcaaaacggccaactggtcacgcgcggaagcgcagccgctgatggaaaactggctgcagaaacatcggggcaaaatcaacggcgtgattggccaaaacgacgagatggcgctgggcgctatcgaggcgattaaaggcgccggcctgaatgtgaaggacttcgcgattgccggcgttgacggcgtttccgacgcgattcatgcggtgcaggccggtgaaatggtctctatcctgcaagatgccaaaggccagatgcaggggtccatcgacgtcgcgctgcgcgccgtgaaaggtgaaagctatcagccacagtcggatatctggaaacagtacgccaaggatctgaaatgggaaggcggcacgcagaagcattattacattccgtggaccgtcgtcaccgcagagaacgcccaatcgctgttggacgcccgtaaataa

SEQ ID NO: 423697 - DNA, 1038 bp, Serratia marcescens
atgagcagcgcccactccttatcaccaggaatttcatttttcacccgcaataagcgccgtatgcacaaatacggcattatcatcgcctttttcgccctgtgcctgatcgtggcgctgattggcgaatatcaggtcgctcagggggcctggagcagcaactattttctcagcaatgaaaacaccctgatcgtcctgcgccaggtctcgatcaacggcattctggcgatcggcatgaccttcgtcattatcacggcaggcgtcgatctctccgtgggctcggtgctggcgttaagcgggatcgtcgccgcccgcttcgccaccaacaacagcggattggctatcggcgacaccgcgaccgccgtcatggcgccgctgattgtggcactcggtatcggtatcgtctgtggcctggtaaacggcaccgtgttagcccgttatcggctgcagccgtttatcgtcaccatgggcatgctctccgcggcgcgcggtttaaccatgctgaccaccaacggcaatccggtatcgcaattgaacagcgatttccgctggttaggcaatggctatgtcggcggcgttccggtgcccgtcatcatcttcatcgtgctgttcgccctcgcctggctcgtgctgaataaaaccctcttcgggcgttacatctacgccgtcggcggcaacccgaagagcgcgcgcacctcggggattaacgtgacccgcatcaaaatactggtgtatacgctgtgcggcgcgctggccggcatcgccggcctgatcctcacggcgcgcaccggttcggcgcagaccaatgccggcgcagggtatgagttggacgccatcgcggcggtggtgatcggcggcaccagcatggccggcggcgtcggtacgctggtcggcaccttcttcggcgtgctgattatcggggtgatgaataacggcctcgatctgctcggcgtgcagtcgtattaccaacaaattatcaaaggcgcattgattgtccttgccgtcttgctcgacccctcgcgtaagcaacagcgcgattaa

SEQ ID NO: 423698 - DNA, 1506 bp, Serratia marcescens
gtgacgcgagatccccatacgccagcgcccgcctacctgctggaggtcagcggcgtcaggaaagccttcggcccggtcgtggcgctcaagaatgcggagttttgcctgcggcgcggatccatccatgccctgtgcggcggcaacggcgcgggtaaatccacctttctcagcattctgatgggctttattcaacccgatggcggcgacatttttatcaatggccaacgctgcgaatttcatcatccgcgggaagccctcaatgccggcatcgccatcgtgcagcaggagctgagcgcgatcccggatctgacggtggccgaaaacatttggctgggccgcgagccgagacgcctggggttcgtcgatttcgcaacgctcaaccagcgcacgaccagcctgctcaaagaactcgatttcaagatcgacgcccgagaaaaaatgcgcaacctgagcgtcgccgaacagcagctggtcgagatcgccaaggcgctgtcgcatgccaatgccgacatcatcatcatggatgaacccacctcggcgattggcgaagaggatgcgcagaaaatctttcagacgcttcagcaactggcgtcaaaaggtaaaggcattatttacgtctctcaccgtttgtcagaaatattccaaatcgcggacagctacaccattttccgcgacggcgcctatatccatgaaggctatatcgccgacattacccgtgaacagctgatcgaacacattattggcggcgagtacgacagcgagttcgccaaattcaatcagcccggcggacaggtcttgctggcggtcaataacctgtgttggcgcagcaagataaaagatatcagcctgcagctgaagcacggtgagatcctgggcatctatgggctggtgggatcgggccgcagtgaatttctcgaccttatcttcggcattcagcatgccgacagcggcacgattcgcctgggcgacaagacgctgaaccgccactctccgcgcgaggccatcgacagcggtattgcctacgtgacggaagatcgcaaggaaaccggcctggtgctgtgccgttccgtcagtgaaaacatcaatatcgcctcttttgccgccatcagccggatggggtttgtcagcgagaaacgggagcaggcgcgaacccgcgacatgatccagcgcttcaacgttaaaacccacgacggcgaacagccggtgggcaacctgagcggcggcaaccagcaaaaagtggtgctgggccgttgggcgctgctggatccggaggttttgctgctcgacgagccgacgcgcggtatcgacgtcggggccaagaaagagatctatcgatttatgtcggagttcgccttgcaaaacaaagggatcattatggtttcctccgagctttcggaaattatcggcatgagcgatcgcatattggtgtttcgtgacgggcagttggccggcgagctttcggcagccgatgcgacccaggcagcactgatgaaacttgcggtttaa

SEQ ID NO: 423699 - DNA, 1518 bp, Serratia marcescens
atggcgctctatgctggcatagactgcggtacgcaaggcacgaaagtcgtgattgtcgacagcacacagggcgtgatcctcggtgagggcaatgcccctcaccgcctcatcagccaagccaatggccggcgcgaacaggaggccgactggtggattgaggcgctagtcatcgcttttcgccaagccgtgactcacgccggcgttgatgcacgggagattcacgctctgggggtctcgggccaacaacatgggtttgtgccgctggacgcagatggcaacgtgctgcacagcgtcaagctgtggtgcgataccgaaaccgcagaggaaaacgaacggctcctgcaacagctcggcggagccaacggctcgctggaaacgcttggcctgaggatcgccaccggctataccgcgtcaaaaatcctttggttcaagacgcaccatccggcgttgtgggcacaactgcataccgtgttattgccccatgactacttgaacttctggctgaccggggagcgcgtagcggaatatggcgacgcttccggcaccgggttgttcgatgtgcgcacccgtcgctggagcaaaaccgccgtcgatctcatcgacgacagcggccgcctgtggcaagccctgccgccgctcaaaagcgcggagtgctgcatcggcacggtgcgccccgccgcggcggaaaaactcggcctcggcccggcagtgcgggtctcgaccggcggcggcgacaacatgatggcggccatcggttccggcaacatcgaggccggcaccctcaccctgagcctgggcacctccggcacgctgttcgcctggtccggcgcccccgtcacggcggaatcggacatgattgccggcttctgctccagcaccaacgggtggctgccattgatttgcaccatgaacgtcacctcggccaccaccgcggtacaaacgctgctggaccaagatcttgccggctttaacgctttgctggcgcaggcttcgcccggcgcaggcggtgtcgagatgctgccgttcttcaatggcgaacgcgttccgccattgccccacgcgcgcgccagcctgcataacctcgatagcgacaactttacccgcgccaatctctgcctggcggtggtcgaaagcgccacgtatgggttgcgctatggcatcgagctatttcgccgtcagggcatcgaagcgcgcgaaatccgcctcaccggcggcggcgcccgcagcgccgcctggcgacaaatcgtcgcggacgtaatgggatgcccggtggtctgtctgaaagccaaagagaccgcggcgctgggcggcgccattcaggcgatgtgggcgacgatgttggccgacgatccgcgccggaacgccgccgcattgctggccgaactgtgccaacgcttcgttgcgctggatgaggccacgcgcacgccgccaaacgccggcaggcaggcgcaatacgagacgctttatcaacgctacctgcaacgcttgcagcagaactacccggaggtgcaactgtga

SEQ ID NO: 423700 - DNA, 1035 bp, Serratia marcescens
atgaaagcattagtgttggccaaagtgggggaaatcgctatcgaggacgtccagcttgccgaaacgctgggccccgatgatgtgcagataaaaattcattccgtgggcatctgcggcagtgatgtgcactattaccaacatggccgcattggcccgttcgtggttaacgccccgatggtgctcggccatgaagcctccggcgtggtgctcgcgacaggtaaaaacgtcactcacctcagcatcggcgatcgcgtttgcatggagcccggcattcccgatctcaactcggtgcagacgcgcgccggtatttacaaccttgacccggccgttcgcttctgggcgacgccgccggtacacggttgcctgcgcgaaaccgtcatccaccctgccgccttcacgttcaaattgccggacaacgtcagcttcgctgaaggcgccatggtggaacccttagccatcggcatgcaagcggccaccaaagccgggatcaaacccggcgatatcgcgctggtgatcggcgccgggccgatcggcgtggtcaccgccctcgcggcgctggcgggcggctgctcggacgtcattatttgcgatctgttcgacgaaaaactcgccgtggcggccagttacgaggggctgcacgccgtcaatatcaaaaccggcgacctggcggggaaagtggccgcgctcaccagcggcaatggcgccgatgtcgtgtttgaatgcagcggcgcaaaaccggctatcgcaacactgaccgaacatgcggcgccaggggcgaccgcggtgttggtcggcatgccgatagatgccgcgccgctggatatcgtcgccgcgcaggccaaggaaattaccttcaagaccattttccgctacgccaacatgtacccgcgcacgctgcgcctgttgagcagcggcaagctgcgcgtccagccgttgataagccaaacctacaagttctccgacagcgtagccgccttcgaacgcgcggcggcgggacatgcctcagacatcaaaatcatgctggaaatggagtga

SEQ ID NO: 423701 - DNA, 555 bp, Serratia marcescens
atgaacaaacgacaaagcgccatggccgctacgctggaatatttgcgcaaggcggacattattctgactgaagaagaacagcaacgtattgaaattgcgacatttggcctggccgactatcccgtgtcagggctgcaactgctgacctatgtcaactcgcctcgctattgtgcgaaagagttggtgctgtttccagagcagacttgcccggaacatttgcatcctcctttcgccggcacgccgggcaagcaagagacgtttcgctgccgttggggcgaggtgtttctgtttgtcgatgatgaaaacctgacgcttaatgacgccggcggcgaaccggtatgccgggtgccagagggcgcggagccttggtatacctgcaatcgctatatcctcttgcggtcgggcgagcaatacaccatcgcgcccaatacccggcactggtttcaggctggaaagcggggggcggtggtgtccgagttctcttccgagagccgtgacgagctggatatctttaccgatccccggattaaccgcctggcgggcgtaaaccattag

SEQ ID NO: 423702 - DNA, 1002 bp, Serratia marcescens
ttggcagtgggtcgaggacggaaagcgacgctggctagcgtggccgcacaggcaaacgtcagtaaaatcaccgcgtcgcgggcattttcacagccggacaaggttcatccggaaacgctgcgccgcattcgggagaccgctgccgaactcggttatgtggtcaatgccgcggcgcgcaacctgcgggcgaaaagcagcagaaccattggcatcgtcaaccctgatatggccaacccgttctttggcggcctgacgcggctgatgacgcttgaagcgcaaaaaatggggtatgacaccctggtgttcgactcctatgagtctcaggaaagcgaagacagaatcatcgacaaactgattggctacaacgtcgatgcgatcattctctcggtcatttccaacgatcatctgtaccagccttcctatctaaaacggttggaaacattgaatatcccgttggttttgatcgaccgggagctggataatcgccactgcagcggagtgtatatcgataacctggactgcggcctccaggcggggcgctggctgctggaacagaaggcgcagcgggtagtggtggtctccgggccggaaaactccaacgtcgcgcgtgacagggtaactggcttgcaagcggcattacaaggcaaggtggcgtcgcttgaagtgctgtatgccgatttctttatggatgtcgcctggcaagagacgagccgatggctggccaataaccgcgcgccggactttttcgtcggctgcaataaccagatctccctgggcattatcaaggcctgcatcgagcatcggctgccgttgatgcaggacgtggcgctgttcagcatcgatgaggtttcgcatgccgagatctacggttttcatttcccctgcgtgtcgcacgatttgcaagagatcgcctggcaagcgttgaatctggcgatccgtcgtattgccgaccccgagatcaaaccgggcaaggtggtggtgcggggaaaactcatcgcgtag

SEQ ID NO: 423703 - DNA, 957 bp, Serratia marcescens
atgtccctgccacaattccacccctcttcccactgcggcaaagccgccctctggctggctgcggccgaggttctgctgatcgtggcctggagctccggtttcgtcggcatccgcttcgccgccgattacgcgccggtgttgctggtggcgttctggcgcagcgtggtggtcgcgttcgcgctgctgccgtttagcctgagcgccataaggcgcgcatctccgctgacggtagctgttcacgccgggatcgggttgctcgccatgaccggttacctgaccggcgtcagcaaaggcattgaatatggcgtgccggccgggctggccgcgctcatcgccgatttgctccctctcggcacggcgctgctgagcatgctggtgcaacgtcgcctgcccgatggccgcgtctggttcgggttaacattgggggttagcggggtaacgctggcgaccggcagcgccatctcatggggaaacgccccaatgtggagctacttgttgccgctggcggggatgctgtcgctggcgctggcgacgctgtggcagcaacggctgccgcagacgcagacgcagacaatgagtttgccggccgcgctgggcatacaaagcgcggtttcagcactggctttcgccgcgatggccggcgctgaaggcccgttgctgccaaccatgacgacgggctttgtgatcggcgtgctttggaccgcgctactggcgacgctgggcggctacggtctgtactggttttgtctaaggctcacctctgcgctgcgcgtgacgagcctgctgtttctcagtcccttcgtcacttactgctgggcatggttaatgttcgatgagcccctttcctggccgatgctgctgggcgcggcggccgcaggaagcggtttgtggttgctaatccgtcccgccggggggatgagccgtaaacggcgcaacgcgctaaaaaatgacgggtaa

SEQ ID NO: 423704 - DNA, 867 bp, Serratia marcescens
atgcggccgacattggatatcgatctcttgcgcacttttcacgccattgcgcgtttggggcaatttcgcgcggcggcggcatttgtcaatcgcagccccgccgccgtgagcgtgcatatccagcgcttggaacagctggcgggcgggcgcctgctggagcgtgacaatcagtccgtggcgctgacgccgctgggaaacaggctgctggcctcgacgctcgtgctgctgaacgcccatgacgatattctgcgggagctgcagggcgcgccgctgagcggccatatcaaattgggattgcccgatgagtacgcttctcatgtgatacgccatattttgccgcggtttgccgacagttttcccgcagtggagctggaagtctctaccgccgccagccaggcgctggcggaacaaattggccgtaatcggctgcatcttgcgctggtggttcaaccctcggggagacggtgccagacaccgcttgcggtgactgcgccggtgtgggccggaggccgttcgctggcgctgcaggctaaccggccgttgccgctggcgttgcatgccgccgactgcccttatcgcgaagcaatgctcgaggcgttgacggccgcggggcggccatggcgggtcattttaagcagtccctcggccagcgtggtggcctcgtgcgtagaggcggggctggccgtcacgttgctcgatcgggcgcggctctctggcgcgatgcggatactcgaagagttgccaccggtcgcgccgtatgaggtgcagctgctgcgctctttcgccgccgacggcgagcctgcgacgacgatgctggagaaagtcatcggcgagtattttcaggccggtgaacgcatcgcgcagtaa

SEQ ID NO: 423705 - DNA, 942 bp, Serratia marcescens
atgcgactcgacgtacacgctcacctgtggagcacagagtatctggatcttttgcaagcgcatggcgtgcacgacgtcgccgcctatcggcaactgggcgccggccgcaccgagcgcgaactcgacgcgcgcttcgccctgctggacagcgccggcatcgacatgcaaatcctgtcggcgacgccgctgtcgccgcatctggaagacgaacaggcggccgttgatgccgcacgccggatcaatgatgaatatgcggaactggtagcgcgttatcccacccgctttcgggctatcgcttctttgccgctgccgcatatcgacgcggcgttacgcgagcttgaaagggcctttacccagctcaatatgctgggcgcctgcatcaccacctcggtgctcgggctgtctattgccaacccgctgttcgagccgctctatcaggaactcaatcgccgccaaagcgtgctggccattcatcccgccggccgcggcgcgcattcgccgctgatcgccgattacgctttgacctggtcgatcggcgcgccgatcgaagatacggtcgccgccatgcactttattctccacggcatcccccaacgctttccggagatgaaaatcattgtgccgcacctgggcggcctgctgccgatgacgctggagcgtctcgaccaaaccgtcgcgtgggaagcgccgcatacgccggaaccgccaagccgcgccgccctgcgcatgtggtacgacacggtaggccacgatcaggtgcccgcattgcaagcggcggcggcgaccttcggcgcagagcggctgctgttcggcaccgatttcccgttccagccgggcgacctgtttcaaaccacggtggactacatccgccgtgcgggattgccggaggcagacgtgaacgccattttggatcgcaatgcggcggcggtgtttgggctatag

SEQ ID NO: 423706 - DNA, 297 bp, Serratia marcescens
atgctttatctgatctacgcgcaagacgtccccaactcgctggaaaatcgtctggcggtgcgtccagcacacctggcgcgcctgcaggcgctgcgcgacgccggtcgcctggtggtcgccggccctaacccggccatcgacagcaacgatcccggcgccgccggctttaccggttcgacggtgatcgccgaattcgagtcgctggcgcaagcccaggcctgggcgcaacaggatccctatatcgccgccggtgtctatgccgacgtgacggtgaaaccgttcaagcaggtgttctga

SEQ ID NO: 423707 - DNA, 654 bp, Serratia marcescens
atgacggaactggtaagggaaaaactcgatttgccggcgggcaaaagcaaactgctgctgcattcgtgctgcgcgccctgttccggcgaggtaatggaagcgatccaagcctccgggatcgagtacgccattttcttctataaccccaatattcatccgcaaaaagagtatttgttgcgcaaggaagagaacatccgcttcgccgaaaagcacggggtgccgatcatcgatgccgattacgataccgacaattggttcgcccgcgccaaggggatggagaatgagccggagcgcggcattcgttgcaccatgtgtttcgacatgcgtttcgagcgcacggcgctgtatgcgcatgagcacggttacgacaccatctccagctcgctcggcatttcgcgctggaagaacatgcagcagatcaccgactgcggcattcgcgcggcggaaaagtatcctgacctggtgtactgggattacaactggcgcaagaagggcggttcgtcgcgcatgatagagatcagcaagcgcgaacgcttctatcagcaggaatactgcggctgcgtctattcgctgcgcgacaccaacctgcaccgcaaggcgcaagggcggccgctgatcaagctgggcgtgctttactatggcgatgaagaataa

SEQ ID NO: 423708 - DNA, 744 bp, Serratia marcescens
atgccgctaaaaaagatgttccttaatcgccgtatatccgtgcctttcgtcttgtccgtaggcctgcacagcgccctggtggcgggattgctttacgcttcggtaaaagaagtggtggagctgccgaagccagaggacgcgccgatcagcgtcatgatggtcaacaccgccgcgatggccgaaccgccaccgccggcgccggccgagccggagccgccgcaggtcgaacctgagccggagccagagccggaacctatcgtggagccgccgccgaaggcgatcgtgaagccggagccggtcaagccgaaaccgaagcctaagcctaagccgaaggtcgaaaaacaggtcaaaccggagccgaagaaagtcgagccgcgcgagccgtcgccgttcaacaacgattcgccggccaagccgatcgataaagcgccggtgaaacaggcgcctgctgcgccggtgcagggcaactcgcgcgaggtcgggccaaggccgatcagccgcgccaatccgctctatccgccgcgggcccaggctttgcagatcgaaggcaacgtgcgggtacagttcgatatcgacagcgacgggcgcgtgagcaacgtgcgtatcttgtcggccgagccgcgcaacatgtttgagcgtgaagtgaagcaggcgatgcgcaagtggcgctatgaagccaaagaagcgaaagatcgcaccgtcactatccgcttcaagctgaacggcacgactgaattgaactga

SEQ ID NO: 423709 - DNA, 429 bp, Serratia marcescens
atgacacaacaacgacctttacccagcggcgagctggtgctgcgcacgctggcgatgccggccgataccaatgccaacggcgatatcttcggcggctggctgatgtcgcaaatggatatcggcggcgccatccaggcaaaagagatcgccgaagggcgcgtggtgaccgtgcgcgtggacggcatgaccttcctgaaaccggtggcggtaggcgacgtggtttgctgctatgcgcactgcatccgtaccgggcgcagctcgatcaccatcaatatcgaagtgtgggtcaagaaagtctcctccgccccgatcggccagcgctaccgggcgaccgaagcggtgttcacctatgtggcggtcgatgcggaaggcaactcgcgcgcgctgcctgaaggcaaaatgaatttccgcgtcggcttcgaagaataa

SEQ ID NO: 423710 - DNA, 540 bp, Serratia marcescens
atgaagcagtttcttgatttcctcccgttaattgtctttttcgctttttacaagctgtacgacatttacgtcgcttccggcgcgttgatcgtcgctaccgcactggcgctggtgttcacctgggttaaataccgcaaggtcgagaagatgacgctgatcaccttcctgatggtgctggtgttcggcaccctgacgctggtgttccacaacgatttgttcatcaaatggaaggtcacggtgatttacgcgctgttcgcgctggcgctgctgatcagccaatgggtgctcaaaaaaccgctggttcagcgcatgctgggcaaagagttgacgctgccggacaaagtgtggagcaacctcaacctggcctgggcggtcttcttcctggcctgcggcctggcgaacatctatgtcgccttctggctaccgcaaaacgtctgggtcaatttcaaagtctttggcctgacggtgctgacgctggtcttcaccctcctcagcggtatctatatttaccggcacatgccggaagaacagaaaaaatag

SEQ ID NO: 423711 - DNA, 1704 bp, Serratia marcescens
atgcagtggaaatctctccaggccctgacgcctggtttgacgcatttattgggctatcaacgcagttggctcaagccggatattcgcgccggcctttccgtcgccgccgtcgccttgccggtggccatcgcctatgccgagctggccggggtcagcccggtggtggggctctattcctgtattttgccgatggtggcctatgcgctgttcggctcgtcgcgccagctgatcgtcgggcccgacgccgccacctgtgcggtgatcgccgcggtggtgacgccgctggcggcgggtaatatggagcgccattggcaactgaccatcatgatgaccgccatgatgggcggctggtgcctgctggccagccggttcaagctgggggcgctggcggatctgctgtcgcggccgatcctcagcgggttgctgaacggggtggcgatcaccattatggtcgatcagatcggcaaggtgttggggttcacggtgcgcccggcgcagctgatcgagcgcatctacgcgctgcccggtaacctgctgcacagcgactggctgacgatggcggtgtcgttgttgacgctggtgacgctgctcggatttaaaaaatggcggcctaactggccggcgccgctgtttgccatcgtgctggcggcgttcgtcacttgggccggcggcctgcagcagcatggcgtggtgacggtgggcggtttcagcggcgtgttgccgatcgtccagtggccggacttccagcccggcttgctgcgcgacatggtgatcccggcgcttaacctggcggtggtgagttttgtcagcatgatgctcaccgcccgcagctttgccgccaaaaacggttatgaggtgaacgccgacgccgagtttcgcgcgctggggctggtgaatatcgtctctgcgctgtcgcaaggtttcgccatcagcggcgcagactcgcgcaccgcggtgaatgacgccaacggcggcaagagccagctggtgtcgatcatcgccgccgcggtcatcgccttcgtcttgctgttcctgatggcgccgctgcagtttattccggtggcgggattgggcgtggtgctgatgtatgcggcctggtcgctgctggacatccgtggcatctggatcttgcgccgccgcaacgcgcaggcgttccgcctggcgctgtttacctttctcagcgtgctgctggtaggggtgatcagcggcatcgggctggcggtgttactggggctgatgcagtttctgcgcactgtcttccggccgacggaacagctgctgggcgtcaacgacgaaggcatgatccattccatgggcaacaacaatggggtgaaggcggtgcccggcgtcatgatgtatcgtttcaattcgccgctgacctatttcaacgtggcgtacttcaaacgccgtattctcaatttggtcgacggcacgccgttccagccgcgttgggtggtggtggacgcggtggccagttttacccatgccgatatcagcgtgctggcggccatcgacgaactgaaacgcgatctgttacagcgtaacgttaggctggtgctggcggggcgtcgcaccgaactgacgcgttggttccgcatcaaccgcttagggcgcgacaaagagctgattttggtgccggatctgtatctggcgctgaagctgattcagagtaaggagcaggcggaagccgccgtgatggggtaa

SEQ ID NO: 423712 - DNA, 753 bp, Serratia marcescens
atgtctatcacggccaacgctttgtaccgtgacagttttaactttttacgtaaccaactggccagcatcctgatgctggctttgttgacggcgtttatctccgtgctgctgaatcaggccttcagccccgatgccgaacagttggcgacgctcgctgccaccaccagcgatttcgcttcgtctaccggtatgggcattcaggaagtgatccagcagatgacgccggaacagcagatggtgttgctgaaagtgtcggcggccgccaccttctccgcgctggtcggcaacgtgctgctggtcggcgggatgttgacgctgattcgtctggtgtcgcaagggcaacgcaccagcgccctgcgcgcgctcggcgcctcggcgcccgacttgccgcgcctgctgctgctgctgtttatctgcaccctgctgatccagcttggcctgacgctgtttgtggtgccgggcgtgctgatggcgatcgccttcgcactggcgccggtgatcgcctcggtcgacaagaaaggcgtgttcgcttcgctcaagctgagcagcaaactggccttcgccaatgcgcgcgtgatcgtgccggcgatgatgctgtggctggcggccaaactgctggtgctgtttttggtgagccatctgtcggtgctgacgccgaacgtcgccagcgtggtgttgaccgcgttgagcaacctggtgtctgccctgctgctgatctacctgttccgcctgtatatgctgctgcgcggctaa

SEQ ID NO: 423713 - DNA, 441 bp, Serratia marcescens
atgagcgaaatccttaatccctgtgtcagctgcggcgcatgctgcggttattttcgagtgtcattctattgggccgaagccgaagacggcggcggcacagtccctctttccctgacggagcctttgaccccgttcctgcgctgcatgcaggggaccaacagcaagtccccccgctgcaacgcgctggacggcgagatcggcaaagccgtgtcctgctcgatctacctcaatcggcccagcccgtgcagagagttcgatcagtccggtgaaaacggcctgcgcaacgaagcctgcgatcgcgcccgggaacgttacggcctgccgcccttgccggtgcccctgccgctgtcgctgcctgagacgacgatcgttgaagaaataggcgtagtgcaattcgcggggtgccacagcggcgtggaacagggtacaatcacccactga

SEQ ID NO: 423714 - DNA, 633 bp, Serratia marcescens
atgaaaaagacaactctgatggtattggcgacgatgatggcgcctatgttggcaagtgcgcatcaggccggtgatttcctgttccgcgcgggcaccgcgacggtgcgtccaaatgcgggttcggacaacgtgctggggttgggttcgctggatgcgaaaaacaacacccagctcggtctgaccttcggttatatggtgacggacaacatcggcgttgagttgttggccgcaacgccattccgccacaaggtgacgctgggcggcaccgatctggcgaccgttcaccagttgccgcctacgctgatggcgcaatactacttcggcgataagcaggacaaactgcgtccttacctgggcgtcggcgttaactacaccactttcttcgatgagaagttcaacgactacggcaaaagcgccgggttgagcaatctcgatctgaaagattcctggggtgtggcggcgcaggccggcctggattacaacctggatgagcactggatgctgaacatgtcggtgtggtggatgaatatcgaaaccaaaactcgcttcaacgatgcgaatggcgggcaccacagcttcgatacgcgtttggatccgtgggtgttcatgttcggggcggggtaccgcttctga

SEQ ID NO: 423715 - DNA, 315 bp, Serratia marcescens
atgaagctttttaaaaccctttcggccttgtgcatggcagccgttgtggcggtcgcggtgagcgcttgcgcgccgacggcaaaatctgagggaacgggtggttatattgatgacacggtgatcaccaccaaagtgaaatcggcactgctggcggataaaaacatcaagtcacgcgaaatcagcgtggaaacctttaagggacgcgtgcagctgagcggcttcgtgacgtccagcgatgacgccaaccgtgcggtgcaggtcacacgcggcgtggccggcgtgaaatcggttgaaaacgtaatgcagattaaataa

SEQ ID NO: 423716 - DNA, 807 bp, Serratia marcescens
atggaacgttatcagcaactgttcacgcgtctggaaagcagcaaggaaagcgccttcgtcccgttcgtgacgctgggcgatcctaatccggcgctgtcgctgcagattatcgacaccctaatcgaagccggcgcggacgcgctggagctgggcatccccttctcagatccgctggcggatggccccaccatccagagcgcgacgctgcgcgccttcgccgccggcgtcacgcctacccagtgcttcgagatgctggcggccatccgccagaagcacccgaccattcccatcggcctgctgatgtacgccaacctggtgttccataaaggcatcgatgcgttttaccaacgctgcgccgaagtgggcgtggactcggtactggtcgccgacgtgccgtttgaagagtctgcgccgttccgcgccgccgccgcgcgccacggcatcgcgccgatcttcatctgcccgccgaacgccgatgacgatctgctgcgggaaatcgcgtcgcacggccgcggctacacctatctgctgtcgcgtgccggcgtcaccggtaccgaaagccgggcgcagctgccgttgcatcacctggtgaacaagctgcgcgagtaccacgccgcgccgccgctgcaaggcttcggcatctccgaacccgagcaggtgaaggccgcgctgcaggccggggccgccggcgcgatctccggctcggcaatcgtcaaaatcatcgaacagcaccatgccaacccggcggagatgctgaccaagctggcggccttcgtcagcaatatgaagcgcgccacccgggcgtga

SEQ ID NO: 423717 - DNA, 1191 bp, Serratia marcescens
atgacgctgcttaacccctacttcggcgaatttggtggccaatacgtgccgcaaattctgatgccggctctgaaacaactggaagaagcctttgtcagcgcccagcgcgatccggcattccaggcggaatttatcgatctgctgaagaactacgcgggccgcccgacggcgctgacgctgtgtaaaaacctcaccgccggcagcaacaccaagctgtacctgaagcgtgaagacctgctgcacggcggcgcgcacaagaccaaccaggtgctgggccaggcgttgctggccaagcgcatgggcaaaaccgagatcatcgcggaaaccggcgccggccaacacggcgtcgcttcggcgttggcctgcgcgctgctcggcctgaaatgccgcatctatatgggcgccaaagacgtcgagcgccagtcgcctaacgtgttccgcatgcggctgatgggcgcggaagtgatcccggtgcacagcggctccgccaccctaaaagacgcctgcaacgaagcgctgcgcgactggtccggcagctatgaaaccgcgcactatatgctcggcaccgccgccggtccgcatccgtaccctaccatcgtgcgtgaattccagcgcatgatcggcgaagaaaccaaagcgcaggtgctggagcgcgaaggccgcctgccggatgcggtcatcgcctgcgtcggcggcggctccaacgccatcggcatgttcgccgattttatcgatgacgccgacgttgggctgatcggcgtggaacctgccggcctgggcatcgaaaccggccagcacggcgcgccgctgaagcacggccacgtcggcatctacttcggcatgaaggcgccgatgatgcagaccgccgaaggccagattgaagaatcctattcaatttccgccgggctggacttcccgtccgtcgggccgcagcacgcctacctgaacagcaccggccgcgccgaatacgtgtcgatcaccgacgacgaagcgctggaagcgttcaaggcgctgtcgcgccatgaaggcatcatcccggcgctggaatcctcgcacgccctggcgcacgcgctgaaaatgatccgtgaaacgccgcagaaagagcagatcctggtggtcaacctgtccggccgcggcgacaaagacatatttaccgttcacgacattttgaaagcacggggagaaatctga

SEQ ID NO: 423718 - DNA, 1362 bp, Serratia marcescens
atgcaggaaaccgtgctacacaagattgtccgcgacaaagcgcaatggatcgcggcgcgacaacagcaacagcccctggccggctttcagaacgacatcgtaccgagcgaacgcagcttctatcacgcgctgcagggcacccggacggctttcattctcgaatgcaagaaggcctcgccttccaaggggctgattcgcgagaactttgatccggtagagatcgccacggtgtataaagatttcgcctcggcgatctcggtgctgaccgacgagaaatacttccagggcagcttcgatttcctgccgctggtcagtaaaaccgtcagccaaccggtgttgtgcaaagactttatcatcgatccgtatcagatttacctggcgcgctactatcaggccgacgccatcctgctgatgctgtcggtgttgaccgacgagcagtaccgccagctggcggcggtggcccacagcctgaacatgggcgtgctgaccgaagtgatcagtgaagaagagctgcagcgcgcgatcgcgctggaagcgcgcgtggtcggcatcaacaaccgcgatctgcgcgatctgagcatcgatctgaaccgcacccgtcagctggcgccgcgcgtgccgcacggcgtgacggtgatcagcgaatcgggcatcaacaactacgggcagatccgcgagctgagccattacgccaacggcttcctgatcggcagcgcgctgatgtcggaacccgatctgcgcgccgccgtgcgccgcgtgatcctgggcgacaacaaagtgtgcggcctgacccgtccgcaggacgccgccgccgcctatcaggccggcgccatctacggcgggctgattttcgtcggccgctcgccgcgctatgtggacatcacccgcgctcgcgaagtgatctccggcgcgccgctgaagtacgtcggcgtgttctgcgacgcccaggtcgataccgtggcgttgaccgttgagcgcctcggtctgcacgcggtgcaattgcacggcgcagaagaccaggcctatatcaacgccctgcgcgcccgcttgccggccgattgccgcatctggaaagcgctgagcgtgaaagatcgggtgccggcgcgcgatctgcagcatgtcgatcgctatctgctcgacaacggcgccggcggcaccggccaacgcttcgactggtcggtgttgcaaggcgaagatctgactaacgtgatgctggcgggcggcctgcgcgccgacaactgcgtcgaggcggccaagctcggctgcgccgggctggatttcaactccggcgtggaaagcgaaccgggcatcaaagatcccgcgcgcctggcctcggtcttccagaccctgcgcgcctactga

SEQ ID NO: 423719 - DNA, 999 bp, Serratia marcescens
atgcaacctattcttgagaaactgtaccgcgccgagtcgatgagccagcaggaaagccaacagctgttcagcgccatcgtgcgcggcgaattggagccgagccaactggcggcggcgttgatcagcatgaaagtccgcggcgagcgcccggaagagatcgccggcgccgccaaagcgctgctggacgacgctcagccgttcccgcgccctgactacccgttcgccgatatcgtcggcaccggcggcgacggcaccaacagcatcaatatttccaccgccagcgccttcgtcgcggcggcgtgcggcgcaaagatcgccaaacacggcaaccgcagcgtctccagccgctccggctcttcggatctgctggcggcgttcggcatccgcctggatctgccggcggaagaagcgcgcaaggcgctggacgatctcggcgtgtgtttcctgttcgcgccgcagtaccacaccggttttcgtcacgccatgccggtacgccagcagctgaaaacccgcacgctgttcaacgtgctgggtccgctgatcaaccctgcgcgtccgccgctggcgctgatcggcgtttacagcccggaactggtgctgccgatcgccgaaaccctgcgcgtgctgggctatcagcgtgcggcggtggtgcacggcggcggcatggacgaggtggcgatccacgccccgacgcacgtggcggaattgaacaacggcgaaatcagcagctaccagctcacgccgcagtccttcggattggaaacctatccgctggaagccttgctgggcggcacgccggaagaaaaccgtgacattttggcgcggctgttacaaggtaaaggcgagccggcgcacgccgcggcggtcgcggccaacgtcgcgttgcttctgaagttattcggacatgaagacctgcgccaaaatgcgcggcaggcactggatatgatcaacagcgggcaggcctatgagcgtgtcatcgcactggcggcaagaggataa

SEQ ID NO: 423720 - DNA, 582 bp, Serratia marcescens
atggccgatattctgctgctcgacaacgtcgattcctttacctacaacctggtcgatcagctgcgcgccagcggccaccaggtggtgatttaccgtaaccagatcgccgccgaggtgatcatcgaacgcctggagcacatgacccagccggtgctgatgctgtcgcccggccccggcaccccgtccgaagcgggctgcatgccggaactgctgcagcgcctgcgcggccggctgccgatcatcggcatctgcctcggccaccaggcgatcgtcgaagcctacggcggccaggtcggccaggcgggcgagatcctgcacggcaaggcctcggcgatcgttcacgatggcgaaggcatgttcgccggcatggccaacccgctgccggtagcgcgctaccactcgctggtcggcagcaatatcccggccgatctcaccgtcaacgcccggttcggcgagatggtgatggcggtgcgcgacgatcatcgccgcgtgtgcggcttccagttccacccggaatcgattctgaccacccacggcgcgcgcctgcttgagcagaccctggcctgggcgctggcgaagtaa

SEQ ID NO: 423721 - DNA, 1563 bp, Serratia marcescens
atgatgaacaccaaaccacaactgacattgctgaaggcgcaagccagctaccggggcgaccccaccaccattttccaccagctgtgcggtgcccgtccggccaccctgctgctggaatcggcggaaatcaacagcaaacagaatctgcagagcctgctggtgatcgacagcgcgctgcgcattaccgcactgggccacaccgtcagcgtgcaggcgctgagcgccaacggcgcggcgctgctgccgctgctggacgaagcgctgccgcccgaggtgcgcaatcaggcgcgccccaacggccgcgagctgaccttcccggcgatcgacgcggtgcaggacgaagacgcccgcctgcgttcactgtcggtgttcgacgcgctgcgcacgctgctgaccctggtggactccccggcggacgagcgcgaagccgtgatgctgggcggcctgttcgcctacgatttggtcgccggtttcgaagacctgccggcgctgcgccaggatcagcgctgcccggacttctgcttctatctggcggaaaccctgctggtgctggatcaccaacgcggtacggcccgtctgcaggccagcgtcttcagtgagcaggcgagtgaagcgcagcgtttgcagcaacgcctggaacagctgcaggccgaattgcaacaaaccccgcagccgatcccgcaccaaacgctggagaacatgcagctgagctgtaaccagagcgacgaagagtacggcgcagtggtcagcgggctgcaggaagcgatccgccagggcgaaattttccaggtggtgccgtcgcgccgcttctccctgccgtgcccggcgccgctggcggcctaccagaccttgaaagacaacaaccccagcccgtacatgttcttcatgcaggatgatgacttcaccctgttcggcgcttcgccggagagcgcgctgaaatacgacgcgagcaatcggcaaatcgaaatctacccgatcgccggcacccgcccgcgcggccggagtaaggacggttcgctggatctggatctcgacagccgcatcgagctggaaatgcgcaccgaccacaaagagctggccgagcacctgatgctggtcgatctggcgcgcaacgatctggcgcgcatctgccaggccggcagccgctacgtcgccgacctgaccaaggtggaccgctattcgttcgtcatgcacctggtttcccgggtggtgggcaccctgcgcgccgatctcgacgtgctgcacgcctaccaggcctgcatgaacatgggcaccctgagcggcgcgccgaaggtgcgggcaatgcagctgatcgccgcctccgaaggcacgcgccgcggcagctacggcggcgcggtaggctacttcaccgccaccggcgatctggatacctgcatcgtcattcgttccgcctacgttgaagacggcatcgccaccgtgcaggccggcgccggcgtggtgctggattccgtcccgcaggcggaagccgacgagacccgcaacaaagcccgtgccgtgctgcgtgccatcgccactgcgcaccatgccaaggaggtgttctga

SEQ ID NO: 423722 - DNA, 882 bp, Serratia marcescens
ttgacagacagtaaccccccatccaccgcctttactctgtacgacctccacagccacacaaccgcctccgatggctacctgacgccgacgcagctggtgcagcgggcggtcgagatgcgcgtgggcgtgctggcgatcaccgatcacgacaccaccgcaggcctggccgaggccgccgccgccattgcggagcaggcgttaccactgcggctggtcaacggggtggaaatctcgacgctgtgggaaaatcatgagatccatatcgttggattgggcatggacgtcgcgcacccggcgctggtggcgctgttggcggaacaaaccgaacggcgcaatcggcgtgcgcaggagatcggcgtgcgtctgggtaaggcgcgcattcccgacgcctatgccggcgcccagcggctggcgggcgacggcgcggtgacccgcggccatttcgcccgttatctggtggagattggcgtggcggacaacatggcgcaggtgttcaagaaatacctggccaagggcaaaaccggctacgtgccgccgcagtggtgtacaatagaacaagccattgatgcgattcatcaatcgggcggccaggcggtgatggcgcatcccggccgttacgatctgaccgcgaagtggttgaaacgtttgctggcgcatttcgccgaacacggcggcgacgccatggaagtggcgcagtgtcagcaggcgccgcatgagcgctcgcaattggcgaaatacgcccaggactaccgcctgttggcctcgcaaggctctgattttcatcagccttgttcgtggatcgaactgggccgcaaactgtggctgccgggcggcgtcgagccggtgtggcgcgattggccgcagcctggcgaggcggtctga

SEQ ID NO: 423723 - DNA, 621 bp, Serratia marcescens
atgagtcagcttttttatattcacccggacaacccgcagccgcgtttgattaaccaggcggtcgaggtgttgcgcaagggcggggtgatcgtttatcccaccgattccggctatgcgctgggttgcatgctggaagagaaggcggcgatggagcgcatttgccgcatccgccagttggacggcaaccacaactttaccctgatgtgccgcgatttgtccgagttgtcgacctatgcgcacgtcgataatacggcgtttcgcctgatcaaaaacaatacgccgggtaactacaccttcattctgaaagcgaccaaggaagtgccgcgccgcctgatgaatgaaaagcgtaaaaccatcggcctgcgcgtgccgtcgaacccgatcgcgctggcgctgctggaggcgctgaacgaaccgatgatgtccaccaccctgatgctgccgggcaatgattttgccgaatcggatccggaagagatcagcgatcacctgggcaaggtggtcgatctggtgatccacggcggtttcctcggtcaacagccgactacggttatcgatctgaccgaatcctcgccggaagtggtgcgtgaaggggcgggcgacgcggcgcctttccgctga

SEQ ID NO: 423724 - DNA, 360 bp, Serratia marcescens
atgattaaacgggtttcttttttagcggccttattattttcctcgatggcaaatgcgggtttttattcgggcagttccttgctggcggaatccggcggttacgtaaaaaataaaaacggtgaggccaccgtggccgaagcgcttaacggtggcatgtttatgggatacgtcgccggcgtattcgatacttattcgatgcagggcaaccgcaatatttgcccggaagccgggatgagcatcggcacggccgccgatgcggtgatgcgctatttgaacgagcatcccgagcagttgcattactctgcgccttcggtgatcatgctggcgttaagcgccgcctatccctgcgtgcgccattaa

SEQ ID NO: 423725 - DNA, 798 bp, Serratia marcescens
atgaccacatttcacagcgccaacatcgctctcgattatcaggatatcggctcagggccgctcacgctggtgctgctgcccggctggtgcgagccgaaaaccgtgttcgatcccttcatcgccctggcggcagaacgttatcgggtgatcagcatcgactggcgcggccacggcctgtcgtcaaaaacggcggagatgtcgctcgcggcggacgatttgctggaagatgtgcgtcagctactgacggcgctgcgtttggacaacgtggtgactctgtcggtggcgcacgccagctggctggcggtggcgttggccgaagcgttgccgcagcgggtgcggggcatggtgtttctcgattggatcatgacgcagccggaaccggcgttctttacggcggtgagccgcatgcagcagccgcagcagtggctggcggcgcgcgacgccttgttcgccttctggcagggcggcatccgccacgaacgggtcaaacgccatctggaggtcgagatggcacaagaagattaccggctctggcgtgctgccggcgtggccatcgaacaggcctaccggcaattcggctcgccgctgcaacgtctggcgggaatgagcgcgccgccgccgtgccgccacatctactcgctggatcgccgcgacgactatctgcggcgccagcaggcatttgccgccgagcagccgtttttctccgtggtgcgtttgggggaggctcgcactcacctcggcattctggaacggcccgacgcggtgctgtgggcggtggaggattttttggcgccgtaa

SEQ ID NO: 423726 - DNA, 906 bp, Serratia marcescens
atgagcgaaaagttacagaaagttttagcgcgcgccgggcatggctcgcgtcgtgaaatcgaaaccatgattgaagccgggcgcgtcagcgtcgacggcaaggtcgccaagctgggcgatcgcgttgaagtgacgccggcgatgaaaattcgcctggacggtcatgtcctgtcgatcaaagagtctgaagacgtggtctgccgggtgctggcctactacaaaccggaaggcgagctgtgtacccgcagcgatcctgaaggccgcccgacggtgttcgatcgtctgcctaagctgcgcggttcgcgctgggtggcggtagggcgcttggacgtcaacacctccggtctgctgctgttcaccaccgatggcgaactggccaaccgtctgatgcacccgagccgtgaagtggagcgcgagtacgcggtacgcgtgttcggccaggtcgacgatgcgaaagtgaagcagctgagcaagggcgtgcagctggaggacggcccggccgccttccgcaccatcagcttccagggcggtgaaggcctcaaccagtggtacaatgtgaccctgaccgaaggccgcaaccgtgaagtgcgtcgcctgtgggaagcggtgggcgtgcaggtgagccgcctgatccgcgtgcgctatggcgacatcgatctgccgaaaggcctgccgcgcggcggctgggccgagctggatctgccggcgatcaactacctgcgcgagctggtggaattgaagccggaaacggtcagcaagatgccggtggagcgtgagcgccgccgcgtgaaggccaaccagatccgccgcgcggtcaagcgccattcgcaggtggccggcagcggccgccgcagtgcgccaggcagcaagccgggtaaaccgggcaagccgagcaaacgcggctaa

SEQ ID NO: 423727 - DNA, 591 bp, Serratia marcescens
atggcggaagatcgtcatcaacagcgccagcagcgcctgaaagaacaggtcgatgcgcgtatcgccgcggcgcaggacacgcgcggcctgctgctggtgtttaccggcaacggcaagggtaagaccaccgccgccttcggcaccgtcacccgggcggtcggccacggcatgcgcgccggggtgatccagttcatcaagggcgaatggcccaatggcgaaaagaatctgctgcagcaacacggcgttgaatttcaggtgatggccaccggcttcacctgggagacgcagaacaaagccggcgataccgccgcctgccaggcggtgtggcaacacggcaaacgcatgctggccgacagcagcctggatctggtgctgctggacgaagtgacctacatgctgacctacggctatctggaactggaagagctgaaggccgcgttgctggagcgccctgcgcaccaaacggtgatcctgaccgggcgcggttgccatcgcgatctgctggaactggcggatacggtcacggagatgcggccggtgaagcacgcgtttgatgcgggcgtgaaggcgcaacaggggatcgattggtaa

SEQ ID NO: 423728 - DNA, 762 bp, Serratia marcescens
gtgcattaccaacccaaacaagatctgctcgaacaacgtatcattctggtcaccggcgccggcgacggcatcggccgcgaagcggcgctgacctacgcgcgcttcggtgcccggctggtgctgctggggcgcaccgagagcaagctgctggcggtacaacaagagatcgcggcccagggcggcgccccggcgttggtggtgacgctggacttgctgcacgccacgccggagcaatgccggcagatagccgacgatctggcgcgccagatcccccgccttgacggcgtgctgcacaacgccggcctgctcggcgacatcgcgccgatggccgacctgtcgatgaccatgtggcaagaggtgatgcaggttaacgtcaacgccacctttatgctgactcaggcgctgctgccgctgctgctgaaatcccacgccggttcgctggtgttcaccagttccagcgtcgggcgcaccggccgcgcagactggggcgcctatgcggtgtcgaagttcgccaccgagggcatgatgcaggtgttggccgacgagtataaaaaccgcaatctgcgggtgaactgcatcaatccgggcggcacccgcaccaaaatgcgcgcatctgccttcccacacgaagacaagaacaagctgaaaaccccggccgatatcatgccgctgtatctgtatctgatgggcgaagacagccgccgcaaaaccggcatgagcttcgacgcccagccgaaccgtaaacccggcgcggccgaataa

SEQ ID NO: 423729 - DNA, 1047 bp, Serratia marcescens
gtggagtttatatctgtttatggcctgtttctggccaaggttgccacggtggtgctcgccatcgccgcgttggccatcctggctgtcagtttggggcaacgcaagagccgccagaaaggggagctgcagctgaccgatctcggtgaacagtatcgcgagatgcagcgtgacatgcgcctggcgcgcatggatgccgccgagcaaaaggtttggctgaaacagttcaagaaacagaccaaggccgacgataagctgaaaaagcagcgcgccaagtccggcgcggtcgaggtggccaagccgtgcctgtatgtgctggatttcaagggcagcatggacgcgcacgaggtgacctcgctgcgcgaagagatctcggcggtgttggcggtggcgtcggcgcaggatgaagtcctgctgcggctggaaagtcctggcggagtggtgcacggctacggcctggcggcctcgcagctggagcgcctgcgtaaaggcggcattcgcctgacggtggcggtggataaagtggcggccagcggcggctacatgatggcctgcgtcgcggatcgcatcgtggcggcgccgttcgccatcatcggctcgatcggcgtggtggcgcagatcccgaacttccaccgcctgctgaagaagaacgacatcgacgtggagctgcacaccgccgggcagttcaaacgcacgctgacgctgttcggtgaaaacaccgagcaggggcgcgagaagttccgcgaagatctgaacgaaacccacgagctgttcaaacgcttcgtgcatgagcagcgcccgtcgctcgacatcgacagcgtcgccaccggtgagcactggttcggttcacaggcgaaagagaagggcctgattgacgctatcggcaccagcgatgacttgctgatcgccgagctggataaccacgaagtgatcgccgtgcgctattcgcgccgcaaacgcctgatggatcgctttaccggcagcgcggcggaaagcgtcgatcgcttgctgttgcgctggtggcagcgtggggaaaagccgctgctgtaa

SEQ ID NO: 423730 - DNA, 252 bp, Serratia marcescens
atgcgcacaaatactgcccctatcggccgcgaggccctgctggcggaagcaaataacatcatccgccaacacgaagattatctgcacggcatgatcgccaccgacgttgaacaaaaaaacggcgttttagttttccgcggcgaatactttttggatgccgacggattgcccaccgccaaaaccaccgcggtatttaatatgtttaaacatttggcccatctgctttcggaaaaataccacctggtcgattga

SEQ ID NO: 423731 - DNA, 2598 bp, Serratia marcescens
atgggtaaagctctcgtaatagttgagtccccggcaaaagccaaaactattaataaatatttaggaagtgactacgtggtgaagtccagcgtcggtcatatccgtgatttgccgaccagtggctcagccagcaaaaagagcgctgactcaaccgaagacaaagccaagaaaaaagttaaaaaagatgagaaggcggcgctggtaaatcgcatgggcgtcgacccttatcacggctggaaagcgcattatgaaatcctgccgggtaaagaaaaagtggtcgccgagttaaaatcgctggcggaaaacgccgaccacatttatctcgcaaccgaccttgaccgcgaaggggaagccatcgcttggcacctgcgggaagtgatcggtggggatgacaaacgctttagccgcgtggtgtttaacgaaatcaccaaaaacgcgatccagcaggcgttcaaacagccgggcgagctgaacattgaccgcgtcaacgcgcagcaggcgcgccggttcatggaccgcgtggtgggctatatggtctcgccgctgctgtggaagaaaatcgcccgcggcctgtccgccggccgcgtgcagtcggtggcggtgcgcctggtggttgagcgcgagcgcgacatcaaggccttcgtgccggaagagtactgggagctgcatgccgatctgctggcgaagggtgaaaccgcgctgcagatggaagtgacccacgcgcacgacaagccgttcaaaccggtcaaccgcgagcagactcacgccgcggtcaagctgttggaaaaagcccgctacacggtgctggatcgcgaagacaaaccgaccagcagcaaaccgggcgcgcctttcattacctccacgctgcaacaggccgccagtacccgcctgagcttcggcgtgaaaaaaaccatgatgatggcgcaacggctgtatgaagccggccacatcacctatatgcgtaccgattccaccaacctgagccaggatgcgctcaacatggtgcgtggctacatcggcgataacttcggcgacaaatacctgccgaaggcgccgaatcagtacagcagcaaagagaattcgcaggaagcgcacgaagcgatccgtccttcggacgtgaacgtgctcgccgagcagttgaaggacatggaagcggacgcgcagaagctgtatcagctgatctggcgccagttcgtcgcttgccaaatgacgccagcgcaatacgattccaccacactgacggtgaaagccggcgattatcagctgcgcgccaagggccgtacgctgcgctttgatggctggaccaaggtcatgccggcgctgcgcaagggcgatgaagatcgcaccctgccatacgtcgaaatcggcagcgaactggatctgcagaaactgatcccaagccagcacttcaccaagccgccggcgcgctacagcgaagcctcgctggtgaaagagctggaaaaacgcggcatcggccgcccgtccacctacgcctccatcatttcgaccattcaggatcgcggttatgtgcgggtggaaagccgccgcttttatgccgagaaaatgggcgagatcgtcaccgatcgcctggaagaaaacttccgcgagctgatgaactatgacttcaccgcgcgcatggaagatggcctcgatgaggtcgccaacaaccaggccgagtggaaagcggtgctggacgagttcttcgtcgacttcagcgaacagctggaaacggcggagaaggatccggaagaaggcggcatgcggcctaaccagatggtgatgaccagcatcgactgcccgacctgcggccgcaagatgggcatccgtactgccagcaccggcgtgttcctcggctgttccggctacgcgctgccgccgaaggagcgctgcaaaaccaccatcaacctggtgccggaagcggaagtgctcaacatcctcgaaggcgacgaggcggaaaccaacgcgctgcgcgcccgccgccgctgcaaaaaatgcggtacggcgatggacagctatctgatcgacaaccagcgcaagctgcacgtctgcggtaacaacccggcgtgcgacggttacgagatcgaagagggcgaattccgtctgaaaggctacgacggcccggtggtggagtgcgacaagtgcggctcggaaatgcacctgaaaatggggcgtttcggcaagtacatgggctgcaccaacgagaactgcaaaaacacccgcaagatcctgcgtaacggcgacgtcgcgccgccgaaggaagatccggtgccgttgccggagctgccgtgcgagaagtccgacgcctatttcgtgctgcgtgacggcgctgccggtgtattcctggcggccaacaccttccctaaatcgcgcgagacccgcgcgccgctggtggaagagctggctcgcttcaaggatcgcctgccggagaagctgcgctatctggccgatgcgccggtggcggacgccgaaggcaataaaacgctggtgcgtttcagtcgcaaaaccaaacagcagtacgtctcttctgaaaaagacggcaaggcgaccggttggtccgcgttctacgtggacggcaagtgggtcgaaggcaagaagtaa

SEQ ID NO: 423732 - DNA, 975 bp, Serratia marcescens
atgaaattgcagcagcttcgttacattgtggaagtggttaaccacaacctgaatgtctcctcgacggcagaagggctctatacctcgcaacccggcatcagtaagcaggtgcgcatgctcgaagatgagctgggcatccagattttcgcccgcagcggcaaacacttgacccaggtcaccccggctggccaggaaatcattcgcatcgcgcgtgaagtgctgtccaaggtggatgccatcaaagccgttgccggtgaacacacctacccggacaaaggctcgctgtacgtcgccaccacgcatacccaggctcgctacgccttgcccaacgtcatcaagggctttatcgagcgttacccgcgcgtctcgctgcacatgcaccagggctcgccgacgcagatcgccgaagcggtctccaaaggcaccgccgatttcgccatcgctaccgaagcgctgcacctgtacgacgatctcatcatgctgccgtgctaccactggaaccgcgcggtggtggtgaagcccgatcatcctttggcgggcaaaagcagcatcagcattgaagagctggcggcttacccgatcgtcacttacaccttcggctttaccgggcgttcggagctggataccgctttcaaccgcgccggcctgacgccgcgcatcgtctttaccgccaccgacgccgacgtgatcaaaacctatgtgcgtctgggattgggggtgggggtgatcgccagcatggcggtggatccggtgcaggatccggatctggtgacggtggatgcaagcgatatcttcacctacagcaccactaaaatcggcttccgccgcagcaccttcctgcgcagctacatgtacgacttcattcagcgcttcgcgccgcacctgacgcgtgacgtggtcgacagcgcggtggcgctgcgctccaacgaagagatcgaggcgatgttcaaggacatcaagctgccgattaagtaa

SEQ ID NO: 423733 - DNA, 2673 bp, Serratia marcescens
atgtcgtccgatcttcgtgaaacaagtatggataagctggttgcgctgaatagcgaatattactattacagtctgccgctggcggcgaagcagctgggtgatatcgaccggttgccgaaatcaatgaaagtgctgttggagaacctgctgcgccatgtggatggcgataccgtgcaggttgacgacctcaaggccatcgtcgcctggctgcaaaccggccatgccgaccgtgagatagcctaccgcccggcgcgcgtgctgatgcaggattttaccggcgttccggcggtggtggatctggccgcgatgcgcgaagcggtgcggcggttggggggcaacgtcgatcaggtgaacccgctgtcgccggtggatctggtgattgaccactcggtcaccgtcgatgaatttggcgatgacaacgcctttgaagacaacgtgcgtatcgaaatgcagcgcaaccacgagcgctacaccttcctgcgctgggggcagaaagccttcaaccgcttccgcgtggtgccgccgggcaccggcatctgtcaccaggtcaacctcgaatacctcggccaaacggtctggcacagcgacgaaagcggccgccgcgtggcttatcccgatacgctggtgggcaccgactcccacaccaccatgatcaacggcctcggcatcctcggctggggcgtcggcggcatcgaagcggaagcggctatgctgggccagccggtgtcgatgttgatccccgacgtggtcggcttcaagctgaccggcaagctccgcgagggcattaccgccaccgacctggtgctgaccgtcacccaaatgctgcgcaagcacggcgttgtcggcaagttcgtcgagttttacggcgatggcctggccgatctgccgctggcggaccgggcaactatcgccaacatgtcgccggaatttggcgccacctgcggcttcttcccggtagatgacgttacgctcggctatatgaagctcagcggccgcagcgcagaacaaatcgcgctggtggaagcttacgccaaggcgcagggcatgtggcgcaaccccggtgatgaaccggtcttcaccagctcgctggcgctggacatgtcgacggtggaagccagcctcgccgggccgaaacgcccgcaggatcgcgttgcgctgccaaatgtgccgcaggcgttcaaggccgccaccgagctggatatcggcggtcaaaaggccaaagccgacagcaaaacctttacgctggacgggcaacagcacgaactgcgcgacggcgcggtggtgatcgcggcgatcacctcctgcaccaacacctccaacccgagcgtgatgatggcggccggcctgctggcgaaaaatgccgtcaagaaagggctgcgcagcaagccctgggtaaaaacctcgctggcgccgggatccaaagtggtgaccgactacttcgacagcgccaaacttaccgcctatctggaagagctggggtttaatctggtgggctatggctgtaccacctgcatcggtaactccggcccgctgccggatccgatcgagcaggcgatcaaagagggcgatctgaccgtgggcgcggtgctgtcgggcaaccgcaacttcgaagggcgcatccacccgctggtgaaaaccaactggctggcctcgccgccgctggtggtggcttatgcgctggcgggcagcatgaagattgacctgactaaagagccgctgggcgagggcaacgacggtcaaccggtctatttgaaggacatctggccgagcagccaggacatcgctcaggcggtggaagaagtgcgcaccgagatgttccacaaggaatatggcgaagtgttcgacggcgacgctaactggcaggcgatccaggtgaccggctcggcgacctatcagtggcaggaggattctacctatattcgtcatccgccgttcttcagcaccatgaaagtgacgccggatccggtgcaggacatcaaagacgcgcgcattctggcgattctggccgactcggtgaccaccgaccacatctcgccggcgggcaacatcaagcgcgacagcccggcggggcgttacctgagcgagcacggcgtggcgccgcaggatttcaactcttacggctcgcgccgcggcaaccacgaagtgatgatgcgcggcaccttcgccaatatccgcattcgcaacgaaatggtgccgggcgtggaagggggctatacccgccatatcccgtcgcagcagcagctgtctatctacgacgccgccatgcagtatcagcaggaaaaggtgccgctggcggtgatcgccggtaaagagtacggctctggctccagccgcgactgggcggcgaaggggccgcgcctgctgggcgtgcgggtggtgatcgccgaatccttcgagcgcattcaccgctccaacctgatcggcatggggattttgccgctggagttcccgcaaggggtgacgcgcaaaaccctggggctgaccggggatgagcagatcagcgtcggcggcctgcagcagctgcagccgggccagacggtgccggtgcacatcacctatgccgacgggcgcaaggaagtgatcgacacccgttgccgcatcgataccggcaatgagctgacctattacgaaaacgacggcatcctgcattatgtgatcaggaaaatgctgtaa

SEQ ID NO: 423734 - DNA, 594 bp, Serratia marcescens
atgcagcttaaacgggtggcagaggctaaactgccgacaccttggggcgatttcctgatggtaggattcgaagaactggcgaccgggcatgaccatctggcgctggtattcggtgatatttccggcgaagcgccggtgctcgcgcgcgtgcattccgaatgtcttaccggcgatgccctgttcagcctgcgctgcgactgcggttttcagctggaagccgcgctggagcaaatcgccgaagaaggccgcggcattctgctttatcatcgccaggagggccgcaatatcggcctgttgaacaagatccgcgcctatgccctgcaggataagggcgcagacaccgtggaagccaaccaccagctcggcttcgccgccgacgagcgcgacttcaccctgtgcgccgacatgttcaaactgctgggcgtcgacgcggtgcgcttgctgaccaacaacccgaaaaaggtcgagatcctgaccgaagccggcatcaacatcagcgagcgcgtgccgctgatcgtcggccgcaacccgaagaacgaacactatctggcgaccaaggccgccaaaatgggccatttgctcgaccagaagtga

SEQ ID NO: 423735 - DNA, 762 bp, Serratia marcescens
atgtatgagatagcaaaacgcacggcgggcggcgcgctgctgctgctgttgatgccgctggcggtctgggtatccggctggcactggcagcccggcggcaatgatcggctgctgaaagcgctgtactgggtgaccgaaaccgtgacctcgccgtggggcattttgaccagcgctatcctttgcggttggtttttgtggtgtctgcgctttcggctcaaggcggccatcggtctggcgatcctgctttccgccgcgttggtgattgggcaggggatcaagtcgctgatcaaggatcgggtgcaagaaccgcggccgtttgtggtatggctggagcaaaaccacggcgtggacggcaaatacttctattcgctgcatcgcaaagagcgcagcgcgctggtgcgcgagcaattgcaggatcagaccctggtgccgaactggctgcgcaagcactggcagtttgaaacaggcttcgctttcccgtcggggcatacgatgttcgccgccacctgggcgctgttgggcgtagggctgctgtggccgcgccgccattataaaaccgtcgcgctgctgatggtgtgggcaacgggggtgatgggcagccgtttgctgctgggcatgcactggccacgcgatctggcgatggccacgctgatcagttggctgttggtggtggtcacctgctggctggcgcagcgctggttcggcccgctgacgccgccgccgcaagagcagcaggaaatcgcggcgcgcaagccggaataa

SEQ ID NO: 423736 - DNA, 795 bp, Serratia marcescens
ttgaaaagcaaaagcgaacagctggcggaaatgcagcaacggcgcgaaaagatcctcgatatgatccgcgaagacggctcggcgacggtcaaaatgctgaccgataccttcaagctgaccgaagcgaccattcgcaccgacctgcgggtcctgcagcaacaaggttatgtgcagcgtttccacggcggcgcaaccctggtcgatggcaagcaaaacacccatgccatgctgttggaacgccaggtcaacctgaccgccaaggatcgcatcggcaagctcgccgccggttttatcgaaccgggcgacaccatcattcttgattcgggcaccaccaccacggctatcgccaatcacctgagccacatcaagaaactgtccgttatcaccaccggcgtcaatatcgcgctgcagctgggcggcgaaccaggcgtgaacattttgctgaccggcggctcgttcaaatttccgacgctttccacttcgggggacaaagccgccggcttcttcgagaacgttctggcccagaaactgttcctcgcaacggcctgcatctcaccccgccacggcctcagtttcccaagcgagaccgacatcaaactgaaaacggcgatgatcaacgcagccaacacggtgtatgtggttgccgactccagcaaaatcgataaggtgtcgatgttcgcattgccctgtgactggcagcatatcgactatttgatcaccgacgacggtatcagcaataccgccatacaggcctttgagaaggtgggagtaaaggtgttggtggcaggcgcctga

SEQ ID NO: 423737 - DNA, 804 bp, Serratia marcescens
atggacttccaggcgattaaaaacacggcgcgccaggcgcgccgatatgtggtgaccatgaaccataaggcaggcaagggccataccggcgccgatctgtcggaaatcgacatcatctgcaccttgtatatggcggtgatggatcgcggcaatgcccggcccgatcaggatcggttcattttgtctaaagggcacggcgccggcggtttttactgcagctgcgctgcgatgggcctgctcgatccggcggtgctcgatcagttcatgggcgacgacaccttactggccgggcatccggtgcggcagaagctgccggagctggtggagatcaactccggcggtttggggcatggcctgccgatcgccgtggggctggcgctgggcaacaaactggccgggcgcgcacatcgccgcgcgttcgtgctgctgggcgacggcgagctggcggagggatccaactgggaggcggcgatggcggccagcaaattcaagctggataacctgattgccatcgtcgatcgcaaccggctgcagctggcgggcaagacagaggccatcatgccgctagagccgctggcggaaaaatggcgcgctttcggtttcgaaaccctggaatgcgacgggcacgatccggcggcgctggtggcggcgatccaacgcccgagccaagacaagccgcgggtgattttggccaataccgaaaaggggcacggcgtgtcgtttatggctaacgttgccgcctggcatcacgcggtaccggacgaacaacagctggcgcaggcgctggcggaactggaggggtga

SEQ ID NO: 423738 - DNA, 906 bp, Serratia marcescens
atgcaggacttacgcgatgccgtggtgacggcgttgatcgaagagcagctggcgggggcagatctgagcgtgatggtggcggactccacgtccacgtcgaaaatcgcgccctttgagcaggcttatccggagcgtgtggtgaacgtcggcatcgccgaacaaaatatggtgggcatggccgccggcatggcgctcagcggccgcacggtctttaccgctaacgccgcgcctttcctgttcgcccgttctaacgagcagatgaaaaacgatgtttgctacacggaaaccaacgtgaaaatgctcggcctgaatgccggattcggctatgggccgctgggggcgacgcaccattgcatgaacgatatcgccatcgcccgcacgctgggcaatctcagcgtctatgcgccggcggatgcgcgacaagcggcagagattgtccgttatgtcatcgcgcaacccggcccggcctatatccgtatggacagcgacaagctgccggtgctgaacgcgagctatcacttccgccccggagagccggaggtgctgcatcaaggatctgacagcctggtgttttgcctggggacggtggcgcacgagtcgatgaaggtgctggaattgggcgataacccgaccatcgtctcgctgccttcgctctggccactcaatgaggcggcggtagtggcgttgatgcgttcgcaccgccgggtgctgaccatggaggagcacgccctcagcggtggcttgggcaccatcatcggtgagctgttgctgcggcatcagctgccgcggccgtttaccgcgctgggcgtgccggcttatgaatttacccacagcagcagccgggcggcgctgcggcggcaatacgccatcgacgccgcagggttgcatgctcagttaacgccatag

SEQ ID NO: 423739 - DNA, 801 bp, Serratia marcescens
atggagcggaacgaatacgacgttaatttacgctacggtgtcgatagccagatgtcgctggcagggaaagtggcggtgatcaccggcggtctgggcggcatcgcgatggccgccaatcgcctgctgctggaaaagggcgcgcgcctggtattgatgtatccggcctttgaacaggacaaagccgcggcggcgctgcgggagttgggggaagaacaggtgttctgccaggtgtgcgacgtgaccgattccgactcggtggctgccgccttcaatgcggctcagcggcgctttggcccgctcgatatcctggtcaactgcgccggctacgtcaatctgcaaccggcgacggaagtgacgctcgaggagtggcagcgccacttggcggtcaacctcaccggtccttttttgtgctcgcaggaactggcgcgccgtgcgatagccgccggccacggcgggaaaatcatcaacatcgcgtcgcaggcggcctccatcgccattgacgatcactgcgcgtacacctccgccaaggcggggctgctgggcatgaccaaggtgatggccaaagagtgggcgccgcacggcatcaccgtcaacacgttatcgcccaccgtagtgctgacgcctatgggagagaaggcctggcgcggcgagaagggcgaggcgatgaaaaagctgatcccgctggggcggtttgcctataccgatgaaatcgcggcggcgatcctgttttttgccagcaacggcagcgacatgattaccggcgcggacctgatgatcgacggcggttttaccatttggtaa

SEQ ID NO: 423740 - DNA, 933 bp, Serratia marcescens
atgagaaaaatagccacttaccttaccctgctcaccggttttgcctgcacctctgccatggcggcggaaaagggcacgatcgccattctcgtcaattcgctggataacccttattactccgcagaggccaagggggccgagagcaaggccaagtcgctcggttaccagacgctggtgttgtcgcacggcgaagacgttaagcgccagggggagctgatcagcctggttatcggccgcaaagtacagggcatcattttggataacgccgattcccaggccagcgtcgccgccgtgcagcaggcgaaaaacgccggtattccggtggtactgatcaaccgcgagatcccggtcgatggcgtagcgttggcgcagatcacccataacaacttccaggccggctcggacgtcgccaaccagtttgtagaaaaaatgggagaaaccggcaaatacgccgagctgacctgcaacctggcggacaataactgcgtcacgcgctcgcagtcgttccacaacgtgatcgaccaatatcctgagatggtcagcgtggcgcgtcaggatgccaagggcaatctgctggaagggaaacgcatcatggacagcattctgcaggcgcatccggacatcaaaggcgtgatctgcggcaacggcccggtggcgctgggcgcagtggcggcgctgaaggccgccggccggcaggatgtcaccgtggtgggcatcgacggcagcaacgatgaacgcgacgccattctcaacggtagcctctatgccagcgtgatgttgcaggcgcaggcgatcgccgcgcagggcgttgaaatcctcgacggctatttccaatccggcagctataccggcaaggagcgcgtgatgttccgcggcatcctgatcggcaaagacaatgcgcaacgggtcagtgacttcaacttcaaaccgtaa

SEQ ID NO: 423741 - DNA, 627 bp, Serratia marcescens
atgtcgatgcgcattgcgctggccgttaccgtcgtcctggcgttgagcggttgccgtatcgtttcggagaaaaagctggcggagcttcgctccccggtgaatccgcatgtggcacaggcggcggaaatttaccgcagccaaatcgctccgcaagcggtcaaaacggcgcagccgctgggcgagctgctcgcccggatcgcccaggccaaggattttgacagcgcctgcggtctgctggggtaccgcgctcaaccggagttcccttgttatttcaacgttaaggtcagcggtgaagtcgcggcggtcaacacccgttcgcgcagcggaaaattaacgctcaagctgaccgatgcaccgctcagcagcgtggaggtgcagatcgggccggtttatcgcggtacggcgttgcgcgacagctatcgcgggctgagctacggcgatttcaatgaccaagcgctgttcggcgattttgccagggcgattaatcaggcttcgatcgacgaactggccggatccccgcccaaggtgggtgaccacattaccgtgtacggcgtattcagcagctggcaggcgcctgccgagccgctgttgatcacgccggtacgcattcaatctaagggggcgtga

SEQ ID NO: 423742 - DNA, 1500 bp, Serratia marcescens
atgagcgatccggtcattattcaaacgcgcaacgtttcgcgtctctatcctggcgtcaccgcgttggatagcgtgagttatcaagtgtttcgcaatcaggtcaacgtgctgatcggcgaaaacggcgccggcaagtcgaccatgatgaagctgctggcgggggtggacaccccgacctccggtaccatcgagctggagggtaaagcggtgacgctaacttccacgcagcaggcggagcggctcgggatcagcattattttccaggagctgaacctgttccccaacctgtcggtgatggacaacatttttatggccaacgagttcttccagcgtggccgcatcaatgtggactatcaatatcagctggccaaatccttgctgcagcggctggagttggacatcgatccgcatacgccgttgggcagtctcggcatcggacatcagcagctggtggaaattgctcgcgccttggcgaaggacacccgggtgctgatcatggatgagccgacgtcggcgctgagccaggctgaagtgcgcacgctgtttcgggtgatcgccgatctgaaaaaacgcggcgtcaccatcatctacatttctcaccgtctggaagagctgatggagattggcgatcgcatcacggtgtttcgcgatgggcgttttgttgccgccgagccggtctgcaacgtcagcatcccgtggatcatcgaaaagatggtcggggaaaagagcaagcactttgattattgcgcggcagagcaaggggatgaagtgctgaaggttgagcagttgacgctgccgcgtgaaaacggcggctattgccttaacgacgtcagtttttcactgcgtaaaggggaagtgatcggcatttatggcctgttgggcgccggccgcaccgaactgttcaaggtggtcaacggcgtgatgcgccagacggcaggccgcattctgctcaacggcaaaagcgtggagcggttggggtttcgtcagcgcatggcgttgggcatggcgctggtgccggaagacaggcaggcggagggcttggtgcagatgatgtcgatcaaggccaacatgaccctggccagcctggggcgcaacgcgctgcggccgttggcgtcggccggggagtgcgcgctggtcgacggcatgatcgaaaaactggcgatcaaggtgagtgaccgggagctgccaatcaccagcctgagcggcggcaatcagcagaaagtggtgttgggcaaggcgctgctgaccgggccgcaggtagtgtttctcgatgagccgacgcgcggaatcgacgtcggcgccaaaacggacgtttatcacctgattggcgcaatggcacgccaggggttggcggtgatgttctcttcgtcggagctggatgaggtggtctcactggccgaccgggtgatggtgatggcggacgggaaactgacggccgatctgccgcgcgaacgggccgatcgcgaaacgctgatccgcgcctcaaccccacacgcataa

SEQ ID NO: 423743 - DNA, 1065 bp, Serratia marcescens
atgcaaaccaagtatcggttgtatatgtatttgctgcaggcgcgcaccttcatcgccctgttgctggtggtgctgttcttcagcggcatggtgccgaattttctgaccgtctccaatctgctgatcatgacgcagcacgtggcgattaccgggttgctggcggttggcatgacgctggtgatcctcaccggcggcatcgacttgtcggtcggcgcggtggcgggcctgtgcgggatgatcgccggtgcgctgttgaccgtcggcatcccgctgtgggatggcaaccggctgtttctcaacgtctttgaagtgatcggcgcggtggcgctgttgggcgtgttgttggggttggtcaacggcacgctgatcacgcggctcggcgttgcgccgttcatctgcaccctgggcgcaatgtacgtggcgcgcggagcggcgttgttgacggcggacggcaaaacctatcccaatctggtgggcatggaagcgctgggcaacaccggtttcgcggccctgggatccggcacctttctcgggatttacaacccgatttggctgatgttggccatcgtgttgttggggatctatctcaccaagaaaacgccgctgggccgttatatctatgcgattggcggcaatgagccggcggcgcggctgtcgggggtgccgatcgtcaaagtgaaaatgttcgtctatgccttctccgggctgtgtgcggcgctggtggggctggtcatcgcttctcagttgcaaaccgcgcacccgatgaccggcaatatgttcgagatggacgccatcggcgcgacggtgctgggcggtacggcgctcagcggtggccgcggcagggtattaggttcgatcatcggcgcctttgtgatcgtttttctggcggacggtctggtgatgatgggcgtcagcgagttctggcaaatggtgattaaagggctggtgatcgttaccgccgtggtgattgaccagttccagcagcgtttgcagagcaaggtcattttgatgcagcggcaggataaaaaagcggtgcagccgctggctgaggtgagccatggctaa

SEQ ID NO: 423744 - DNA, 1524 bp, Serratia marcescens
atggctaaagcggattgcattgtcgcgttggacgaaggcaccagcaacgccaaggccgtggtggtggatgcgcagggggcgatcgtcgccagagccagcaggccgttgacgctgcagacgccgcagcccggttgggtggaacagcggggcgaggccttactggcagcctctctggcggtgctgcgggaagcgattgcgttggccggcgcatcccgtattgccggtatcgccatcagcaaccagcgtgaaaccgccatcggttggcggcgttccgacggccagccgatcgggccggccctaacctggcaatgcgcgcgcgccgccgatttctgtgaacggctgcggcacgatcggcaggccgaagtggtgcgtcgcgccaccggcctgccgctttcaccgctgttctcggcggcgaaaatgcgctggttgctcgatcgctgcgaaggggggcaacggatggcggagaacggagaaatctgccttggcaccatcgatgcctggctgctgtggcagttgagcggaggacaggcattcggctgcgatacctccaatgccgctcgcacccagctgttgaaccttgcctccggcgattgggacgagcggatgctggcgctgttcaacattccccgccaggcgctgccgacgatctccccctccagccatgtgttcggcgcgacgttgggattggaaggcattgccgacggcattccgattggcgcgatggtcggtgattcgcatgcggcgctgtacggccatgcgctcggccaggcggggcaggttaaggccacctatggcaccggttcatcggtgatggcgccgatcgccgaagcgcaatgcgacacgagcgctctggcaacgaccgtcgcctggcacgatggcgagcgtatgcagtatgcgctggagggcaatattccccacaccggcgacgccattgcctggatgctggatatcaccgccatgccggcggggggcgagacgccgttaagtgaactgcctgtttgcgtggccgacagcggtggcgtctattttgtgccggcactgaccggggtcggcgcaccctggtgggatgagcaggcgcgcggcgtgatctgcggcctcagccgcggcacgcggcgggaacatttggtgcgggccgcatttgagtcggtggcttatcaaatcgccgatgtgatcggcgtattgcggcaacagccgggttttgcattgcaggggttaatggccgatggcggccccagccgcaatgactggctgatgcagtttcaggccgatctgctgggttgcccggtgtggcgcagcaacacggcggaactctcggcgctgggggcggcgctgatggcgatgcgcagcctgtgggggactaccgatcggcaactggcggcattgttgccccaacatgatgaatttaaacccgatatgcagcgccaccggcagctgcaggaaaactacagcgcctggcggcaggcggtgcaacgcaccctgtggcggccgcaggcgagctcattgatgacaggagaacaaccatga

SEQ ID NO: 423745 - DNA, 798 bp, Serratia marcescens
atgaatcgtgatttcacggggaaaaccgtggtgattaccggcgcatgccgcggcattggggccggcatcgctgagcgcttcgcccgtttgggcgccaatctggtgattgcatcgaatgcggaacgcattctgaccacggcggaaacgctgcgccagcgttatggtgtggagattctgccggtgatcctcgacgtcaccgatgaggcgcaggtggttgatttttatcgtcaggcttgggagcgattcggcgcgatcgacgtttccattcaaaacgccggggtgatcactatcgatcgttttgaccagatgcccaaaagcgattttgagaaagtgttggcggtaaataccactgcagtgtggctctgctgccgggaagcggctaaatatatggtcggccagcgccaggggcggctgatcaacacctcttccggtcaggggcgtaacggattcatttacacaccgcattacgccgccagcaaaatgggcgtgatcggcattacgcaaagtttagcgctcgagctggcaccgcatggcattaccgtcaatgcattctgccccggcatcattgaaagcgagatgtgggaatataacgaccgcgtttggggcgaaattctcagtgggccggaaaaaacctacggcaaaggggagttaatggccgagtgggtggcgggcattccgctcaggcgcgccggtcagcccgaggacgtggcgggtctcgtggcctttcttgcctcggacgatgccgactacatcaccggccaaaccatcaatgtggacggcgggttaatcatgtcatga

SEQ ID NO: 423746 - DNA, 303 bp, Serratia marcescens
gtgaaatatttgctgatttttttgttggttctggtgatcttcgtgatttccgtcaccttgggtgcgcataacgatcaggtggtcaatttcaactatctggttgcgcagggggactatcgcgtatcgaccctgttggccacgctgtttggtgccggttttgttctcggctggatcatttgcggcctgttctacctgcgcacgcgcattgcgctgggccgcgccgagcgcaagatcaaaaggctggagctgcagcttgagcagcccgctgaaccggcggctcagcccgttgtcagcaaggaataa

SEQ ID NO: 423747 - DNA, 1173 bp, Serratia marcescens
atgttagaactgctgtttctgttgctgcccgtggctgccgcgtacggttggtacatggggcgcagaagcgctcagcaggataaacagcaagaagccaaccgcctgtcgcgtgaatacgtggcaggggtgaactttctgctttccaaccagcaggacaaggcggtcgatctgttcctcgacatgttgaaagaggacagcaacaccgttgaagcccacctgacgctgggtaacctgttccgttcgcgcggcgaagtcgaccgcgccatccgcatccaccaggccttgatggaaagtgcctccctgacctttgaacagcgcctgctggcggtacagcagctgggccgcgactatatggcggccgggctgtacgatcgcgcggaagacatgttcagccagttgactgacgaagcggattttcgcgtatcggcgctgcagcaactgctggtgatccatcaggccaccagcgattggcaaaaagcgatcgacgtggcggaaaagctggtcaagctgggtaaagagaaacagcgcgtcgagatcgcgcacttctattgcgaactggcgctgcaggcgatgggcagcgacgatctcgatcgggcgatgagcctgctcaaacgtgcggacgcagccgataaacagtgtgcgcgcgtatccatcatgttcgggcgcatctatatggcgcaaaacgactacgccaaagcggcagagtcgctgcaacgcgtgctgagccaggataaagagttggtcagcgaaacgctgccgatgctgcaggaatgctacacgcatctgccggaacaacagcacagctgggttgaattcctgaaacgctgcgtggaagagaacaccggcgccaccgccgatctgatgctggccgagatcatcgaacagcatgaagggcgcgacgtggtgcaggtctatatcaaccgccagctgcagcgccatccgaccatgcgcgtgttttaccggctgatggattatcacctggcggacgccgaagacggccgggcgaaagagagcctgctgctgttgcgcgatatggtcggcgagcaaattcgtaccaagccgcgttaccgctgccacaaatgtggcttcactgcgcactcgctctattggcattgcccgtcgtgccgagcctggtcatcggtcaaaccgatccgcggcctggacgggcaataa

SEQ ID NO: 423748 - DNA, 300 bp, Serratia marcescens
atgagcgagatatcgacacttaccatcaaaattcctctggaactgaaggaaaaaatccgcgccgccgccgctgaaaacgaattttcgttgagcgtggaagtatgccagcgcctggaaagcagcttcaacgcccccgccgccaaggcagaaaaaccggccaaaaaggcggatgagctgcaccacggcgagatcgacaatcaaagcaccgaagaagaggttgaacagccgctgagccagaaagaactgaagaaactgcgccagctgttgaaaaccggcgccaaaggcggcaagaaaaagtaa

SEQ ID NO: 423749 - DNA, 261 bp, Serratia marcescens
atgaaaaccatcaaatattttgcagccgctaccgctatcgcactgacctctttcgctaccttcgccgctgagccggtcaacagccaacaggctgacagcctgaccgccaccggcatcgtttccgcgggccatgcgaccaccctcagcagcctggagaaaaaactggccgctaaagccgatgcccaaggcgccggcagctaccgcatcatctccgccggtggtaacaacatgctgagcggcaccgcgatcatctataaataa

SEQ ID NO: 423750 - DNA, 729 bp, Serratia marcescens
atgaagtctgaaaataacgctaataacaatgacttaaaatcatctccaatcgttgtggcgttagattacgccgataagaacgctgcgctggcgttcgccgaccgtatcgatccgcaagactgccggctgaaagtgggtaaagaaatgttcacgctgtttgggccgcagctggtgcgcgatctgcacgggcgcggtttcgacgtgtttctcgacctgaaattccacgatattcccaataccaccgcgcatgcggttgcggcggcggccgagctgggcgtttggatggtcaacgtccacgccagcggcggcgcgcgcatgatgaccgccgctaaagaagcgctggcgtcattcggggcggatgcgccgctgctgatcgccgtgacggtgctcaccagcatggaagcggaagacctgcgcggcatcggcattgaggccagcccggcggaacacgccgagcgcctggcgcgtctgactcgcgactgtgggctggacggcgtggtgtgttcggcacacgaagcgcagcgcctgaaagcggcctgcgggcaggctttcctgctggttacgccggggatccgccctgaaggcagcgcggcgggcgatcagcgccgtatcatgacccctgttcaggcccaggccgccggcgtggactacatggtgattgggcgtccgatcacccaatctgcggatccggccgcgacgctgcgcgcgatccgcgcctctttggcctga

SEQ ID NO: 423751 - DNA, 327 bp, Serratia marcescens
atgaatgacgataacagccggctggtgtattccacggacaccggccgcatcaagcaggaagacgttaagccgcaacgcgccaagggcgacggcatcgtgcgcatccagcgtcagaccagcggccgcaaggggaagggggtatgcctgatcgccggcgtcgatctggatgatgccgcgctcgacaaactggcggccgagctgaaaaagaaatgcggttgcggcggttcggtgaaagacgggattatcgagatccagggcgataaacgcgatctgctcaaacagctgctggaagccaaaggcatgaaggtcaaactggcgggcggttga

SEQ ID NO: 423752 - DNA, 219 bp, Serratia marcescens
atgatgattatcaataaacgtttcgccaccgccgcgctggcactgactctggcgttttcactcagcgcctgttccaacatgtccaaacgcgatcgcaacaccgctatcggcgccggcgccggtgcagtcggcggcgcagtgctgacagacggcagcgcgttgggcacgttgggtggggctgcggtagggggcatcatcggtcaccaggttggcaaataa

SEQ ID NO: 423753 - DNA, 747 bp, Serratia marcescens
atgaatttacgacaacagaccatattgcagttggttaacgatcgccggcggatcagcgtcaatgagctggcgcgcgcctcgggcgtctcggaagtcaccatccggcaggatctcaacctgctggaaaagcgcagttatctgaagcgggtacacggttccgccgtggcgctggagagcgacgacgtcgacgcccgcatgatgtccaatttcaccctcaaacaacggttggcgcaatatgccgccgcgcaggtcaacgacggcgagacgatcttcatcgagagcggcagcgccaatgccctgctggcgcgctacatcgccgagcgcaagcgcattacgctgatcaccgtcagccactacatcgccaacctgctgaaagaaaccgactgcgacgtgattgtgctgggcggcatgtaccagaagaaaagcgagaccgtggtcggcccgcttacgcggctgtgcattcagcaggtgcatttcaacaaggcgtttatcggcattgacggctttcaggccgaaaccggctttaccggccgcgacatgatgcgcgccgacgtggtcagcgcggtgctggccaagggcgtggagaatatcgtgctgacggactcgagcaagttcggccagatccagcccaacccgctggcgcagaccggccagatcagccgggtgatcaccgattcgcgcttggcgctggagtatcagcatcagctgaaacgccagggcgtacaggtggagctggtcaacgaataa

SEQ ID NO: 423754 - DNA, 2433 bp, Serratia marcescens
atgactacgttggatttgaccaccctcagcgcccgcatccaggcgcataagaacgcgctgattcacatcgtcaaaccgccggtgtgcaccgaacgcgctcagcactataccgaggcctatcaacagcatcaggatcggccgctgccggtgcgccgcgcgctggcgctggccaaccatctggcgaagcgcagcatctggatcgccaacgacgagctgatcgtcggcaaccaggccagcgagctgcgcgccgcgccgatcttccccgaatacaccgtcggctggatagaaaacgagatcgaccagttggccgaccggccgggcgccggcttctcggtaagcgaagagaacaaggcgattttgcaccgtctttgcccctggtggcgcggccaaacggtgcaggatcgctgctatggcatgtttaccgacgaacagaaggcgctgctggccaccggcatcatcaaagccgagggcaacatgacctccggcgacgcccacctggcggtcaacttcccgctgctgctggaactaggcctcgacggcctgcgtgaaaaggtgaacgcgcgccgcagccgcctgcgcctgaccgagtgggaagatctgcataaagcgcagtttctcaacgccatcgacatcgtgctggcggcgctgagcgaacacatcctgcgcttcgctcacctggcgcgcgatatggcgcagcgcgaaacccgcgactggcggcgcaccgagctgctggctatcgcagacaactgcgatctgatcgcccatcgcccgccgcacaccttctggcaggcgctgcagctgtgctatttcatccagctgacgttgcagatcgaatccaacggccattcggtttccttcggccgcctcgaccaatatctctatccctggtatcggcgcgacgtcgagctggagcagaacctggcgcgggaagacgccatcgagctgctgcacagttgctggctgaagctgctggaggtcaacaagatccgctccggctcgcactccaaggcctcagccggcagcccgctgtaccagaacgtcaccatcggcggccaaaaactgctcgacggccggccgtgcgacgcggtcaacccgctgtcctacgccattctcgaatcctgcggccgcctgcgctccacccaacccaacctcagcgtgcgttaccacgcaggaatgagcgccgatttcctcgacgcctgcgtgcaggtgatccgctgcggcttcggcatgccggcgttcaacaacgacgaaatcgtcattcccgagttcatcaagctgggggttgaaccgcaggacgcctacgactatgccgccatcggctgcatcgagaccgccgtcggcggcaaatggggctatcgctgcaccggcatgagcttcatcaactttgcccgcgtgctgctggcggcgctggaacagggccgcgacgccacctccgggcagattttcctgccgcaggaacaggcgctgtccaaaggaaacttcgccgatttcgagcaggtgatggccgcctgggaccgacaaatccgctactacacgcgcaagtcaatcgagatcgaatgcgtggtggacagcgtgctggaggagaacgcccacgatattctctgttccgcgctggtggatgactgcatcgaacgcggcaaaagcatcaagcaaggcggcgccaagtacgactgggtttccggcctgcaggtcggcatcgccaacctcggcaacagcctggcggcggtgcgcaaactggtgttcgagcaaggggcgatcggccagcagcggctggcggcggcgctggccgacgacttcgccgggctggatggcgaacagctgcgccagcggctgctcaacgccgcgcccaaatacggcaacgacgtggacgaggtcgatcggctgctggtgcgcgcctaccaaacctacatcgacgaactgaagcagtatcgcaacacccgcttcggccgcgggccgataggcggcggctactacgccggcacctcgtctatctcggccaacgtgcccttcggcgccgccaccctcgccaccccggatggacgcaaggcgcaccagccgctggcggaaggcgccagcccggcgtccggcaccgaccacctggggccgaccgcggtgttcaattcgctcgccaagttgcctaccgaggcaatcctaggcggcgtgctgctcaaccaaaagctgaacccggcgacgctggacaacccgcgcgatcgggaaaagctgatgctgatgttgcgcaccttcttcgagagcaatcgcggctggcatgtgcagtacaacatcgtgtcgcgcgaaacgctgctggcggcgaagcaacaccctgaccaatatcgtgatttagtggttcgcgtagctggctattccgccttctttaccgcattatcccctgaggcgcaggatgatattattgcgcgcacagaacatactctttaa

SEQ ID NO: 423755 - DNA, 900 bp, Serratia marcescens
atgttcttcaatctgcagcgctactcgacccatgacggccccggtatccgcagcgtggtctttttaaaagggtgcccgctgagctgccgctggtgccagaaccccgaaagccgctcgcgccacgcggatctgctgtttgacgaacgcctgtgcctgagcggctgtacgctgtgcgccgagcgctgcccgcaaggcctgcagcgtgacgagggcgcgctgacgctgcggcgcgaagccatcagcgcagacgactatgcgacgctggccgccgcctgcccgaccggcgcgctcagcctgtgcggcagcgcggtcaaccccgacgatatcatggccgaggtgatgcgggataagcctttctacctgcgcagcggcggtggtgtaacgctgtccggcggcgaaccctttatgcagccggaggtcgcggcagagctgctgcggcgcggccgcgaagccggcatccacaccgccgtcgaatcctgtctgcacgttccgtggcgttacatcgccccttcgttgccctggctggatctgctgttggccgatctcaaacacaccgatgaagcgcgtttcaaaacctggaccggcggctccgcccgtcgggtgatgaacaatttccgccggctggcggcgcacggcgtgccaatgaccgtacgcgtgccgctgatccccgatttcaatgccgatcgccactctgtccgcgcgattgtcgacttcgccgccgacgagatcggcgtatcggagatccattttctgccgtatcacacgctgggcatcaacaagtatcacctgctcggcgaaccttaccgcgccgcccgcacgccgctggacgcgcccgatctgctggccttcgccgaagcgtacgccggcgccaaaggcctgagcgccattttgcgaggataa

SEQ ID NO: 423756 - DNA, 666 bp, Serratia marcescens
atggagctttatctcgataccgccgatgtgacggcggtaaaacgcctggcgcgcattctgccgctgcacggcgtcaccaccaatccaagcatcgtggcgaaggaaggcaagccgatctgggaagtgctgcccgcgctgcgcgacgccctcggcggcaccggcaagctgttcgcgcaggtgatggcggccgatgcggagcgcatggtggcggaggcggcgctgctcagccagcgcgtaccggggctggtggtcaagatccccgcaaccgccgaggggctggcggcgatcaagaagcttaaaacgatgtccatcccaacgctgggcacggcggtatacggcgccgggcaggggctgctggcggccttggccggggcggaatacgtggcgccttacgtcaatcgggtggacgcgcagggcggcgacggcatcgaaatggtgcacgagctgcagcagctgctgagcctgcacgcgccgtcggcgcaggtgctggccgccagcttcaagacgccgcgccaggcgctggaatgcctgttggcgggctgccaggcgatcacgctgccggtggatgtggcggagcagttcctgagcgcgccggcggtgcaggccgcggtcgagaaattcgaacaggattggcagggggcgttcggcagcaatttgctgggctga

SEQ ID NO: 423757 - DNA, 1722 bp, Serratia marcescens
atgcgctcagattcagatactgctcgtgctttactttattctatccgctgcgggctgtcgggattattgatcggcgttgtacccctgttttccgcttcggcgtctaccagcgatggaatggcgtccattgatgcccgcgaacagcagcgccagcaggagcgcgaacgcgccctgcaacagcaaaatgccccacaggccgatgcgcgcctttcccgtcccgacgttgtgctgcccgattacccaaccgatgaacgcccttgcttcatcatcaatcggctaacgttggtcggcgagtctgccgatcgctttcaatgggcgttgaacgccgcggcggatgccaggggccgctgtctgggcagccagggcattgtgcttgccatcaacaaggtacaaaacgtcatactggccaagggctatgtcaccacacgcgtgatggcgcaggagcaggacttgaccacgggcgtgttggcgctgacgctgcagccggggcgtatcggtgagatccgctttgaggagccggtctcctggcgtgggcggctgtggaacgctattccggcctcacgcggcgatattctcagcctgcgcgatatcgaacaggggctggagaacttcaggcgggtgcccagcgccaatgccgatattaaaatcgtacccggcgccgaggacggaaccagtgacctgcaggtcaactggcacgaagggcgcccggtgcggctcagcctggggctggacgacagcggctccaaaagtaccgggcgttatctcggttcggccactttggctatcgatgcgccgtttgcacagaatgacctgttttacgccaacatcggcaaggatgtgtttcagcacgggccgttcggcaaccgttcacatacgctgaactactttttcccggtgggatattgggctttctcggccaattacaacgactacacctatcaccagaacatccccaacgccaatgaggtgctgcgctacagcggcaagagcgacaacattcagttgaccgtctcccggttgctgtaccgcgaccagtcgcacaagttaacgctcaacctgcgcggctaccgcaagcactcgactaacgccgtggacaacgttgatattgtgtcgcaaaaacgtcggaccgccggctgggagctggggctgaatcagcgcagctacttcggtaccactacgctggacgccaatatcaactggcgccgcggcaccggcgcattcaatgccctgcctgccccggaagagtcgcgtcatgaaggcagcgcacgtaccggcattttgctcggcgacctgggtatcaatcagccgttctcctggggcgatcagccctggcgggtgtataccagcgtaagggggcagtggagcccgaacgcgctgacgccgcaggagcggatggccattgccgggcgttacacggtgcgtggctttgatggcgaacagatgctgtccggcgaaaagggcctgctatggcgcaatgaaatcgcctggaacgtgttttctcgcgggcatgaattgtatctggccgccgactacggccgggtggacggcccaaacactcgccacttggttggccatcaattggcgggcagcgcgctcggcgtgcgcggcgcgctgtgggggcgattcagctatgacctgtttgccggcgttccgctctacaagcctgcggggttccatacctccggcgcgaccgcgggttttagcgtaaatctggaaatctga

SEQ ID NO: 423758 - DNA, 10878 bp, Serratia marcescens
atgaacaaacattgctatcgccttatcttcagccgcacccacggggagttgcgggtggtgtccgaactggcccgcagctgcagcagcgagccggggcagcgcatcggttcaggaataacgggtggaagtcgtctgtgggtcaccgtgcgtcggtcagtgtggctgcttgggctgttgatgttcgccggccccgtcatggcagacggcattgtcgcggacggcggtgccaatccttcccagcggccggaggtcatcactacccagaatggcttgccgcaggtcaacatcaccgcccccaaccaggctggggtttcacataatcagtatcagcagttcgacgtcgacgccaaaggcgccatcctcaacaactcggcggtgatgaccgcgacccagatggccgggatgatccagggtaaccctaatctcaatcccaattccgcgccggctcgcgtcatcctcaacgaagtcaacagcaacaatcccagccagctgcgcggttttatggaagtggccggcggcaaggcgcaggtgattgtggccaaccccgccggcattgtctgcaacggctgcggcaccatcaacgctgggcgcatgacgctgaccaccggcaaaccgcaactgaacgccgatggcagcgtggcgggctaccaggtcgagcgcggcgtggtgcgcatcgagggcggtgggctcaacggcgatacccgtcatgataccgagtacgtcgacattctggcgcgcgcggtggaggtcaacgccggcgtctgggctaaagaaggcgtgacgctggtggccggtcgtaaccgcgtgagcgcggacggcaaaaccgccgcgccgctttcggacgacggcagcgccaggcctgcgcttgccatcgacatggggcagatgggtggcatgtacagcggcagtatccgcatgatcggcaccgaagccggcgtcggcgtgcgtaaccagggcgggcaggtccgggcgggcaaaacgctcaccgtgagcagcgaaggcaagctcagttggcgctctgatgcgcccacgcaggccggcggcgatattcagctggcggcaaaaggcgacatcgagacgcacgggaaagtgtatagcggtggccaactggccgtgcagagtcgcgagggaatgttaacgcaatccggtacgttggcggcggccgggaatgtgcacctgaacgccgcgcgcggcatccaaagcagcggccacctgctggcgggcagtaatgccgaaagcacgctggtccatgatgccaatctgcagcttgatagccagggcgatatccgcgccagtggcagtctgctcggtaaaaagaacgtcaacgcgtccgggcgccgggtggatatcagcggcgcgcaggttgcggccggccgcaccgcgctggcggcccgcgagggcggcgtggccttgcgccagtccaccgtagacagcggtgagctggccgtgagcacgaagggaaatgtggatgcgcagcaggccaaggtcaaggccgggcgctgggcggtcgatgctgacaacctgttcaaccaacaggctacctggtctcagaccggtgacggtgagagccgtttcaccctggcaggcgcgctggataacagtgacggcaccatcgagacgcagagcctccggctttcggccggtcagttagtcaatcagcgcggtcgcctggtggcgttgggggaaacggcgcagcactggcgagtgggtggcctgctcgacaatggcggtggcacgatgggcagcaacgcagctcttcgcctcgacgccggccgcctcgataaccagcgcggcacgataaaaacccaggcggggctcacgctccatgttgatggcgcggtgaataatgccgggggcaatctgctggcggggaacggcctggcgcttgaggcaggtagcgctctgaataaccagtccggcaccctgagcggcgatgacgtgcgtctggcggtacaacggctggataacgcgcaggggcaggtcattggccagggaaatctcgaaatgacggccggccgcctggataaccaacgcggcctgatgggcgccggcaaggcgctgaatgtgcacgccggcgactgggataaccgtggcggcacggcgcaaggcgaaacggccgtgacggcaacggcgagcaatctcaacaacgacggcggtaagctgctttcaggtcatgcatcaaccctgcagacctcgggcaacgccaccaaccgcggcggcgaaatcagtgccacggtgctgacggtgcagtctgaccgtctcgacaacacgcagggcaaggtgattggccgacaacggcttaacctgcatgcccgtcaggggctggacaacacgcaggggctgctgggcgccgatgagatgctgacggtgagcagtgagggcgagctgagcaatcatcacggtagggtgcaggggaatgggcaaaccacggtgtcagcgcgagacatccacaacgaggtcggcaagctgctgggcgggcagagactctctctcactgcgtcgggcgtgcttggcaaccgcgagggggaaatcagcggcgagtcgctcacgctaacggcgcagcgcctcgataacgctcagggcaaggtggtcgccaggcaggatgcgaacctgacggcgaagcaagggttgagcaacgccgccggctggcttgaaggcggcagcgcactcgccgtcaacaccgatggcgattgggacaatcagggcggcaccgcacaaggtggccggcaggtcaccgccaacgcgcagtcgctcgacaataccggcgggcggctgcagtccggcggaggcctgacgctggatgctacaggcaatatcctcaatcgttccggcaaactgaccgcgcagcaggcccttgccgttaacggcggagcagccagcctgttcgataatgacggcggctccctgcagagcggcggcgatctgtctctgcagggaggccagttgaccaaccgcgccgcaggggtggtgctgggcggccaggcgctttctcttaatctggcggggggctgggataaccaaaacggcaccttgaccggcaatggccgcacgcaggtgcgcgccgccagtctgctcaatgctcagggcgccatcaacgcgctggatagcctggacatgcagttcaccggcaaactggataaccgccaggggcgagttttcagtcaatcgtctcaggtgttgcaggcacaggatatcgtcaacacgcagggctggatgggcagcctggggagctggcgggccatcagcggcggttttgacaatacgcagggcagcgtacagagccggcaggaaacacagcttacggctgactggttggataacgcccggggcgtgatgcaatcggcgcaaaacctggcgctgcgcatcaaacaggatatcgataaccacagcggtaaggtctcggcgcaggggcaactgaccgtacaaggggccgctgacggcgagcacgctggcaccatcaataacaccggcggcgaatggctggcgggccaggcgctgactatcgccgcccgcagccttgataacgtccaggcggggcaactctacagccagaagcagctgcggctcaatttgaacggcgggctcgacaaccgcggcgggaaaatacagagcggcgatgcgctggcgcttgatgcgcaggcgctgaataatgccggtgggacgatagacggccagcaacgcgtggcgctgcgcattcttggtttgctggaaaataccggcggtgcagtgcgcagcaatggcgggcaagaggtgtcggccgccggtatcaataatacacgcggcgtattcagcagccgcggcggcatcacggtggcatcaaagcaactggacaataccggtggtacgctcatcagtcagggggcgggcacctaccgactcgaccggcttaacaatcagcatggcaaggtgcacagcggcgacgcgctcacgcttgagggggcgcaggtcaacaaccggggtgggcaattggtgtcaacccacgggctggcgctcaaggccgggacgctcgataacagcggtcagggcacgctcagcagccaggcggaactggatgtgcaggccgagcgcctgaacaatcgcgatggcgggttgatactgggcaccacgcgcaccgatatcacctctcgtgatatcgacaataccgcaggccgcctgcagagtagcggccagatgaccctctcgggggtaacgcagctggacaaccgccaggggcggatcctggccaacggcaacctcaatatcaatactgaccggtcacggaccgactcgccgctggcgctgctcaaccagggcgggcgcgtggagagcgccgggcaacttaccttgcatgcgcgtaccttggataatcagaacggtaccctgctggggctgcaggcgctgacgctgtccgcgcagcaggactacacccatcaggccggcgaaacgatcagcagtaacggtacggtgacgttctccctgagcggcgcctttaccaacctggcggattggttgctgcccggcaagctggcgctcaatgcggccagcatcaccaatccggcggcgctggtgggcaaaacgctgcagctgacgaccggagccttgcaaaacaccgggcgccttgaggcagacagcatgacgctgaacgtcgataccctggacaacgccgcggcgctgatgggcgacgacatcaccgtgaacgggcgcattatcgacaaccacggtgcgcctgcggtgatggcggcgacccacagcctgacggtgcaggccggtgagcggctgaccaaccgggagggagcgctgatttacagcgccgaccgtctgcacctgcacagcgatgacctgattgaaaaccgggccagctttatcgaagcggacggtgacgccaccgtggaagcgcgtcgcctgaacaacctgcgcgaagggctggtgattgagcgtaacgccgagaagagcgactacaaatggcaccgctacaactactactggcgctcctacggttcaaaggtcaatcccgataaaagcaccctggcgccgaccacccagcagctgacctatcaggatgacgcggcggcgcaaaccaaccgctacggcacactgctggccattgatgtggcgggcaagcgcgcacaggtgcgggtcaaggacaataagggccaattgaccgacctgtgggtcaactacctggcgctcaagccgaatgccgatggcagctatgcgatgacgttctatgaaacgcgtgggggcaatcagctggcgactatcccgacgccttatcaaaacggcttccattgggagcacgactggacgcaggtgatgacctgggatcccgaaaagcatgtcgatatcgacagcgcgccgttcatcaccgattacaacaacttccgcgaacgtaccgagagtggcacggtgacgcgcgacaagctggtgagtgaggggatcggcgcgcgtattctggccggcggcaacatggtgctgcgcatcacgggagcgttgctcaatgacgccagcgtcattacggccaacggcaacctgaagcaggacggcggcggcagcgtggacaaccgcggttactcggttaacgagcggcgtcaggcagctatcgttgaccattatgacaaggacacgcatcactggtaccccacgttcaaccgggacgaaaccacgacgctggcgaccgttgacgggctgatcaccggcaatggcacggtcaccatcaacggagcccgcatcaccaacaccacggtcaatcaggcgcaaatcagtcaacttgatgcggcgttaaaggcggtagatgccgaacgcgccgagcttgagcgcaatccgctggccttcacggtagagggcgctgcccgacctgacggcgatacgacgctggcgccgggcgagcaaatgacaagaccgggcgccacgccgtcctcgccgctggggcgcccactgctgccgtctgagctggcgctgacgcagttacagcatctgggcaatgtggccaccgccatccccaataacggcttgtttagtcaacatacggcgatcggcagcccgttcctggtggtaaccgatgaacgctttacccgccgcgacaactttatcagcagcgactacatgctcgagcgcgtagggtatgaccccgcgcaggcccataagcgcctgggggacggcttttacgagcagcgtctggtgcgcgagcaggtgctggcgctgaccggcaaaccgtccgtcaagggctgggatgcgatggagcagtaccagcaactgatgaacaacggcagcaaagtcgcccaggacttccatctggtgccgggcgtggcgttgacgccggagcagattgcggcgctgcaacaggatatcgtctggctggtgagcgagacggtgcaaacggaaggcggcccgcaaacggtgtgggtgccgaaggtgtatctggcacagactacgctgcgcctgaccggcgatggcgcgctaattggcggcggtgacctgcaactctcggcaaacagcatcaccaatgccggcaacctgtttgccgaaaaagccctgacggttgacgccgggcagttcctgcatcagggcggcgacgtcagggcaggcagcattgacgtgcaggcagacagtctggccatgagcactaacctgcaggacgcgctgcgccaggcgaccatgagcgccggcgacattcgcctgcgcggcaccgatatcacgctcacgggggcgaaactggatgcgaccgatacgctcagcctgagcgcgcgtaacgatctgaccatcaccgccgcgaaaagcagccataccgccgatcttgaggttatctccggttcaatgggtaaccgcacccgcggcggcacggaagcggcaggctcccggatggcgcacgtcagcggcgaatggcagcaggctctggggagtgagcttaacgccggcggcaacctcacgctcaatgccgggcgagacgtcacgttcacgggcagccaggccagcgccgccggcagcacccgcgtgcaggccggcggcgatatcaacatccgggccgagacgaccaccaacaccacgcacctggacgccaacagccgtacttcatcagtcagcaacgaccgccaggaagaacgcctgacagtaagcgcactcggcggagaccagggcgtcaccctggtggcgggcaaccgcctgttggccgaaagcgcgcagattgacagtaaagaggggcgtattggcgtcagcgcgcgggacgtgagcattaaagacgcgcgtacccgcacgcaggaccaggacagcgaaaacaagcgcgaaggcaaaaccaagagcaatcgcgaagagcaaaccgagcgcgaaatcagcaccggcagcaccttcagcgggcgcgagggtgtgaccgtgatcgggcgtgaaggcgacgtcacggttaccggcagcgccctgcacagcgaccagggcgccatcgccctgcaggcgaaaaacgatgtgatccttaaccacaccaccgacagcgagcatcgcgtctccaacgaggaaagtcgcggccggaaaaccagaggtgagcgcgccgaagaagtcctgcgggaaaacgtggtgggcagcaccctcagcgggcagggcggcgtcacggtggtagcgcaggacggcagcatcatcgccacggcaagcgccctgcacagcgaacagggcgccatcgccctgcaggcgaagcaggatgtgaccctcaataccgccaccgaacgcgagtcggccctcagtgaagagcggtcacagaaaaaaggtttcctgaaaaaaagcagcagccacagcgtggcgcatgacgccaccacacgcgagaaaggcagcctgctcagcggcaacagtgtcagcgtcagcgccggcaacgatctgacggtcaccggctcggccattgccgcagaccaggacgtgaacctgcaggccggccgcaacgtcgacatcggcgcggccaccgagaccgacacgcattaccagctggaagagaagaaaaaaagcggcctgctgggcagcggcggcatcggcttcaccattggcaaacagtcgagcaaacacgaaatcgacgagaaaggccggacccaaagccaaagcgtcagcaccgtcggcagcagccagggcagcgtcaacgtcacggcgggcaaccaactgcacatcggcggcgccgatctggtggcggccaaggatctggctcttaccggcgacagcgtgactatcgatcccggcgttgatgcgcgcacgcgtaaagagacctacgagcagaagcagagcggcctaagcgtggcattgtcgggcaccgtgggcggcgcgctcaacaccgccgtcagctcggcgcagcaggcgcgaaaagaaggcgatgggcgcctgaacgcgctgcaaaacaccaaggcggcgctgtccggcgtgcaggctgcacaggcctgggagcgggataatgcgctgaccgcctcggcggaggcgaaaaacgccgctgccggcttgcagccgggagacgaaggtgcggcgcagggcgccaccaatacggtgggtatcagcgcctcctacggcagccaatcgtcgaagagcgaaacccgcaccgacagccgccagtcgcagggcagcacgctcaccgccgggcaaaacctgtcgataacggcgagcggcaagaaccacaacgcgcaaagtggcgatatcgtcgtcaccggcagccagctgaaagcgggcaaagatctgtcgctcgatgcggcgcgggacattaccctgcaatcggcgcagaaccgcgaaagcaccgtcggcaaaaacagcagcaaaggcggcaacgtcggtgtcggcatcggcgcaggttcgggcggatacggcatcagcgtctcggcaggcgtcaatgccggcaagggacatgagaacggcaacggcctgacgcatgccgaaaccaccctggatgccggcagtaatctcaaggtgaccagcgggcgcgacacccggcttaccggcgcgcaggccagcggagaaaaggtcaccgtcgacgtgggccgtaaccttcggcttgaaagcgaacaggacagcgaccgttatgatgccaggcagacccagatgagcggcgggatcagcgtgccgatcggcgccggcagcggctcggcgaattttagcgccagcaaggacaaactgcacagcaacttcgactcggtaaaagagcagaccgggctgtttgccggccaaggcgggtatgacgtcaaggtcaaagaacatacccagctcgacggcaccgttattgcaagccaagctgacaaggagaaaaaccgcctcgataccggcactttgggctggacggacatccacaaccaggcggacttcagcgcgacgcacagcggcgggtcattcagcaccggcgggccggtgggcaaggatctgctgaccaacatggccggcggcatgctgtcgggcgccaaccacagcgggcacgccgagggcacgacaaaggccggggttagcgaaggtacgctgatagttcgcgacaccggcaaacagcagcaggatgtggcgcagctgaaccgggataccgagcatgccaacgccggcagcatcagcccgatattcaacaaggagaaggagcaaaatcggctcaaacaggcgcagcttatcggcgagattggcggccaggcgatggacgtcatccgcacgcagggcgatatcgccgggctgaaggcgcagaaagacccggcggcgctggcgcaggccagggagcagcttgagaagagcggtaaaccgacgaccgatgcggcggtgatgcagcgggcatacgacaacgcaatgcggcaatatggcaccggcagcgacctgcagaaggcggcgcaggcggtgacgggggcgctgacggcgctggcaggcaataacctggcgggggcgctggcaagcggcgcctcgccgtacctggcgacggaaatcaagaagcgggtcggtgaagacaacatggccgccaatgcgatggcgcatgcagtgctgggcgcggtgaccgcgcagctgaataaccagtcagccgcagcaggggggctgggtgcgggcggcggtgaactggcggcgcgctacattgccggccagctgttcccgggcaaaacggcgcagcagctgagcgaaagcgagaaacagcagctgagcgcgctgagccaactggctgcggggcttgcaggcgggctggcgacgggggatactgcgggagcggtgaccggcgggcaggctgggaagaatgcggtggagaataacgcgctgagtgatcttgttgacgctgtatctcagggtaagacacctcagcaggtagccgaagaacgtgtcgacgcagagaacgaacgttataagcagcaaaactgtgccggaatgagcgcggaagcgtgctcggtgaagatgtatactgagcgccgggaagaactgaaagatatcctgtcgacaggtgcagattttgtgccggtggttggggatatcaagagctttgcggaagcgcagagtgcgctggattacttggtagcggcgatagggattataccgggtgcgggtgatgccgcgggcaaagcgatcaaggcggcagagacagcgctgaagaaaggggatgttgctgaagcgtccaggctgattaacaaggccagtgatgaagtatctgccactctcccaatgggaagtaagcgcaatccgatgaatcagccaagtaacccatcttatcaacctgtaaggaatcagccgggtacgatcagaaatcgagaatattcagggcacgccttagacagaatgcaggatcgaggaataacgccttctgttgttgagaataccattaaaaatggaaaatcgactcctagccgaggcggaacaacagtacactttgatcctgagagtaaagtatccgtagttacgaacgaatctggtagagtggtcacggttaaatatggcgataaatga

SEQ ID NO: 423759 - DNA, 1515 bp, Serratia marcescens
atgcggtggtgccgtgagcgtcaggcatcgacaaagggagctgccatttgttccgtcacgcgatggcgacgcagatactggagaacggacctgcactggcatgagaacggcaacggcctgacccataccgaaactaccctggataccggcagtaatctcaaggtgaccagcggccgcgacacccggctgaccggcgcgcaggccagcggagaaaaggttaccgtcgacgtgggccgtgacctgacgctgcaaagccaacaagacagcgaccgctatgacgccaaacagcaaaacgccagcgcgggcggcagcttcaccttcggctcgatgaccggctcagccaacgtaagcgccagcaaggacaagctgcacagcaacttcgactcggtgaaagagcagaccgggctgtttgccggcaagggcgggtatgacgtcaaggtcaaagaacacacccagctcgacggcgccgttattgcaagccaagcggacaaagagaagaaccgcttcgataccggcacgctgggctggaaggacattcacaaccaggcggactacagcgcgacgcacagcggcggcagcttcagcaccggcgggccggtgggcaaagacctgctgaccaacatggccggcggcatgctgtcgggcgccaaccacagcgggcacgccgagggcacgacaaaggccggggttagcgaaggtacgctgatagttcgcgacaccggcaaacagcagcaggatgtggcgcagctgaaccgggataccgagcatgccaacgccggcagcatcagcccgatattcaacaaggagaaggagcaaaatcggctcaaacaggcgcagcttatcggcgagattggcggccaggcgatggacgtcatccgcacgcagggcgatatcgccgggctgaaggcgcagaaagacccggcggcgctggcgcaggccagggagcagcttgagaagagcggtaaaccgacgaccgatgcggcggtgatgcagcgggcatacgacaacgcaatgcggcaatatggcaccggcagcgacctgcagaaggcggcgcaggcggtgacgggggcgctgacggcgctggcgggcaataacctggcgggggcgctggcaagcggcgcctcgccgtacctggcgacggaaatcaagaagcgggtcggtgaagacaacatggccgccaatgcgatggcgcatgcagtgctgggcgcggtgaccgcgcagctgaataaccagtcagccgcagcaggggggctgggtgcgggcggcggtgaactggcggcgcgctacattgccggccagctgttcccgggcaaaacggcgcagcagctgagcgaaagcgagaaacagcagctgagcgcgctgagtcagttggctgcagggcttgcaggcggtctggcgacgggggatactgcgggagccgtgaccggcgggcaggcgggtaagaatgcagttgagaataactatctgagtgtggaagaaaagacgaagcttgagttagcgaagcagaaactctag

SEQ ID NO: 423760 - DNA, 357 bp, Serratia marcescens
atgaaggcatctctaagaagtattggctgtgattggtttgatttatcaagctatcaacctgagcagaatgattgttttcaatttttagctcatttatgtatagggccagtaggggaggagggaatcaatcattttgatgtttttatctgcacccctgaatggctctgcaagcaccactggctgccggaactgatgcgtcacacgttgctggtacgtaaatacgatttggatgagataaccaaaaccatcaccgattacatcgatcaatgtgaaggcgatgactggatggagattgctcagaaactctctcgtgtttttgcttgggaattcgaagattaccagccttaccatccgtaa

SEQ ID NO: 423761 - DNA, 465 bp, Serratia marcescens
atgaaaaaatacaaccaattgatcatcacactcttaggtttcgcactcatatcaggttgtagcagcgaaaaatcaaaagacacatctccaccaccagggtataccaaattattccagggaagcgactcgattacctacctgaagaaaatggactcgtggcattaccagggcaatagcgacattattcaatttgagatgattatttcattctttaaagaggatacggtagttggtaaaaagtttcaatccataaaagaaaaaatactttatgattgcaataccgaaaataagtacacaaaactccccattggcttcttctctgacaaatatgcaacgggaaaagcgattgttccctacccactcagttcgagcaggtggcttatcgcagaaaataacagtcttgacgctattggatggcaaaattattgcgtgaaatataagaaggccatcgacgcacaaagttga

SEQ ID NO: 423762 - DNA, 612 bp, Serratia marcescens
atgaaaaagagacatatggcatgcttgctctatatattgatgggaattgcagaatacgcaaacgctaactcaacaattcaagcactcgcaaactgcgatgcatcattttttaaagaaatacagaatgatgggaatttaaagtcgctcatcccttcgttagatatatccatgttaaaaaccaccggaaaattatcgttcccgaccacatttacatccccggaaggcattgaggttaatagttttattgttacttataccgactttgataaatacaaagaaattagcacatttgatgtgaaaggccaattctactattggggatttgagtcccttcaatcctttaatgagattgtgaaaattctatcccagaaaatcaacctagttaaaattggaaatatttacacctacaacccaatgatacgaaacaccgttgatggccaatggatggctaataactcagccgttgacggtgtagcaccagaagagaactcagcagaaaaattgtttataatagaagacaataaagagaaaggtgttgtgagtatcatgtgtacattacaaggggaaattactgacaaagacttatatcttactgggttattgaaaaaatga

SEQ ID NO: 423763 - DNA, 2067 bp, Serratia marcescens
atgaaaaacatcaggtccggacttatctggctgctggtggcgttggtcggcgccttcgccttcgccatgctggcgctcagccgcggcgaacacgtcaacgccgtctggctggtggtcgccgccgtcgcctgctacagcatcgcctaccgcttctacagccggttcattgccgacaaggtctttgaactggacgatcgccgtctgaccccggccgaacgccgcaacgacggcctggactatgtgcccaccaacaaatgggtgctgttcggccaccacttcgccgccatcgccggcgccgggccgctggtggggccgattctggccgcacagatgggcttcctgccggggaccatctggatcctggtcggcgtcatgctggccggcgcggtgcaggatttcctggtgctgttcatttccacgcgccgcgacgggcgttcgctgggggaaatggccaagcaagagttgggcgccttcgccggggtgatcaccatgctcggcgcgctgggagtgatgatcatcatcctgtcggcgctggcgctggtggtggtaaaagcgctggccgacagcccgtgggggctgttcaccatcgccgccaccatcccgatcgcgctgttcatgggcatctacatgcgttttatccggccgggcaaaatcgctgaaatttcggtgattggcttcgtgctgatgctgctggcgatcatttacggcggcaacgtggcgcaagatccctactgggggccgttcttcacgctgcacggcaccaccctgacctgggtgctggtgatctacggcttcgtcgcttcggtgctgccggtgtggctgctgctggcgccgcgcgactacctttccacctttatgaaaatcggcgtcatcatcggcctggccatcggcatcgtcttcgccatgccggagatgaaaatgccggcggtttcgcgcttcatcgacggcagcggcccggtgttcgccggcgccctgttcccgttcctgttcatcaccatcgcctgcggcgccatttccggcttccacgcgctggtctccagcggcactacgcccaagctggtggaacgtgaaagccacatccgctttatcggttacggcgccatgttgatggagtctttcgtcgccatcatggcgctgatctgcgcctcggtgctggatccgggcgtttacttcgccatgaactcgccggcggcgctgatcggcaccacggtggaaaatgcttcgcaggtcatcaacagctggggctttatcgtcacgccggaaacgctggcgctgatcgccaaagaggtgggtgagaactccatcctgtcgcgcgccggcggcgccccaaccttcgccgtgggcatggcgcacatcatcagcgaggtgttcaacagccgggcgatgatggccttctggtaccacttcgccattctgttcgaagcgctgttcattctgaccgccgtcgacgccggcacccgcgcctgccgctttatggtgcaggatctggtgggcgtggcggtgccgcagttggccaacaaccgttcgtggttcggcaacctggcgggcaccacggtggcggtggccggctggggcttcttcgtgtatcagggcgtggtcgatccgctcggcggcatcaataccctgtggccgctgttcggcatcggcaaccagatgctggcgtcaatggcgctgatcctcggcaccgtggtgctgttcaagatgaaaaaacagcgttacgcctgggtcaccattctgccgaccgcctggctgttcgtgacctccatgaccgccggctggcagaagatcttccatgagaaaccgagcatcggcttcctggcgcaggcgaagaaattttccaccggcatcgagcaaggcacgatcattgcgccggccaaatcgctgaaagacatggaaaccatcgtattcagcaaccaaatcaacgccgcgctgtgcgggttctttatgctggtggcggtgaccatgctgatcgccgctttcttcgcgatccgccgggcgttgcgttccgaacagccgacgacgcatgaggtcagcgccgcgctgcgggaggagaccggccgcggctga

SEQ ID NO: 423764 - DNA, 1164 bp, Serratia marcescens
atgataaataaaatcatcgaagggtatttaccgcagctcacggctattcggcacgatattcatcagcaccccgaattgggtttcgaagagtttcgcaccagcgatctggtcgcggattatctgagttcgtggggttatgaggtgcaccgcggattggcgggcaccggcgtggtgggcacgctgcgggcgggcgacggcgtgaaaagcctcgggctgcgcgccgatatggatgccttgccgatcgaggagaacaccggcaaaccctggagcagcagcgtggccaaccgcatgcacgcctgcggccatgacggccataccaccatgctgctcggcgccgcccgttacctggcgcatacgcgcaacttcaacggcacgctgcacctgattttccaaccggcggaagagatgctgaacggcggcgcgcgcatggtggaacaggggctgttcgagcgcttcccctgcgacgccatcttcgccatgcacaacatgccgggcatgccgctcggtgagttctttttccagcatggcccgtttatggcctcgatggatcagttcaacgtgcgggtgcaggggcgtggcggccacggcgccatcccgcagctgacgatcgatccggtgctggtggcctcgcatatcaccgtttccctgcagagcatcgtctcgcgcaatatcgatccgctggaagcggcggtgatcaccgtcggcagcatcaaggccggtgaggcggccaacgtgatcccggacagcgcggagatgaagctcagcgtgcgctcgctggatcgccaggcgcgcgcaaccttgctggcgcgcattccggcgctgatcgaggcgcaggcggcaagcttcggcgctcacgcggtggtggaacacgttaacggcacgccggtgctggtcaacgacgaagggataacccgtttcgcccaccgcgtggcacagcagcagttcggcgccgctcgcgcgcactatggcgcccggccgctgatgggcagcgaagatttcgccttcatgctcgatgcgcacccgcagggctgttacctgatcatcggcaacggcgatggcgaaggcagctgcatggtgcataacccgggatatgactttaacgacggctgcctggcggccggcagccagtattgggcagcgttggcggaagcgtatttaaaataa

SEQ ID NO: 423765 - DNA, 1314 bp, Serratia marcescens
atgatgagtgaaaatacggctgaaactcaggcggaaataatatcggccccgagagccggtggcaaaaaggttatattcgccgcctccttcggcaatgcgctggagtttttcgacttcggtatttataacttcttcgttatttacatcagcgtattgttctttccaccgtccagcgatccgcatttggcgttgctgttggcgttcgcgacgtttggcgtcagcttcttcatgcggccgctgggcggcattctgattggcgcctatgccgatcgctgcggccgcaaaccggcgatgatcctgacgatttccctgatgagcctgggcacggcgatgatcggctttgcgccgacctacgccagcgccggctactggggaaccgtcaccttggtagcggcgcgcttgatccagggcgtggcggcgggcggcgaggtaggggcgtcgatgtcgttgctggtggagtcggcgccgcccaaccggcgcggcttctattccagttggtctttggcgacgcagggcatcgccaccgtggttggcggtgtcaccgcgctggcgctcagcgcggccttgccggcgctttccggcgagccggacgccatggccgagtggggatggcgtattcctttctttatcggcgtggcgctggcgccgctcggttgctggctgcgtctcgggctggagagcgatcggccgtcggtgccgcgggcgcacgagccgcccgcgcagttgcgcaagcactcgcgggcggtggtgctcggcgtgatgctgaccatcggcgccaccgtcgccacttacatctcgatgtattatctcggcacctacgcggtgaaatacttggggatggcgcaggcctacggctatgccgcgatgctgctggcggggcttgtcaccttcggcggcagcctgctggtcgggcactggtgcgatcgttacggccgcctgccgctgatccgttggtcgcggatcgcaattctgatcgtggccctgccggcgttttggtggctgagcgcggtgccgcatccggcggtgctgttgctgatagtcgcgctgctggtcgggttgaccacgctcggttcggtgccgaccatgctgatgatttcggagctgttcccgcagcgcattcgcgctttggggtttgcgttggtctacagcctcggggtggcgatcttcggcggttttgcccagtacatcgcctcgcagtcgatcgcgctgagcggctcgctgctggcgcccgccgtctatttgatgctggcgacgctggcttcgctggcggtgctgccgctgctgcgcgaaaccggcggcgagccgctgcgctag

SEQ ID NO: 423766 - DNA, 1935 bp, Serratia marcescens
atgtttcaagataacccgctgctggcgcagcttaaacagcaacttcactctcaaaccccgcgcgttgaaggcgtcgtgaaagggactgagaaaggctttggctttcttgaagtagacggtcaaaaaagttacttcattccgccgccgtacatgaagaaagtcatgcacggggatcgcattatcgccaccctgcacaccgagaaagagcgcgaaatcgccgagccggaaaccctggtcgagccgttcctgtcgcgctttgtcggccgcgtgcaaaagcgcgacgaccgtctgtccatcgtgcccgatcatccgttgctgaaagaggcgattccgtgccgcccggtgcgtgaattgacccacaacttccaggccggcgactgggcggtggcggaaatgcgccgtcatccgctgaaaggcgatcgcggcttcaacgccgatctgacccagtttatcaccaacggtgaagaccatttcgccccgtggtgggtgacgctggcgcgtcacaacctggaaaaagaggcgccggagatgctggctctcagcgaaccggccgccgcgtcggcgcgtgaagatctgaccgcgctcgaattcgtcaccatcgacagcgccagcaccgaagacatggacgatgcgctgtacgtgaccgacaacggtgacggttcgctgcagttgaccatcgccatcgccgatccgaccgcctacgtcgaacaaggcagcaagctggacgatatcgcccgcgtgcgcgccttcaccaactacctgcctggcttcaacatcccgatgttgccgcgcgatctgtcggacaacctgtgctcgctgcgccctaacgagcgccgccaggtgctggcttgccgcgtgaccatcgccgccgacggcgcgctgggcgaagatattcagttcttcgccgccgagatcgaatccaaagccaagctggtatacgacgaagtgtccgactggctggaaggcattgccggctggcagccgccgagcgacgccatcgcacagcaggtagccctgctgaaacgcgtttgcgacgcgcgcaacgcctggcgccaccagcatgcgctggtgtttaaagatcgcccggactaccgcttcgtgctgggtgaaaaaggcgacgtgctggagatcgttaccgagcagcgccgcagcgctaaccgcatcgttgaagagtgcatgatcgccgccaacgtctgcgccgccatcgtgctgcgcgatcgtctgggcttcggcgtgtacaacgtgcacaccggtttcgatcctgcgctggtcgagcaagcggtcaccgtattgcaggccaacggcgtggaagccgaagccgacaagctgctgaccctcgacggtttctgcgaactgcgccgccacctggacgcgcagccgacccagttcctcgacagccgcatccgccgcttccagaccttcgcggagatcagcaccacgccggggccacacttcggtctggggctggaggcttacgccacctggacatcgccgatccgtaaatacggcgatatggtcaaccatcgcctgctgaaggcgatcatcaaccagcagccggcggaaaaaccgcaggatgacgtgacggtacagctggcggagcgccgccgcctcaaccgcatggcggagcgcgacgtcggcgactggctgtacgctcgcttcctgcaggacaaggccggtaccgatacccgcttcaacgccgagatcatcgacgtgacccgcggcggcctgcgcgtgcgcctgctggacaacggcgccgttgccttcatcccggcaccgtttattcacgcggtgcgcgacgagatgcagtgcagccaggaaaccggcaccgtgcagatcaagggtgaagtggtttaccgccagagcgacaccttgcaggtcaccatcgccgaagtgcgcatggaaacccgcagcgtgatcgcccgccctgcggcctga

SEQ ID NO: 423767 - DNA, 528 bp, Serratia marcescens
atgccactgaatgacctactgacgctgcccggcgtggcggcccaaccggatgcggtaaccgacggttacgtgttcaaccacaccatgatccgcgtgaaggatctgaccaaggcgctggatttctacacccgcgtgctgggctttaccccggtttatctggaaacgttcgaagaagccgccttcaccatctgctacctgacgcgcagcccgcgtgaacagatcccgcaggacgacgacgaacgcaagcgctgggcgctgagccagccgggcattctcgagctgacccataaccacgacaccgaaaatcaggcggatttccactatcacaacggcaacggcgagccgcgcggctttggccacctgtgcgtcacggtgccggacgtgcgcgccgcctgcgagcggtttgagcgcctcggcgtcaccttccagaaacgcctgcatgaaggccgcatgaactacgtggcgttcattcgcgatccggacgattactggattgaaatcctgcagccgacgccgctgcaagactga

SEQ ID NO: 423768 - DNA, 855 bp, Serratia marcescens
atgaagctgagccagctgaagtttttctgcaccgtggtggaacataaaaccatcgccgccgccgcgcgcgagctgcactgcgtgccttccaacgtcacgctgcggctgcgcgagctggaggagtcgctgggcggcgagctgtttttccgcgacaagaaccggctgtacgtcaatcccaaagggcggctgttctacctgcaggcgcgcgacattgtggcgcaggcggagcgcagcaagcagctgttcgccggcgagcaccaacatgggctgctgaacctcggggcgctggatttctcgctggtcagccatttgccggcgcgcattgcccggctgcgccgtttacagcctcatctgcacatcaacgtgctgagccgcgactcgctggtgctggaacgcatgttgatcgacagcgatctcgatctggcgatcaccgacggcccgattgaacatccgctgctcgccagccaaaaggcattcgacgaacggctggtattgctgatgccggccgatgccggggaacccgacgccgccacgctggcgccgctggagttttacacgttcagccgcgaatgttcgtttcgtctgaaggtggatcactggctggcctcgcgcgggctgaaaccgcgcatgacgctggaaatggagtcttatgccgcgatggcggcctgcgtgcaggccggttgtggcgtcgcctgcgtacccggttcgttgctgccgctgatcttgccggcgccggggctgaaggtggtggaaatgggtgaggagggggtgagcgacctgtacttcgtctggcgacggcatcagctgtccgacgagttgcagaccatcctggcgatattggcgcgcccggggtga

SEQ ID NO: 423769 - DNA, 2307 bp, Serratia marcescens
atgaaattcaaaccgtcaatcaagccttataccggcccagcgggcggctggggttcgcttgaagccaccacccgctttgtcctcgacagtaaacaaacgctaaaaaacatgcgcaacctgatgcgcgtcaacaaggcacgcggcttcgactgccccggttgcgcctggggcgacgacaaccacagcaccttcagcttctgcgaaaacggcgccaaagcggtcagttgggaagcgacgcgcagcgccgtcgagccagagttcttcgccgcccacagcgtcagcagcctgcagcagcaaagcgactatttcctcgagtatcaggggcgcctcacccatccgatgcgctacaacgccgaaactgaccactatgagcctatccattggccggatgcgctggcgctgatcgccaagcacatcaacggcatggacaacccgaaccagatcgagctgtatacttcgggccgcgccagcaacgaagcgtcgtacctttatcagctgttcggccgcatgctcggcaccagcaatttccccgactgttccaatatgtgccacgaggcgagcggcgttgggctgaaacagagcatcggcgtcggcaaaggcaccatccgcatcgatgacttcgaaaaggccgatgccatcttcgtgttcggtcaaaaccccggcaccaaccacccgcgcatgctgcacagcctgaaaaacgccgcccgacgcggcgcgcgcatcgtcagcttcaataccctgcgcgaacgtgggctggaaaggttcgccgatccgcaggatccggtacagatgctgacgccaaaatcctcgccgatcagctcttcctattaccagccgaatctgggcggtgatatggcggcggtgcgcggcatggtgaaagccctgctggaaacccaccgccagcgtctggccgccggcgagcccgccctgttcgacctggcgtttatcgaacggcacagcgttggcgtagaagcttacctggcgcaggtagacgccaccgagtggcaaaccattaccgcgcagtcgggccttagcgaggcgcagttgcgccaggcggcggccacctatcagggcgccgaacgggtgatctgcacctgggcgatgggcgtgacgcagcataaacactccattgctacggtgcgcgaaatcaccaacctgcagctgctgttcgggcaactgggcaaaccgggcgccggcctgtgcccggtacgcggccacagcaacgtccagggtaaccgcaccatggggatcgacgagaagtcgcccaaagcgctgctcgacagcctggagcgccactttaactttaccgccaaccgcgcgctgggccacaacacggtggaagcgatcgaagcgatgctgcgcggcgaagtgaaagtgctgatcgcgctgggcggcaacctggccgccgcggcgccggacaccgagcgcaccgcccgcgccctgcgcaactgcgatttgacggtgcatatcagcaccaagcttaaccgcagccacctggtgaccggcaaagacgcgctgatcctgccgacgctcggccgcaccgaactggatatgcaggccagcggctcgcagtacattacggtcgaggattcgttcagcatggtgcacgcctcggaaggcatcggcaaaccgctggcggagacccaacgttcggagacggcgatcgtctgcggcatcgccgacgcggtgctgggcacccagcagttggactggctggaactggccgacgactactcgctgatccgcgatcatatcgccgccaccattcccggctttgaggatttcaaccggcgctgcgaccagcccggcggtttctacctgggcaatgccgccgccgaactgcgcttcgccacgccaagcggcaaggcagaattcagcgccgccgcgctgccgaccaccctgttcccgcagctgggcggcgagcaagcgccgtttaccctgcagacgctgcgctcacacgatcagtacaacaccaccatctatggtctggatgaccgttatcgcggcgtttacggccaacgcgaagtgttgttcatccatccggaggatctggcggcgctgggcctgcaggatggcgaacgggtagagattgaaaccctgtggaacgatggcgtggtgcgtaaagtggacgggttcaagctggtgagttacgacattccgcgtggcaacctggcggcctactacccggaaaccaacccgctggtgccgctggccagcttcggcgacggtaccggcacgccgacttcgaagtcgattccggtggtgatccgccgcagcgaacagcaaccttcgctgcgcatcgcctga

SEQ ID NO: 423770 - DNA, 1170 bp, Serratia marcescens
gtgaagcgttcagtatcagtggtgatcggcggcatattgctgcctttagcggcgcaggcggcggaaacgacgcccaattttcctaccgtgaccccgccggcgatagacgccgcctcttacgttttgatggattacgccaccggccaggtgttggccgccggcaatgccgatgaacggcgcaacccggccagcctgaccaaactcatgaccgggttggtgatcgaccacgcgctcgatcagcacaagattggcctcgacgatgtcgtcaccgtggggaaagacgcctgggcgcagggcaacccggtgttcaaggggtcttcgctgatgttcctgaagccaggtgacagggtcacggtgcgcgatctcagccgcggtattatcatcgattccggcaacgacgcctgcgtggcgatggccgattatgtggcgggcagccaggctaacttcgtcaagctgatgaacgagaagagcgcgcaactgggcctgcagaacacccatttcgaaacggtacacgggctggatgcgccggggcagttcaccaccgccggcgatctggcggtgattgcgcgtgccattatcatgagtgaaccggcggaatatcatatgtacagcgagaagtcgctgacctggaacggtatcacgcagcagaaccgcaatggcctgctgtgggataagacgctgcacgtcgatgggctgaaaaccgggcacaccgcctcggccggcttcaacatcatcgcctccgccaccgaaggggatcgccgcctgatcgccgtggtgatgggcggcaaaagcgctaaggggcgtgaggagcaggcgcgtaagctgttgacctgggggctgcgcgactttaccaccgtacacctgttcagcgccgggcagagcctgggggaagagccggtctggtacggcgcggatcaccgcttgccggtcggcagcgcgcagaaccagtcgctcagcctgccaaaaaacgaagcggacaagctgaaggcgcagtacgtaatcaataccgcacggctggaagcgccgattggcaaagggcagaccgtcggcgagatccgcatcagcgacaatggccaggtggtgaaaaccctgccgctggtggcgctgcaggcggtgccgcagggcggcgtgttctcgcgcctcgcggattacgtgaagctgaagctctga

SEQ ID NO: 423771 - DNA, 906 bp, Serratia marcescens
atggatattaaacaactgatttatttgtgtaatttagaacgggaacgccacttcggccgggcggcggaagccagcttcgtcagccagccgaccctgtccatgcgattgaaaaatctggagaaagagctgggcgtttcgctgattaaccgcggcaaccatttcggcggttttaccgccgaaggcgagcgggtgctggcgtgggcgcgtgagatcgtctcggtctaccaggggctgaagctggaggtggagtcgctcaagcacggcttgcacggcacgctgcgccttggcgtggtgccgcagtgcagtatctcggtatcggaaatgctcaaggcggtcagcgcgcgttacccgcatctcgattaccggctggcggtgctgagcgccgatcaactgctggaggcgctgacggcgcataccgttgacatcggcatcggctttttcgagctgtcgaccttaaaggagctgcatttccaatcgcaaccgctggtggaaaccggcgtcgagctggtatttcatccgcaacacttccctaagctggtgggcgacacgccgttgccgctggaagcggtggccgctttgccgctgtgcctggccgagccgacgcgttatttccgccgctatctcgatcaacacttccgcgacgccgggttgacgctgcacacacggctggagacggcctcgatcttccaactgctggaggggattttcgtcggcctgggctgcgggctgttcccgcgcggccaactgcaatcgccactgatgccggcgttgcagcgtcgtccggtggccatcggcgccatgccgcgtcatgcggcggtggtggtcgatatggcggagcgcgccacgccgttggcgcaaaaattcttcgacgccgccagcgagtggctgcgtcggcaaaatgaatag

SEQ ID NO: 423772 - DNA, 549 bp, Serratia marcescens
atgtctgagcaagaacttaaatccagcaacagtatcgttaacgtgattgtcgtcatcgataccgatgccctgatagaagcattcgagaataacaaccccagtcaggactccagcaacccaacaggtatcggccatcaatacgcttatatggtcgtcacctccgaacaggtgatcggcggttccggtacggcggacctgaactttaaagccaatgtcggcgacgtcattcgctggaccggcacctcagaatccgccaatttcgacgccagtgtgctgatctacgggctgccgcagttcggcagcggtacccaggtcttttccaacccgaccttcaaaatgtacacccgcagctcgatgatgccggcgcaaaataccgtgttccccgtcaccttcaccaaccaaacctattggttcatccaggcggacatcagcaataccggcacggaaaattattgcatccaatttggcctttattatcggccaaacggcggcgatcaaaaattactgggttatttctattgggatccgactattaccatcagcaattaa

SEQ ID NO: 423773 - DNA, 1185 bp, Serratia marcescens
atggaacgactccgtcgacaacataatgcccagtggtatcacgaaacccaaagcagcgtgcggggcgatgcgccgctggagccgcaggcggctaccctacgcgatcgttttctgctggggctgggcgccttcgccgacgaagcgctaaatgcagcgctcagcgcccgcgccggggtattcaacgcctcgctggccggttaccacacgctgtttcccgaccaggtgtcgctgtcacgatacgtgacattgtcaccatacgatcgccttagcaccgcgttgaccgtcgctcaggtgacgggcgtgcaatcgctttgtagccactacgccgcccgcctcgccccgctgcacagcccggacgcctcccgggaaagcaatatccgtcttgctcaaatcacccaatatgcccgccagcttgccagccagcccacgctgatttgccgcagggcgctgcaacagctcggcgacgtcgggctgagcccggcggatatcgtaaccttctctcagacgatcggttttgtcagctatcaggcgcgcgtagtggcgggcgtcgcggcgttggccggccgcccggcggtggtggtgcccggcttcccgaacgtcgaagacgccgatggcgtcgatttcagtgccgacgagttgagctggactgctcgtctgccgacaatcgacacggaagccgccgccgccgaacagcttgacgtgctggatcagagccacccgcaggcgcgcgccgaatcttattatttgctgttggcgcacgatgccgccgcgctgcgcgagcgtaacggcgtgtttaacggcatcaatgccgaaggatacgggttatcgggccgattgaaagcgctggcgacgctggcggtctcgcgcatcaacggcagccgctactgcgcggctacggtggcgcatgaattgcaggatgacggactgacgcaggcgctgttcgccgggctgcctcaagggttggcgcataccgacgatacggtcaaacgtgcagtgatccacaccgccgccgagctgacgcgcgctccggagaaattcaccccgcagagcgtgcagccgttgttcaacagcggcctgaatcaggcgcaggcgctggaagtgatcctcaccgccgcgctctacgcctgggaaaaccgcctgcgccaaacgctgggcgatgcagagccggcacagccggcgcaatga

SEQ ID NO: 423774 - DNA, 813 bp, Serratia marcescens
atggaaacgctgttggaagtgcgcaacctgagcaaaacctaccgctaccgcaccgggctgttccgccgtcagcacgtcgaggcggtgaaatccgtcagctttaccctgcgcgaaggccagacgctggcggtgatcggcgagaacggctccggcaaatccacgttggcgaagatgctctcaggcatggtggaaccgaccgccggcgaactgctgatcgacgatcatccgctggaattcggcgattatcgctaccgtagccagcgcattcgcatgatttttcaggatccgagcacctcgctcaacccgcgccagcgcatcggccagctgctggacgcgccgctgcggctgaacaccagtctggaacccgccgaacgcgagcagcgcatcaaccagacgctgcgccaggtcggcatgctgccggatcacgcctactactatccgcacatgctggcttccgggcagaaacagcgcgtcgcattggcgcgtgcgctgatcctgcagccgaaggtgatcgtcgccgatgaggcgctggcctcgctggacatgtcgatgcgctcgcaaatcatcaacctgatgctggaactgcaggaaaaacacggtatttcctatatctacgtcactcagcacctcggcatgatgaagcatatcagcgaccaggtgttggtgatgcacgaaggagaaatcgtcgaacgcggcagcaccgccgaggtgttggcggcgccgctgcacgaattgaccaagcgccttatcgccagccacttcggcgaggcgctgaccgccgacgcctggcggcgcgacggcggccgtttttga

SEQ ID NO: 423775 - DNA, 993 bp, Serratia marcescens
atgccgttactcgatatccgcaatctgacgattgaatttatgaccgccgaagggccggtcaaggcggtcgatcgcgtcagcatgacgctgaccgagggcgaggtgcgcggcctggtgggtgaatcgggctccggcaagagcctgatcgccaaggccatctgcggcgtaaccaaagacaactggcgcgtcaccgccgaccgtttccgcttcgacgacatcgatctgctgcagctgagcccgcgcgagcggcgcaggctggtaggccacaacgtctcgatgattttccaggagccgcagtcctgtctcgatccttccgagagcatcggccgccagctggcgcaggcgatcccgggctggacttataaaggccactggtggcagcgcttcaactggcgcaaacgccgcgccatcgaattgctgcaccgcgtcggcatcaaggatcacgacgacatcatgggcagcttcccgtacgagctgaccgaaggcgagtgtcagaaagtgatgatcgccatcgcgctggccaaccagccgcgcctgctgatcgccgatgagccaaccaacgccatggagccgaccacccaggcgcagattttccgcctgttggcgcgcctcaatcagaacaacaacaccaccatcctgctgatcagccatgatttgcagatgatgagtaaatgggccgaccgggtgaacgtactgtactgcgggcaaacggtggaaagcgcccagtgcgaagagctgctggcggcaccgcaccacccttacacccaggcgctgatccgcgccatgccggactttggccgctcgctgccgcacaagagccggttgaacacgctgccgggcgccattccttcgctggaacacctgccgatcggctgccgtctggggccgcgctgcccttacgcgcagaagaagtgcatcgaaacgccgcgcctgcgcccggtcaaaaaccacttcttcgcctgccacttcccgctgaacatggaggagcaataa

SEQ ID NO: 423776 - DNA, 891 bp, Serratia marcescens
atgcccttcgataacgtataccgcgagaaaaaaatgccgagcccgctgcgctacacctggcggattttttacggcgacgcgctggcgatgatcggtttttacggggtgatcgccctgctgctgctgtcgctgttcggcagcctgctggcgccctacgcgctggatcagcagttcctcggctatcagctgctgccgccgtcctggtcacgctacggcaacgtgtcgttctttctcggcaccgacgatctcgggcgcgacatcctcagccgcctgttgaccggcactgccgccaccttcggctcggcgctggcggtgacgctggccgcggcgttctgcggagtgatcctcggcgtgttcgccggcgtcacccacgggctgcgttcggcgatgctcaaccacatcctcgataccctgctgtccattccgtcgctgctgctggcgatcgtggtggtggcgtttatcggccccaaacttgaacacgccatgctggcggtgtggctcgccttgctgccgcgcatggtgcgcaccatctacagcgcggtgcacgacgagctggagaaagagtacgtggtggcggcgcggctcgatggcgcttccacgctgcagatcctgtggtacgcagtgatgccgaacattgcggcggtgctggtgaccgagttcacccgcgcgctgtcgatggccattttggacatcgccgcgctcggcttcctcgatctcggcgcgcagctgccttcgccggaatggggagcgatgctcggcgattcgctcgagctggtgtacgtcgccccctggacggtgatgctgcccggcgcggccatcctcgtcagcgtgctgctggttaacctgttaggcgacggtatgcgccgcgcaatcaatgccggggtggaataa

SEQ ID NO: 423777 - DNA, 966 bp, Serratia marcescens
gtgattatctttaccctgcgccgcattctgctgctgctgatcacgctgttcttcctgacgctggtcagcttcagcctgagctatttcacgccgcgcgcgccgctgaacggcgccgccctgctggacgcctatcagttctacttcgtcagcctgctgcactgggacttcggcgtctccagcatcaacggccaggcgatcagcgaacagctgcgtgaagtgttcccggccaccatggaactgtgcctgctggccttcgccctggcactgtttatcggcattccgctgggcatcatcgccggcgtgctgcgcggcaagtggcaggacaccgccatcagcaccttcgcgctgctaggcttttcgatgccggtgttctggctggcgctgctgctgatgctgttcttctcgctgcatctgggctggctgccggtatccggccgtttcgacctgctgtatcaggtgaagccgatcaccggtttcgcgctgattgacgcctggctgtcggactcgccgtaccgcgccgagatgatcggcagcgccctgcgccacatgatcctgccgatcgccgcgctggcggtggcgcccaccaccgaagtggtgcgcctgatgcgcatcagcaccgacgacgtgctgagccaaaactacatcaaggccgccgccacccgcggtctgtcgcgcttcaccatcattcgccgccacgtgttgcacaacgcgctgccgccgatcgtgcccaagctggggctgcagttctccaccatgctcacgctggcgatgatcaccgaagtggtgttcagctggccgggcctcggccgctggctgatcaacgccattcgccagcaggactatgcggcgatctccgccggtgtcatggtggtcggcacgctggtgatcaccattaacgtcctggccgatattctgggtgcggcaaccaacccgctgaaacataaggaatggtatgcccttcgataa

SEQ ID NO: 423778 - DNA, 1650 bp, Serratia marcescens
atgcgtggtttacccctttggatagtgtcgttgtgctttaccggctccgccctggccacaacaacaccgcccgcgcccgccgcggcgccgctgccggacattcgccagagcggctttgtctattgcgtcagcggcatactgaatacctttaacccgcaaatggccagcagcggcctgacggtggataccctggccgcccagctgtacgatcgcctgctggatgtcgatccctacacctaccggctgatccccgagctggcgcaaagctgggaagtgctggacaacggcgccacctaccgcttccatctgcgcaaggacgtgccgttccagaccaccgcctggttcacgcccacccgcaagatgaacgccgacgacgtggtgttcagcttcgcgcgcgtatttgaccaaaaacacccgtatcacgacgtcaacggcggcgaatacccctatttcgacagcctgcagttcggcgattcggtgcagagcgtgagaaagctcgacgactacacggtggagatccgcctgcagtcgccggacgcctcattcctgtggcacctggcgacccactacgcgccggtgctgtccgccgaatacgccgacacgctgacgcgcgaaggccatcaggagctgatcgaccgcgaaccggtcggcagcggcccgttcctgctcaacgaataccgctcggggcaatatattcgcctggcgcgcaacgccgcctactggaaaggcctgccgcgcatgccgcaggtggtgatcgatctgggcgccggcggcaccggccgcctctccaaattgctgaccggcgagtgcgacgtgctggcctatccggcggcgagccagctgtctatcctgcgcgacgatccgcgcctgcgcctgacgctgcgcccggggatgaacatcgcctatctggcgttcaacacccgcaagccgccgctcgacaacctcaacgtgcgccaggcgatctcgctggcgatcaacaaccagcggttgatgcaatcgatctattacggcacggcggaaaccgccgcctcgatcctgccgcgcgcctcctgggcctacgacaacgacgcgcacgtcaccgagtacgatccggccaaatcgcgcgaaatgctgcggcaggccggcgtcggccagctgaacctgaagctgtgggtgccgaccgcctcgcagtcttacaacccgagcccgctgaagaccgccgagctgatccaggccgatctcggccaggtgggcatcaacgtcaccattgtgccggtggaaggccgtttccaggaagcgcgcctgatggagatgaaccacgatctgaccctgaccggctgggccaccgacagcaacgacccggacagcttcttccggccgctgctgagctgcgcggcaatccgttcgcaaaccaactatgctcactggtgtgacccgggcttcgacgaggtgctgcagaacgcgctgctgtcgcagcagctgtctcagcgcatcgacaactaccgcaaggcgcagaagatcctcgagcagcaactgccggtgctgccgctggcctcttccctgcggctgcaggcctaccgctacgatatcaagggattggtgctgagcccgttcggcaacgcctcgttcgccggggtgtaccgtgaatccgcgccggaggtgaaaaagtga

SEQ ID NO: 423779 - DNA, 927 bp, Serratia marcescens
atgaacgaagttgcacttccaccacgccgttcgctgccggacgctcaggcatggcgcggcgaaatgagtgatgtcgggctcgattgggtcgggatgcaagggatcgcgctgccgctggagctggccggcaagccactgatggccaaggtcgacgccggcatcaacctgcgcgccgaagcggcgggcgaacgcggcattcacatgtcgcggctgtatctggcgctggacgaattgacgcagggcgagctgacgccgcagcgcctcggccgaacgctgcaggcctttctggattcgcagccggaacacagcgatcgcgccagcctgacgctcagcggcgagctgctgctgtcgcgcccggcgttgctgtcgccgcagcgcggctggaaggcttacccgctgcgcatcgaggccaccctgacggacaggctgacgctggcgctgaccgtcggcgtaccttactcctccacctgtccgagttcggcggcgctcagccgccagctggcgcagcaacagtttcagtttgattttgaacaggcggcggagcggatcagccaacggcaggtgagcgagtggctgttggagcagggaatgccggccacccctcacagccagcgcagctgggcctgggtcaccgtgacgcccgagaatgaacgggcgttcgaaccggtgaaattgatcgaccgcatcgaacacgcgctgggcacgccggtacaaacgctggtgaaacgccgcgacgagcaggccttcgcgctggccaacggtcagaacctgatgttttgcgaagatgcggcgcgccgtctgtatcgcatgctgcgcagccagtgcgattaccgcgccttctcgctgcgcgtcgagcatcaggagagcctgcatgcccacaatgcggtggcggagctgagctggcggggagaaaatcatgctgcgtaa

SEQ ID NO: 423780 - DNA, 561 bp, Serratia marcescens
atgctgcgtaaaaatcccagcggccacctgccgcaggtctcgccgctggcctacatcgatcccaccgccattatctgcggccgggtgatcgtcgaagatttcgtttacgtcggcccgtatgcggtgatccgcgccgacgagttgaacgccgccggcgacatggaaccgatcgtcatcggctcgcactccaatattcaggacggcgtggtgatccactccaagagcggggcggcggtcatcattggccgttacagctcgatcgcccaccgcgccattgtccacggcccatgtcgcatcgacgatcgggtgtttatcggtttcaacagcgtgctgttcaactgccacatccagtccggctgcgtggtgcgttacaacgcggtggtggacggcgtgacgctgccggaaaaccgctatatcccctcgaccgagcgcgtagggccggacagcgacctgtcgcgctatcgccaggtcgatcgcggcgcgctgcagttttcggaagaagtggccgccaccaacgtcgaactggtgcgtggctatcaggcattacgcaatgaattttaa

SEQ ID NO: 423781 - DNA, 1188 bp, Serratia marcescens
atgaaacaacttcctgtgaccgtgctttccggctttctcggcgccggcaagaccacggtgctgaaccacatcctgaacaaccggcagggcatgcgcgtggcggtgatcgtcaacgacatgagcgaagtgaacatcgacgccgcgctggtggaaaatgccgtgcatctcgatcgccaggaagagaagctggtggagatgagcaacggctgcatttgctgcacgctgcgcgaagacctgctggtatcggtgcgtgagctggcgcaggacgggcgtttcgattacctgctgatcgaatcgagcggcatctccgagccgctgccggtggcggaaacctttaccttcgaggacgaaaagggcgaaagcctgtcgcagttcgcccggctggatactctggtgacggtggtcgacggggtgaatttcatccagcagtaccagcgggcgcaaagcctgcaggaggccggccaaagcctgggcgaggacgatctgcgcagcgtggcggatctgttgattgagcaaattgagttctgcgacgtgatcctggtcagcaagaccgatctgttgacgccagcccagcagggcgaagtgatggcgctgttggccagcctgaaccccgatgcccgcattgtgccgatcgcgccgggtaagctgccgctggaggcggtgcttaataccggcagcttcagctttgaaaaggcgcagcaggcgcccggctggctgaaagagctgcgcggcgaacacgtgccggaaacggaaaactacggcatcagcagcttcgtctatcaggcgcggcggccgtttgcgcctgacaagttttaccgcgtgatcaacggcgactggggcggcggcaagctgctgcgctcgaaaggctttttctggctggcgacgcggccgcggcaggccgggcagtggagccaggcagggggcatcgcccactacggcctggcgggcaccttttggcgcgccatcccgcaaaagaactggccgcaggatcccgaagcgcgggcgcacattcaggaaaaatgggtggagccgttcggcgacatgcgccaggagctggtgtttatcggccagcatttgcagcaggcgacgatcgtgcgtttgctggacgaatgcctactgagcgacgatgaaatggccgccggcgtggactactggctggacatggctgacccgttccctgagtggtaa

SEQ ID NO: 423782 - DNA, 666 bp, Serratia marcescens
atgggtattttttctcgttttgccgacatcgtgaacgccaacatcaacaccctgctggacaaggcggaagatccgcagaagctggtgcggttgatgatccaagagatggaagacacgctggttgaagttcgctctacgtcggcgcgtgcgctggcggagaaaaagcagctgctgcgtcgcatcgagcagggcgaaagccaggtaggcgactggcaggaaaaagccgaactggcgctgcgcaaagataaagaagatttggcccgtgcggcgctgatcgaaaaacaaaaggtggccgatctgatcgccacgctgacgcaagaagtggcgaccgtagaagaaacgctggcgcgcatgaagagcgaaatcggcgagctggaaaacaagctgaccgaaacccgtgcgcggcagcaggcgttggcgctgcgtcatcaggccgcgtcttcctcccgtgacgtgcgccgccagctcgacagcggcaagctggatgaagcgatggcgcgtttcgaacagttcgagcgccgcatcgaccacatggaagccgaggcggaaagcatcagcatcggtaaaaagaagtcgctggaccaagagtttgccgagctgaaagccgacgacgccatcagtgagcaactggcggcgctgaaagccaagatgaaccgctcagagtaa

SEQ ID NO: 423783 - DNA, 228 bp, Serratia marcescens
atgagtgctttattacttgccattccgctgacaattttcgtgctgtttgtcgcgccgatttggctttggctgcattacagcaatcggcaacagaccggcatccagctgagtcagcaagaaatgcagcgcctggcgcagctggcggaagacgccaaacgcatgcgtgaacgcattcaggcgctggaagagatccttgatgcggaacacccgaactggagacagtcctga

SEQ ID NO: 423784 - DNA, 360 bp, Serratia marcescens
atgagcatgacgctgggcagtaaaaagctttatcgcgttcccgaagaaggcatggtgaaaggcgtctgcgccggtttggcccactatttcgacgtgccggtgcgcctgatccgcgtgatggtggtgctgtcgctgttcttcgggctgtttttcttcacgctggtggcctatatcgcgctggtgttcgtgttggacgaagcgccggccagccgtttcgaaggcgagcatcagaagacgccgcgccagctgctcgatcagctggaatatgagttgggcagcggcgagcagcagctgcgtcaggtcgagcgctacgtaacgtccgataccttcggcgtacagagccgtttccgcaagctgtaa

SEQ ID NO: 423785 - DNA, 204 bp, Serratia marcescens
atgttgaagacattggctaaagtcatcatcatagcgttattgaactatggcccggcgggcgccgccggctggctgttgaagaccgtcggccgcaaaccggtgcgcttcgtgctggcgctggtgctggaaccgctgttccgtaaaggcctgaacaaggcattcgggcgttacgtcaaggagagcaatgaaacgactgcaaaatga

SEQ ID NO: 423786 - DNA, 1398 bp, Serratia marcescens
atgaaacgactgcaaaatgagttaacctcgctggtcaaccgcggaatggatcgccatctgcgcctggcggtgaccggcctgagccgcagcggcaaaaccgcctttatcaccgccttcgtcaaccaactgctgcatgtgcacagcggcgcgcgcatgtcgctgttttcaccggcgcgcgaagagcgcctgctgggcgtcaaacgcatcccgcagcgcgatctcggcatccagcgtttcacctatgacgaagggctggcgcagctttacggcacgccgccggcctggccgacgccgacgcgcggcgtcagcgaaatccgtctggcgctgcgttaccgctccaacgactcgctgctgcgccacttcaaagacacctccacgctgtacctggagatcgtcgattatcccggtgaatggttgctggatctgccgatgctcgagcaggattacctggcctggtcgcgccagatggccgggctgctgcagggcgaacgcgcagaatgggccaaaccctggcttgagctgtgcaaggcctgcgatccgctggccccggccgacgaaaaccgcctggcggcgatcgcccaggcctacaccgattatctgctgcgctgcaaaagcgaagggctgcacttcattcagccggggcgtttcgtgctgccgggcgacatggccggcgcgccggcgctgcagtttttcccgtggcccgacgtggccgcgttcggcgaatcgaagctggcgcaggccgacaaacacaccaacatcggcatgttgcgcgctcgcttcaactactactgccagtcgatcgtcaaaaacttctacaaagaacatttcgtccgtttcgatcggcaaatcgtgctggtcgactgcctgcagccgctcaacagcggcccacaggcgttcaacgacatgcgtctggcgctgacccaactgatgcagagcttccattacggcaagcgcacgctgtttcgccgcttgttctcgccgaccatcgacaaactgatgtttgccgccaccaaggcggatcatatcaccgccgatcagcacgccaatctggtgtcgttgctgcaacagctggtgcaggaggcgtggcagaatgcggcgttcgagggcatcagcatggattgcgtcggcctggcctcggtgcaggcgaccgagagcggcatcgtcgatcatcaggggcaacgcattccagcgctgaagggcaaccgcctcggtgacggcgcgccgctgacggtgttccccggcgaagtgcccgcgcgcctgccggggccggcgttctggcagagccaggggttccacttcgatgaatttcgtccacgcgccatgagcgtggacagtccgttgccgcacatccgtctggatgcggtgatggagtttttattgggagacaaattgcgatga

SEQ ID NO: 423787 - DNA, 1062 bp, Serratia marcescens
atgagcgagccgatcaaaccgcgtatcgattttgacgagccgctgcagccgccgcaggagccggcgttgcgcgccggcgtcgcgttcgatgccgaacaggcggaaagctttttcccggctgcgccggagctgcagcaggaagaggaagaagggcgcgccgaaggcatcattaacgccgcgctgaaaccgaaacgcagcctgtggcgcaaaatggtcaccgccggcctggcgctgttcggcgtcagcgtggtggcacagggcgtgcagtgggtgcataccgcctgggtgcagcaggactggatcgccatgggcggcggcgtggccggcggcctgatcgtgttcgccggcgtcggttcggtggtcaccgagtggcggcgtttgtatcggctgcgccagcgcgcggaagagcgcgacgtggcgcgcgagctgttgcacagtcacgggctgggccaggggcgcgaattctgcgagaagctggcgcgtcaggccgggctggatcaggggcatccggcgctgcagcgctggcaggcctcgctgcatgaaacgcaaaacgatcgtgaagtggtggagctgtacgccaaactggtgcagccggtgctcgacaaccaggcgcggcgcgaaatcagccgctccgccgccgaatcgacgctgatgatcgccgtcagcccgttggcgctggtggatatggcgtttatcgcctggcgcaacatccgtttgatcaaccgcatcgccgcgctgtacggcatcgagctgggctacttcagccgcattcgtctgttccggctggtgctgttgaacatcgccttcgccggcgcttccgagctggtgcgcgaagtgggcatggactggatgtcgcaggatctggcagcgcggctgtcggcgcgcgcggcgcagggcatcggcgccggcttgctgaccgcgcggctgggcatcaaggcgatggaactgtgccgcccgctgccgtggctggaaggggaaaagccgaagcttggcgatttccgcagccagctgatcggccagttgaaagacacgctgaaaaagagcgacggcaaggccaaataa

SEQ ID NO: 423788 - DNA, 1572 bp, Serratia marcescens
atgcgtttggaagtattttgcgaagaccgcctcggtctcactcgagaattactcgatcttttggtatcgcgcagcattgacttacgtggcatcgagatcgatcccatcggccgcatttacctcaatttctcccagctggagttcgatactttccgcgcgctgatggcggagatccgccgcatcgccggcgtgaccgacgtgcgcaccgtcagctttatgccttccgaacgcgagcaccgcgcgctgcgcgcgctgctggaatcgatgccggaaccggtgttctcgatcgacatgaagggcaaggtcgagctggccaacccggcggcgcaggcgctgttcagcctgaacgaagacaagatccgcaaccagaccgccggggcgctgatcggcggctataacttcagccgctggctggagagcgagcatacggcgccgcactccgagcgggtggtgatccgcagccaggacttcctgatggacatcacgcccatctatctggaagacgaacagcagcagccggccgcggtcggcgcggtggtgatgctgaagtccaccgcgcgcatgggccgccagctgcaaaatctgtcggtgaacgacgataccgaattcgaccacatcgtcgcggtaagtgccaagatgcgtcacgtgctggagcaggcgcgcaagttggcgatgctcgatgcgccgctgctgatcgtcggcgataccggcaccggcaaggatattctggcccgcgcctgccatttgcgcagcccgcgcggcaaacagccgttcctggcgctgaactgcgccgcactgccggatgacgtggtggagagcgagctgttcggccatgcgccgggcgcttatcccaacgcgctggaaggcaagaagggcttcttcgagcaggccaacggcggctcggtgctgctggatgagatcggcgaaatgtcgccgcgtatgcagaccaaactgctgcgtttcctcaacgacggcaccttccgccgggtcggcgaagagcatgaggtgcacgtcgacgtgcgcgtgatctgcgccacccagaaaaacctcaccgagctggtgcagcgcggcgaattccgcgaagatctctattatcgcctcaacgtactgaccatcaccatcccgccgctgcgcgaacgtccgcaggacatcatgccgctgaccgagctgttcgtggcgcgcttcgccgatgagcagggcgtggcgcggcccaagctggcgagcgatttgggcggtttcctcagcaagtacggctggccgggcaacgtgcgccagttgaaaaacgccatctaccgcgcgctgacgcaaaccgaaggctacgaactgcggccgcaggatatcgtgttgccggagttcgaggtggagatgtcgctgggcgacgaggtgctggacggctcgctggacgacatcagcaagcgtttcgagcgctcggtgctgacgcgtctgtatcgcacctatcccagcacccgcaagctggcgaagcgcctgggcgtttcccataccgccatcgccaacaagctgcgcgagtatggcctgagcagccgcaaaggcggcgccgagggcgaagaataa

SEQ ID NO: 423789 - DNA, 504 bp, Serratia marcescens
atgactcagacagtacattttcaaggcaatccggtcagcgtagcgggcaaactgccacagcagggcgaacaggccaaggccttctcactggttgccaaagacctgtcagacgtagcgctgagcagcttcgcgggtaaacgcaaagtcctgaacatcttcccaagcatcgataccggcgtctgcgcgacgtcggtgcgtaaattcaaccagctggccagcggcctggataacaccgtggtgctgtgtatctccgccgatctgccgttcgcgcagtctcgcttctgcggcgcggaaggcctgagcaacgtggtcaccctgtccaccctgcgcggcgccgagttcaagcaggcgtacggcgtcgaaatcgccgaaggcccgttggcgggcctgaccgcgcgtgcggtcgtggtgctggatggccaggacaacgtgctgtacagcgagctggtgaacgaaatcaccaccgagccggactacgacgcggcgctggctgcgctgaaataa

SEQ ID NO: 423790 - DNA, 975 bp, Serratia marcescens
atgagagacatgcgtttttacccggaagcctggccgctgcataccgccttcgtgattgcgcgcggcagccgcaccgaagcccgggtggtggtggtcgaaatcgaacagcagggcgtgcgcggcaccggtgaatgcacgccgtacccgcgttacggcgagagcgaggaatcggtgatggcgcagctggcagagatggcgccggcgatcgcacaaggcataacccgcgagcagctgctggcgcagatgccggcgggcgccgcccgcaacgcgctggattcggcactgtgggatctggagtgccgcctgcacgggcagagcctgtggcagcgcagcggcgtggcggctccggcgcatatccgtatggcgcagaccgtcagcatcggcacgccggaagcgatggccttcgccgcgcgcgaactggagcggcagggtgccacgctgctgaagatcaaactcgacgatcactatatcagcgaacgattggtcgcgatccgcgccgcggtaccccaggcgacgctgatcgtcgacgccaatgaatcctggcaggcggaagggctggcggcgcgctgccagctgctggccgatctcggtgtggctatgctggagcagccgcttccggccggtgacgatgccgcgctggagcactttattcatccgctgccgatctgcgccgatgaaagctgccacacccgcgccgatctacctcggctggcgcagcgctatcagatggtcaacatcaaactggacaaaaccggcggcttgaccgaggcgttggcgctggcgcaggccgcgcgcgaacaagggttcgccgtcatgctcggctgcatgttatgtacgtcgcgggcgatatccgccgccttgccgctggcgccggcggcgcgcttcgtcgatctggacggcccgacctggctggcgcgggacgtcgaaccgggcctggcgttcgaatgcggggcgatcgtcgatatcgccccgtag

SEQ ID NO: 423791 - DNA, 708 bp, Serratia marcescens
atgaccgaacatcgaccgcgcagtgaacgtggccagttggccgtcgcaggagagaactacggcagctcgctgctgggcgcgccgctgctctatttcccggcggcggtcagcggcccggagaccggccttatcatcgccggcacccacggcgatgagagcgccgccatcgtgaccctgtcctgcgcgctgcgcagcatcgcccccgagcggctgcggcaccacgtggtgctggcggtcaaccccgacggctgccaactggggctgcgcgccaatgccaacggcgtcgatctgaaccgcaacttcccggccgccaactggcgctccggcgacacagtctaccgctggaacagcgcggcaccggtgcgcgacgtcaagctctccaccggcgggcgccccggttccgaaccggaaactcaggcgctgtgtcacctgatccatcgcctgaagccgcactgggtggtgtcgttccatgagccgctggcctgcatcgaagatcccgccagctcgcggctcggcgtttggctggcgcacaagttcgagctgccgctggtgaccagcgtcggttatgaaacgcccggttcgttcggcagctggtgcgcggatctgtcgctgccgtgcatcaccgccgaattcccgccgatctccgccgatgccgccagcgagcgctacatcgacgcgatgaccgagctgctgacctacccgaattaa

SEQ ID NO: 423792 - DNA, 351 bp, Serratia marcescens
atgccagtagccagaatcatcgccagctatagcgaaaatgaaaatgacaccatcacgctgctgtgcggcgtggatgctgaaaaccagatccgtcagggggaatggttcggcgtggtgaaaaatgacgacgggcgcggggacgaatcgaactatccgttcaccctgcatatcgattaccagaaagatgtcttctaccttgattacggctacgacgacgccgacgcgcgccagctgcaaaaaaccgatatttcggcccgtccgctggccgagaaaggctttttcaccgtgttcgatgaagaagaaggcgaagagttcagctaccgcatcaacagcatccacctgtacgactag

SEQ ID NO: 423793 - DNA, 1620 bp, Serratia marcescens
atgcaacgaggttttcgtttggcgctttgcgcggcggcgatcggcgcctgtatgagcagcgccatggcggcgcaggttcccccgggcaccgcgctggcggccaaacaggaaatcgtgcgccatattaaagacgaaccggcctcgctcgatccgatcaaagcggttggcctgccggaggcccagctggcgcgcgatctgttcgaagggctggtcaatcaggacgccagcgggaaagtgatccccggcgtggctacgcgctggcagaccagcgacaaccagacttatatcttccatctgcgcaaagacgcgcggtggtcaaacggtgaccctgtcacggcgaaggacttcgtctacagctggcagcggctggtagagccgaaaaacctgtcgccgttcgcctggttcgcgcagctggcggggatccagaacgccgagcagatcatcagcggcaaattgccggccgatcgcttgggcgtgtcggcgccggacgactacacgctaaaagtgcagctggacaaaccggtgccttatttcgtcagcctgacggccaacttcagcctgttcccggtgaatcaggcagtggtggaaaaatacggcaacgactggaccaaggtcggcaatctggtgggcaacggcgcgttcaaactgcaggagcgggtggtgaacgagaagttggtactgacgcctaacgatcattactgggatcatgcgcataccgtgctgaccaaagtgaccttcgtgccgatcaaccaggaatccaacgccaccaagcgttacctggcaggtgacatcgatatcaccgaatccttcccgaaaaacatgtatcagaagctgctgaaagacattccggggcaggtgtacacaccggatcagctcggcacctattactacgcgttcaacacccagcgcgcgccgaccaacgacgtgcgggtgcgccaggccttgtcctatgccatcgatcgcaagattattgccgaaaaagtgctgggcaccggcgaaaaaccggcctatcacttcacgccggacgtgaccgccgggttcaaaccggaagtgagcttgctgcaacagcaatcacaggcggagttggacgcgcaggccaaggcgttgctgcaggcggccggttacggcccgaacaacccgctgaagctgacgctgctgtataacacctcggaaagccaccagaagatcgccatcgccgtggcctcgatgtggaagaagaagctggggattgacgtcaagctgcagaatcaggaatggaaaacctacatcgacagccgcaacaccggcaatttcgacgtgatccgcgcctcctgggtaggtgactataacgaagcgtcgaccttcctgtcgctgctgacctcgacccacagcggcaacatcgccaagttcaagaacgcggactatgacaagctgctggcgcaggcggggcgggaaaccaatccggcggcggtgaccgccgattacaacaagatggagcagatcattgccgatcaggcgccgatcgcgccgatttaccagtacaccaacggccgcctgatcaagccgtgggtaaaaggctacccgatcaccaatccggaagacgtggcctacagccagacgatgtatatcatcaaacactga

SEQ ID NO: 423794 - DNA, 249 bp, Serratia marcescens
atgttacgcgaccatttaaaaataaacgccagcgatacgctggaaaaaatcagcaatatccatttgcaaaaccagggccaggaagagatcagtgagtttgtggtgaaaaacgccgccggcctgcagattggcaaggtctccgtccacgatcgtttcagcacccgacgctcgtaccccaccagttaccgcatcactcaaaccgacatgaacggccgggtggtggtggatgccatgcgggactgtctataa

SEQ ID NO: 423795 - DNA, 1092 bp, Serratia marcescens
atgccgggaagtcctgagacaaatgcgcactgcgctgcgccgagcctgacgagaatgcgctgcctgcggtgcatcgcaatggccgccctgctgctgttcggccaatcggttcgtgcagagccggtgttggagcgcctcgccacgccctatcgcgcgccgacggcggccggttccctgccttattttgtcgctcacgctcaatccccccagccgcgtaacgcactggtggtgatgcacggccatccacgcgacgccgccaggacgttgcaagcggcgatcgacgccgcgcaggacgcgggagacagcagcttgctggtcgccccgctgtttcaggtaccggtaaaactcgccgcccactgccattccgccggtctgccccagccgcaagacggcgacgccctgtggcgctgcggctcctggatcgagggcggcttggataatggcgggaagaccggttcgttcaacgccatggataacctgctggccgatctgaaacggcgctggccgtcgctgcagtcgataaccgtggccggtttttccgccggcgcccagttcatgcagcattatgtcggctttgcccagccgccacgcggagtgcgtctgcgctatgtggtggccgatcccggcagctggctctattttgatcgcctgcgccctctgcccaccagttggggaaactgcagcagtgaagaaacctgccgttttcgctggcaaacgctggacgccggccattgtccgcaggccaaccgatggaaatacggtctggaagcgtttcccgctcacctgcagcgcaccgccgacgcggcccgccggcgttacgccgccgccgatatcacctatctggccgccgccgaggataccggcgccgcgccgggcgcctactatcggatactcgacaaatcctgcgccgcccagttgcagggcccctatcgattgcagcgcgccctggcctacgccgactacgatcggcattacctggcgccggagaagccgcatcgattaacgatcgttcccggctgcgggcacaacgtcgcctgcgtattttccgccccggcggccaggcaggcgcttttccccattaatgcagactaa

SEQ ID NO: 423796 - DNA, 705 bp, Serratia marcescens
atgttacaaatcagcgccgcggatattttgaaaatcgtcttaccgaccgtcattacgctgtttatcgccgtcgtcaaaaccccttttcgcattcggcgggaaaaccgcgataagctactgaacctgctcgaatccatcgagaagcgccagagcgcccccatacgcctgttgcgatttcgcgactatctcggcaatagcagcgccggtcttactgcgctgcaactgctgctggcattgccggacagcgtagcggcgctggaacgttatcgcttcaccggtggccgccagcaaatcttgcgcgccacgtccgcgggcttcgttttgcggccaagcgccaataacgctttcaagcgtttcctgctttcgtgccgctattttttgctgtatttgctgttcgtcacgctgctggtactgttccccgcgttgactcaatggggactgcagcagtcaggggtattgattacgccccagtcactcagctatctgcctaatgcgcgcatcaccgacggctggcagctgctgttccccggcttattatttattatcattatgttcagcctggcatacctgaccttcagacagctggcacgcgcgggtaacctcagctcggaacgcgccttttatcgctactaccaacgagcgcgtgaggaacaacgatgccgggaagtcctgagacaaatgcgcactgcgctgcgccgagcctga

SEQ ID NO: 423797 - DNA, 984 bp, Serratia marcescens
atggatgtgattgaggggagcgagctgcagatcgccgatgcggtttacgcctaccagttggacggcaagggcggcgtcacgccgatcgagcaggatgacacgatcacctgcgacgcgccgtgctggctgcatcttgattacgcgcacccggccagcgccgaatggctgagcaccacgccgctgctgccggactcggtgcgcgaagcgctctccggcgaaagctcacggccgcgcgtcagccgccagggcgaaggcaccatgatcaccctgcgcagcatcaacttcaacgccaattcccggccggaccagctggtcaccattcgcgtgtacatcaccgataaactgattgtctctacccgacaccgcaaggtgtattccatcgatcaggtggtgaacgatctgcaaagcggcgccgggccgaccaacagcggcagctggctggtggaaatttccgatgcgttgaccgatcacaccagcgaatttatcgaagatctgcacgacaagatcatcgatctggaggacgctttgctggaacagcaggtgccggagcgcggccagctggcgctgatccgtaaacagctgatcgtgctgcgccgctatatggcgccgcagcgcgacgtcttcgcgcggctggccagcgaccgtctgccgtggatgagcgatgacgatcgccgccgcatgcaggacatcgccgatcgcctggggcggggattggacgatctggacggcagcatcgcgcgcaccgccatcttgtccgacgaaatcaccacggtgatggccgatgcgatgaaccgccgcacttacaccatgtcattgttggcgatggtatttctgcctaccaccttcctgaccgggttgttcggggtcaaccttggcggcattccgggcggcggcaatcctctcggttttgcggcgttttgcctgatgctgggcgggttggtgcttggcgtcgcctggtggctgaagcgcagccgctggctgtag

SEQ ID NO: 423798 - DNA, 399 bp, Serratia marcescens
atgaatatcaccccctgcctgtcccacgtctcgctgggctccaacgatttcgaggccgccgccgccttttacgatcgcacgctggccgccttgggttgtcgacgcgtgctggagcatcccggtgccatcggttacggccgcgactacccggaattttggctgcaggtgccgatcgacggccagccggcctcgcccggcaacggcacgcacgtcggttttttcgccaccagcaagcaacaggtggatgaattccatcgccaggcgctgctggccggcgccgccgatgaaggcgcgcccggttcgcggccgcactacggcgaggcttactacggctgctttgtccgtgatttggatgggcacaagattgaagccagcttctgggatgaaagcgcagcctga

SEQ ID NO: 423799 - DNA, 939 bp, Serratia marcescens
atgtcagaaaagcaatccgttagccaaaaagagcagtacaacctcaacaaattgcaaaagcgcctgcgccgcaacgtgggcgaagcgatcgccgatttcaatatgattgaagaaggcgaccgcatcatggtctgcctgtccggcggtaaagacagctacaccatgctggagatcctgcgcaatctgcagcagagcgcgccggtcaacttctccctggtggtggtgaacctcgatcagaagcagcccggcttcccggagcatattctgcccgcctacctggaaagcctgggggtggagtacaagatcgtcgaagagaacacctacagcatcgttaaagacaagatcccggaaggcaaaaccacctgttcactgtgctcgcgcctgcgccgcggcattttgtaccgcactgccaccgaactgggcgccaccaagatcgcgctgggccaccaccgcgacgacattctgcagacgctgttcctcaacatgttctacggcggcaagatgaaaggcatgccgcccaagctgatgagcgacgacggcaagcacgtggtgatccgcccgctggcctactgccgcgagaaagacatcgaacgcttctcgatcgccaaggaattcccaatcatcccatgcaacctgtgcggctcgcagcctaacctgcagcgccaggtgatcggcgatatgctgcgcgactgggacaagcgttaccctggccggttggaaaccatgttcagcgccatgcaaaacgtggtgccttcgcacctgagcgacatcaatctgttcgatttcaaaggcattcaccacggtagcgccgtggtggacggcggcgatttggccttcgatcgcgaagacatcccgatgcagcccgtcggttggcagccggaagactcggacgactcggtgcctgcgccagagcgtttgaacgtgctggaaatcaaataa

SEQ ID NO: 423800 - DNA, 3657 bp, Serratia marcescens
ttgacgatttgtcacccgccacacaaacacgataaagccgcgttcaaaccctctgttagacttttttccattactgcgaaagcgcgctttcgcggctttgagagcaatgaaaaggtaacgccgatgataactacagatggtaataatgcagtcgcttccgtggcctatcgcaccaacgaagtgattgccatctaccctatcacgccgagttccaccatggcggagcaggcggatgcctggtccggcgatggccggcaaaacatctggggcgatatcccccgggtagtggaaatgcagtcggaaggcggcgcgatcgccaccgtgcacggcgcgttgcaaaccggcgcgctgtcgacctcgttcacgtcatcgcagggtctgctgctgatgatcccgacgctgtacaaactggccggcgagctgacgccgtttgtgctgcacgtggccgcgcgcaccgtagccacgcacgcgctgtccatcttcggtgaccactcggacgtgatggcggtgcgccagaccggctgcgccatgctgtgcgccggcagcgtgcaggaggcgcaggacttcgcgctgatctcgcagaccgccaccctcaacgcgcgcgtgccgtttatccatttcttcgacggcttccgcacctcgcacgaaatcaacaagatcgtaccgctcagcgacgatacgctgcggcaaatgctgccgcaggcggcgatcgacgctcaccgcagccgggcgctgtcgccggatcatccggtggtgcgcggcacttccgccaacccggacacctatttccagtcgcgcgaagccaccaacccgtggtatgacgccaccggccagcacgtgatcgacgccatggcagccttcgccgccctcaccggccgccactatcggccgttcgactattacggccacccgcaggccgaacgcgtggtggtggtgatgggctccgccgccggcacctgcgaagaggtgatcgacaccctgctggcccgcggcgagaaagtcggcgtgctgaaagtccggctgttccggccgttctccgccaaatacctgctcgacgcgctgccggacagcgtgcgcagcgtcgcggtgctcgatcgcaccaaagaaccgggcgcgctggccgagccgctgtatctggacgtgatgaccgcgctggcggaagcctacagccggggtgagcgcgccacgctgccgcgggtgatcggcggccgttacggcctgtcgtcgaaagagttcggccccgactgcgcgctggcggtgttccgcgagctggcccagccgcagccgcgcccgcgctttaccgtcggcatcttcgatgatgtcaccgggctttcgctgccgctgagcgacgaaatcctgccgcagcgcgcctcgctggaagcgctgttctacggtttgggcagcgacggctcggtctcggccaccaagaacaacatcaagatcatcggcaacgccacgccgctgtatgcccagggctatttcgtctacgactccaaaaaggccggcggcctgacggtgtcgcacctgcgcgtcagcgaacagccgatcaactcggcctacctggtcagccgcgcggacttcgtcggctgccaccagctgcagtttatcgataagtaccaaatggtcgaacgcctgaagcccggcggcaccttcctgctcaataccccttacggcgccgacgaggtctggtcgcgcctgccgcaggaggttcaggcgctgttgcaccaacgccaggcgcgtttctatatcatcaacgccgccaagctggcgcgcgaatgccggctcggcgcgcgcatcaacaccgtgatgcagatggcgttcttccacctgacgcagatcctgccgagcgacgtggcgctgcaacagctgcaggacgccatcgcccgcagctacagcagcaagggccaggagatcgtcgagcgcaactggcaggcgctgggcgccacccgggccgcgctgaccgagatcccgctgcagccggtcgacgtcagcagcccgatgcgcccgccggtggtctcggacgccgcgccggacttcgtcaaaaccgtcaccgccgcgatgctggccgggctgggcgatgcgctgccggtttccgccttcccaccggacggcacctggccggtgggcaccacccaatgggaaaagcgcaacatcgccgaagcgatcccgatctggcagcccgacctgtgtacccagtgcaaccactgcgtcgccgcctgcccgcactccgccattcgcgccaaggtggttcagccggcggagatggagcacgcccccgcctccctgcagtcgctggatgtcaaagcgcgcgatatgcgcggccagaaatacgtgctgcaggtagcgccggaggattgcaccggctgtaacctgtgcgtcgaggtctgcccggcgaaagatcgccagaacccggagatcaaggccatcaacatggcttcgcgcctcgataatctgacggcggagaaagacaactacgacttcttcctgcagctgccggaaatcgatccggcgcagctggagcgcatcgacattcgcacttcgcagctgatcacgccgctgttcgagtactccggcgcctgctccggctgcggcgaaacgccgtacatcaagctgttgacccagctctatggcgaccgcttgctgatcgccaacgccaccggctgctcgtcgatctacggcggcaacctgccgaccacgccgtacaccaccaacgccgaagggcgcggcccggcgtgggccaactcgctgttcgaagacaacgccgaattcggcctgggcttccgtttaacggtcgatcaacatcgcgcgcgagtgctgcgcctgctgaatgctctggcgccgcagctgccggagcggttggtcaatgccctgcagatgggcgacgtggcgccggagccgcgccgtaagcagatcgccgaactgcgcacgctgttggccaatctagaaggcgaagacgcgcgccagctggcggccggcgccgactacctggtggataaatccatctggctgatcggcggtgacggctgggcctacgacatcggcttcggcggtttggatcacgtcctcagcctgacggagaacgtcaacgtgctggtgctcgacacccagtgctactcgaacaccggcggccagcagtcgaaggccacgccgctcggcgcggtgaccaagttcggcgaacacggcaagcgcaaggcgcgcaaggatttgggcgtcagcatgatgatgtacggccatgtctacgtggcgcagatctcgctgggggcgcagctcaaccaaacggtgaaagcgattcaggaggccgaggcctatccggggccgtcgctgatcatcgcctacagcccgtgcgaagagcacggctacgatctggcgctcagccacgatcagatgaaacagctgaccgccaccggcttctggccgctgtaccgcttcgatccgcgccgcagcgccgagggcaaggccgcattggcgctggattcgcggccgccgaacagcagcctgtcggaaacgctgctgaaagaacagcgtttccgccgcctgaacgcgcagcaaccggaagtggccagcgcgctgtatcaggccgccgagaaagagctgcaggagaaatacgatttcctcagcctgctggccggcaaggcggaaaaatccgccgcagagtaa

SEQ ID NO: 423801 - DNA, 321 bp, Serratia marcescens
atgtatttgacgatggcgatagtcgcggaagtgatcgccaccaccatgttgaaagcctccgagggctttacccgcctgtggccgtcgctgctggtggtgctgggctacggcgtggcattttgggggctgtcgatggtggtcaagagtatgccgctgggcatcgtgtatgcgatttggtcaggcatggggattgtgctggtgtcggtcgccgcggtatttgtttatcagcaaaaattggattggccggcgatcgtcggcatgggattaattattgccggcgtgctggtgattaatttactgtcgaaagccacggtgcactga

SEQ ID NO: 423802 - DNA, 255 bp, Serratia marcescens
atgacgacatcaaaatggctgcttgccagcgccgtgctgcttttagccgcctgcagcagcaataacgaagaaccagtacagcagggcaacagtgccagaatcaatacgttgcagaccagcgccggttgcgcggcggtcggcggcgtcaccaccatcgcgcacaacctgaacggtgaagcgctgcgcatgtgccaaatgccgaacggcaagcagtgcgaagaacgcacgctgggcctgggcagctgcgccgggtaa

SEQ ID NO: 423803 - DNA, 429 bp, Serratia marcescens
atgagaaaaaccacggtagccgcccttgcggcgctggctttagcggggtgcagcatgaaaccacatacggccgtcacgccaggcgatctgctgcatcacaacttcgtgttgcagagcgtggatggcgaaacggcgaagccaccggagggcggcggcctgctcaatctggagttcggcgagaacctgcatgtctccggtgcgatgtgcaaccgcttcttcggccaggggcaattacgcgacggcgtgctgacggtgaaaccgctggccacgacgcgcagactgtgccctgatgaacagcgcaaccgctgggatcaagtgatcggcaccgtgctggaaaacggcgccgaagtgacgctaagcgcccagcagctgacgctcaacggcagcggccacacgcttatctataccctgcgcgattgggtgtattga

SEQ ID NO: 423804 - DNA, 993 bp, Serratia marcescens
atgaaattggcgatatacagtaccaaacagtatgaccgtaaatatctcgaactggtgaatcagcagtttggctatgagctggaattcttcgactttttactcagcaaaaaaaccgccaaaacggccgccggttgcaaggcggtgtgtatcttcgtcaacgacgacggcagccgtgaagtgctcgaagaactggcggcgctgggcgtcgaaattctcgccctgcgctgcgccggtttcaataatgtcgatctggacgccgccaaagaactgggcatcaaggtagtgcgcgtgccggcctactcaccggaagccgtggcggagcacgcggtaggcatgatgatgtgcctgaaccgccgtattcaccgcgcctatcaacgcacccgcgacgccaatttctcgctggaagggctgatcggctttaacatgcacaaccgcaccgccggcgtgatcggcaccggtaaaatcggcgtggcgacgatgcgcattctgaaaggcttcggtatgaagctgctggcttacgatccgttcccgagcgaacaggcgctggaactgggcgcggagtatgtcgacctgaaaacgctgtacgcgcagtccgacgtgatcaccctgcactgcccgctgacgccggaaaaccaccatctgctgaatgccgacgccttcgcgatgatgaaaaacggcgtgatggtgatcaacaccagccgcggcgcgctgatcgactccaccgccgccatcgacgcgctgaagcagcagaaaatcggcgcgctgggaatggacgtttacgagaacgaacgcgatctgttctttgaagacaagtctaacgacgtgattcaggacgacgtgttccgccgcctctcggcctgccacaacgtgctgtttaccggccatcaggccttcctgaccgaagaggcgctgaccagcatttcgcaaaccacgctgcagaacatcagccagttggatcgcggcgaagcctgcccgaaccagttgaacgcctga

SEQ ID NO: 423805 - DNA, 291 bp, Serratia marcescens
atgattacgctcaacgtcttttttcaggtcaatccggccaagcggcaagcgtttctgagcctgctcaacaccatggtgcaggaatccaataaagaaaccggctgctctttttaccagctttggcaatgccagagcgatgagaacagctacgcgctgatcgaaaactgggacgataaggcggcgctttcagcacaccagaaaacgcctcattggatcgcctttaacgatgtcgttaacagttatttgacccatgattacgatgagcatcattacacggaaatcgctcgttaa

SEQ ID NO: 423806 - DNA, 831 bp, Serratia marcescens
atgtttaaacgtgcccagttagccgccttttgcatggtggtggagtcggagagtctcacggccgcggcggagcggctgttttgcgtgccctctaacgtgaccaagaaattaaaagagctggaaatggcgtgcggcgtcacgctgttcgagcgtgagcgcaatcggctgtcgctcacgccggaaggccgggcgctttaccataaggccaagcgctttttggctatcgaagagcgggcgcgatcgcagcttgaacaggatccggtgcagggcgaactgaggcttggcgcgctggatatcgccttgagtcatcatttgccgcaaaagttggcccattaccgtgcgcagaatcgccgcgttcagctgagtgtggtgcagggatattcgctggatctggagtttcagctgcaaaaaggggcgctggacgtggtgttttcagatgggccgatcgaacatccgcagatgcagagtcggcgtgctttccaggagcgtttggtcttcattggcggggcatgtcggccggcgttgttggcaaaaagcgatctctatgtttattcgcggcaatgccactatcgccatctggtggacgcctggctgcagaagcagcaagtcatccccgccgcgctgctggaggtggaatgctacgacgtgatatttgcctgcgtaacagcgggattaggctatgcgtttgtgcccgaaagcctggcgcggcagcgaaaggttgcatacatagaatgcgggaatgaaatgcgcagcgatatttatgctatctggcgtaaagcgagcgacagccgcatattgcacgattttattgacgccgtgattcggcattaa

SEQ ID NO: 423807 - DNA, 2613 bp, Serratia marcescens
atgaccaggcgattaaaagtattcatagggacggtggcgggctgcgcaattctggtgctggcgttgtggcaaactttgccgcgctggctgccgggcgtgttatcgcattggttgccggcgggaagccgcctggagttgcagggcaaattgcactggcgccagggcggcctggcgctggcgggggcgcgtttcaccgcgcaagattgcctgctggccaacgtcgggccgacgcggttggcttaccgccagggccgctggcagctgtcgagcgataaggtcagcgtcgatagcgcctgtttgtcaaaactgccggccggcgacgccaacagcgcgccgctggcgctcgatcagctgcagcaacagctgccgccgctggatctcaccattaatgacctgacgctggttccctggcagcgctatgccggcaagctgcagctttcctccggccctgacgggcaacgcctgcattatcaggggccgaatctcagcgccgaggcgcagctggatgaaaaacagcagctgacgttgcagagtctgaccgtcgtcccgcccaacagcgcgcaaccgctgcgtctcgccggcaagataaccattccgctggatctggccagcctgccgacgcagggcgcgctgcagggggaaatgcagaccgcctatctggaaaaaccggtattgctggacatgcgctggcaacagcggcagggcgtgttgacggtaagcgaaaaaggcgacgatcggccgctggcggtgctgccgtgggaagtcgcgccgcagcgggtcagcatcaggcagggcgagtggcgttggccgtacagcgggcagccgttgaacggcggcctgagcgttgcgctgcacgactggagcaaagggtgggatgaaacggagatcagcgcgcggctgaacgtgatcaccgccggccacaacggcaagggcaatgcggtgctcaccctcgggccgggcaaggtagggttgaccgacagcgatctgcgcttccaattgaccggtcaggccaatctggccgacttctccgccaccgcgtcgattccgggcgtgatcggcggcagcattctcaacccgacactggtgctgcagccaggggcgctgttgcgcctgtggggcaaggtgacgccggaaatgacgctggaagaggcgcgtttgccgctggcgggcgtgaaggtgaccgccgccggtatcaccggccgcctgcaggcgattctgaacgccagcgacagctattgggggcgcttcaagctgcacctggacggccaggcgcaggatttctggccggacaagggcgactggcagtggcgttactggggcaacggccggttgccgccgctgcaggccgcctgggacgtcgccggcagcgggcgctggcaggatagcgagctggtgctcgacaagctctccaccggtttcgataaattgaagtatggtttggtgacggtcgccgcgccgcgcctgagcctcaaccggccgctgcgctggcggcgtgatgaacaaagcccgcagttcaacggcgagctgcaactggcggcggataaggtcagcttcagcgacggcggccatctgccggcgccggtgctggcgctgcaggtgaacggcctttcgccggacagtttccagctgcagggcaaactgcaggcacagcagatcgggccgatcgcgctgcgcggccgttgggacggcgaacgcctgcgcggtgaagcctggtggccgaaacagtcgctgaaggtcttccagccgctgctcgcgccggatctcaatctcacgctgcgcgacggcgagttttatgcgcagtcggcgttttccgccgcccgcgagcagggcttcgaagccggcggccactgggtggtgaaaaacggcggcatgtggctgaaagacggcgagatgagcggcctggactttatcctgtcgtaccggttcaagcagcatcagtggctgctgggggccaaacagccggtgtcgctgcgcatcaagtctttcagcaacctgttcgagatgcagaacatttccgccgatctgcagggcacctatccttatagcgaagggcagccgctgacgttgagcaacgtcggcgtggacatgctcaacgggcatatcagcctgtcggcgctgcggttgccgcagcatgacgccgcggtgctgaagctggacaaggtcgatctcagcgcgctgtttaccgccctgaagccgaagcagttcgccatgtccggccgggtcgacggtgagctgccgctgttcctgaaccacccgaaatggctggtgcaaaacggctggatcgccaacgccggcaccctgacgctgcggctggacaaagacatggccgacgccatcggcagcaacaacctggcgaccggcgcggcgatcgactggctgcgctacatggaaatcaaccgttcgcacgcccgggtcgatctcgacaacctgggcgaactgacgctgagcgcgcgtatcgacggcatcaacccgcagaagaacgccaagcgcgaggtgatcctgaactatcggcatcaggaaaacgtgtttcagctgtggcgcagtttgcgcttcggcgacaatttacaggagtggctggagcaggccctctcacaacctggggagcaacaatga

SEQ ID NO: 423808 - DNA, 198 bp, Serratia marcescens
atgaaaatcatgagtgtgtcgacgctggcagcggtgctgtgcgtttcgctgctgagcggctgcgtgccgcgcatcgaggtggcgacgccgaaggatccgatcaccatcaatatgaacgtcaagatcgagcatgaaattcatatcaaggtggataaggacgtcgaaaacctgctgaaaacccaaagcggtctgttctag

SEQ ID NO: 423809 - DNA, 324 bp, Serratia marcescens
atgaaaaaacgttatttgtggctggccggcgccgcctggttgttcagcggcgtggcgatggcgttgacgctggatgaggcgaagcagcaagggcgggtgggcgaaaccctgagcggctatatcgccccggtgaagcaggacgcggaaacgctggcgctggtgaagcgcatcaacgccggccgcgccgagaagtatcaggaagtggcggacggcaaccatatcgccgtcgacgaagtggcgcgcatggccgggcagaagctggtgacgcgggcgcagagcggcgagtatgtgcgaggcatcaacggccagtggctgaagaaataa

SEQ ID NO: 423810 - DNA, 606 bp, Serratia marcescens
atgagcaacgtattggttctgaaatcaagcatcctggcgacctactctcagtctaaccaactggccgatttcttcgtagagcaatggagcaacgctcacagcggcgacaccatcaccgtgcgcgatctggccgcacagcccatcccggtgctggacggtgaactggtcggcgcgctgcgtccttccgatgctccgttgaccccgcgtcaacaagaagcgctggccctgtcggacgagctgatcgccgagctgcaggccaatgacgtcatcgtgattgccgcgccgatgtacaacttcaacatcccgacccagctgaaaaactatttcgacctggttgcccgcgccggcgtgaccttccgttacaccgaaaacggtccggaaggcctggtgaaaaacaaacgcgcggtgatcctgaccagccgcggcggcattcataaaggcaccccgaccgacctggtggaaccttacctgcgtctgttcctgggcttcatcggcatcaccgacgtggagttcgtcttcgcggaaggcatcgcctacggcccggaagtggcgaccaaagcacaggaagacgccaagacggccctgtctcaggtggtgtctgcctaa

SEQ ID NO: 423811 - DNA, 3888 bp, Serratia marcescens
gtgaaatctccgctcgaggcactgccggcccaactgggtgagctgatgctccgcgatcaacaacgtctgcgtcgtcgcctacagggcgcacgaaaaatcaaaaatcccgatgcccagttggcggtggccgccgaagtagaaagcgacatcgcggcggcgcggcaaaaagtgcaggcgcgcgccgcgtcttgcccgcgcattacctatccggaaagcctgccggtcagccaaaaaaagcaggacatattaaacgccgtccgcgatcaccaggtggtgattgtcgccggggagaccggctcggggaaaaccacccagctgccgaagatttgcctggaactggggcgcggggtgaaagggttgatcggccatacccagccgcgccgcctggcggcccgcaccgtcgccaaccgcatcgccgacgagctggaaaccccgctcggcggcagcgtcggctacaaggtgcgcttcaacgatcaggtgggagaaaataccctggtcaagctgatgaccgacggtatcttgctggcggaaattcaacaggaccgcctgctgatgcagtacgacacgctgatcatcgatgaagcgcacgagcgcagcctcaacatcgactttattctcggctacctgcgcgaactgctgccgaagcgcccggatctcaaggtgatcatcacctcggcgaccatcgatccgcagcgcttctcgcgccatttcaacaatgcgccaatcatcgaggtttccggccgcacctacccggtggaggtgcgctaccgcccggtggtcgacgacggtgacgataccgatcgcgaccagctgcaggcgattttcgatgcggtggacgagcttggccgcgaagggccgggcgacattctgatcttcatgagcggcgagcgcgagatccgcgataccgccgacgccctgaaccgcctcaatctgccgcacaccgaggtgctgccgctgtatgcacgcctgtcgaacagcgagcagaaccgggtgttccagtcgcaccacggccgccgcatcgtgctggccactaacgtggcggaaacctcgctgacggtgccgggcatcaagtacgtcatcgacccgggcaccgcgcgcatcagccgctacagcttccgcaccaaggtgcagcgcctgccgatcgaaccggtgtcgcaggcttccgccaaccagcgtaaagggcgctgcggccgcgtatcggagggggtgtgcatccgcctgtactccgagcaggatttcctgtcacggccggcgtttaccgatccggaaattctgcgcaccaacctggcgtcggtcattctgcagatgacctcgctggggctgggcgacatcgccgcgtttccgttcgtcgaggcgccggacaagcgcaacattcaggatggcgtgcgcctgctggaagagctgggggcgatcgccaccgccgacaacggccactatcagctgacgccgcagggccgccagctggcgcagttgccgatcgacccgcgtctggcgcgcatggtgctggaagcgcagaagagcggcagcgtgcgcgaggtgatgatcatcaccgccgcgctgtcgattcaggatccgcgtgagcgcccgatggacaagcagcaggcctcggatgaaaaacaccgccgcttcgcggacaaggactcggacttcctggcgttcgtcaacctgtgggattatctgcaggagcagcaaaaggcgaactcctccagccagttccgccggctatgccgcaacgatttcctcaactacctgcgggtgcgcgagtggcaggatatctacacccagctgcgccaggtggtgaaagagctggggctgccgatcaacagcacgccttccgactaccgcagcgtgcacaccgcgctgctgaccggcctgctgtcgcacattggccagaaggatgcggacaagcaggaatacaccggcgcgcgcaacgcccgcttctcgatcttccccggctccggcctgttcaagaagccgccgaagtggaccatggtggccgaactggtggaaaccagccgcctgtgggggcgcatcgctgcgcgcatcgaaccggaatggatcgagccgctggctcagcacctggtgaaacacagctacagcgaaccgcactggtcgaagtcgcagggggcggtgatggccagcgaaaaggtcacgctgttcggcctgccgatcgtcgcggcgcgccaggtcaattacggctccattgatccgctgctgtgccgtgagctgtttattcgccatgcgctggtggagggagactggcagacgcgccacgccttcttccgcgacaaccaaaagctgcgcgccgaagtggaggagctggagcataaatcacgccgccgcgacatcctggtggatgacgaaacgctgttcggcttctacgatcgccgtctccccaacgacgtggtttccggccgtcatttcgacagctggtggaagagcgcggccaaacagcagccggatctgctgaacttcgaaaaagagatgctgatcaaggacggcgccaacaagatcagcgcgctcgattacccgaacttttggcatcagggcaacctcaagctgcggctgagctaccagtttgaaccgggcaccgacgccgacggcgtgacggtgcacattccgctgccgatcctcaaccaggtggaggagcagggctttgaatggcagatccccggcattcgccgcgagctggtgattgcgctgatcaaatcgttgccgaaaccggtgcgccgcaacttcgtgccggcgccgaactacgccgaggcgttccttggccgcgtcactgcgctggaattgccgctgctggacgcgctggagcgcgagctgcggcgcatgactggcgtgaccgtgtcacgtgatgactggcagtgggatcaggtacccgatcacctgaagatgaccttccgcgtggtgggcgagaaaaatcagacgctgcgcgaaggcaaagacctggccgcgttgcgcctgcagctgaaagagaaggtgcaggagacgctgtcggcggtggccgacgatgggctggagcagagcaatctgcatgtctggagctttggccaactgccggcgttttacgagcagaagcgcggcggctattcgatgaaggcttacccggcgttggtggatgaaaaggacagcgtggcgatccgcctgttcgacagcgaaagcgagcagcaacaggcgatgtggcagggcacgcgccgcctgctgttgctgaatattccttcgccgatcaaatacctgcatgaaaagctgccgaacaaggccaagctggggctctacttcaacccgtacggcaaggtgctggagctgatcgacgactgcatttcgtgtggtatcgacaagctgatcgccgaacacggcggcccggtctggcaagaagaaggctttgcgcgcctgcaggagcagatccgcgccgagctgaacgacacggtcgtcgaggtggccaggcaggttgagcagatcctgacggcggtcttcaacatcaacaaacggctgaaaggccgggtggacatgtcgttggcgctggcgttgtcggacatcaaaacccagctcggcggcctggtctaccgcggtttcgtcaccggcaacggctggaaacgcctgccggacacgctgcgctacctgcaggcgatcgaacgccgattggaaaaactggccatcgatccgcatcgcgatcgcgcgcagatgctgcgggttgagcaagtgcagcaggcctggcagcagtggctgaataagctgccgccaaagcggcagcaggaggaagaggtgaaagcggtgcgctggatgatcgaagagctgcgcgtcagcctattcgcgcagcagctgggcacgccgtacccgatctccgacaagcgcattctgcaaactatcgagcagctttcgggctaa

SEQ ID NO: 423812 - DNA, 813 bp, Serratia marcescens
atgcgcaaatccgttttactgttgctgtgctcactcccgctcatcgctgctcaggcggcacgcgccgacgacccgtccaaggccgagcaaacgcgtctgtttttcggcaaagatgaacgcatcaaggtcacggataccaccgcccagccctggcaggccatcggccaggtcgaaaccgccagcggcaatctgtgtaccgccacgctgatctccccacacctggcgttgaccgccggccactgtgtgctggcgccgccggggcaactggataaagccatcgccctgcgcttcgtggcgggtgataaatcctggcggtatcaaaccgacaatatcgaaactctggtcgacagcaagctgggcaaaaagctgaagccggacggcgatggctggatcgtgccgcccgccgccgccgcttatgactttgcgctgatccgtctgaaagacaaaaagccgctgccgatcgcaccgttgccgctgtggcaaggcgacagcaaggcgctgacccaggccctgaaacaggccaagcggttgattactcaggcgggttacccggaggatcatctggatgacctctacagccaccaaaactgcaaggtcaccggctgggcccagcaaggcgtactgtcgcaccagtgtgataccctgcccggcgacagcggctcaccgctgctgttgaaaaccgccgacggctggcagttgatcgccatccaaagctcggcgccggcggcgaaagatcgctaccgcgccgataaccgcgccctggcggtgcccggcatccgcgaagcgctagacgccctggcggcaggcaagtag

SEQ ID NO: 423813 - DNA, 276 bp, Serratia marcescens
atgaaaaaagtattagctctggttgttgccgctgcaatgggtctgtcttccgtagctttcgctgccgaggctgccaccaccgcacctgcggctagcgcaaccaccgccaccgctgcgccggctaaagcccaggtgaaacaccacggcaagaaagccccggttcagaaagctcaggcggccaaaaagcatcacaaaaaagccggtgcgaaagccccggcccaaaaagcccaggcggctaaaaaacaccacaagaaagccagccacaaaaaggcgtaa

SEQ ID NO: 423814 - DNA, 906 bp, Serratia marcescens
atgaacgagatatcaattcgttgtggcgtgaccgaacagggcgaggtgccgctggcctatgaggactggggtgatgaggcgcacccgccgttgctgctcatcatggggatcggcgcacagcttttgctgtggcctgacgacttctgccgcgccctggtggccaagggatttcgggtgatccgctatgacaaccgagacgtcggcctttccggcaaaacgcaggcacaacgtacgcagccgttgtggctgctgatgttgcgcgcccagctcggttggcaaacgccggtgccttataccctggcggacatggcggcggacgcggcgcatctgctcgatcatttacgcattccgcaggctcacgtactgggcgcttcgatgggggggatgatcgcccaggtgctggccgccgaatacccgcagcgcgtcgcctcgttatgcatcttgttctccagcaccaatcagccgctgttaccgccgccggccccttcgctgctatggctgttggtgcgccggcctgcggccgatttgacgctgcagcagcgccacgaggggatgaaaaccttcctgcgcgcgctcggcacccgattttatccgccggaggaggcggagctggatacgctggtgacgcggttgctgaagcggggcgtggatccggaaggcatgcagcggcaactttccgcgttgctcggcagcggcgatctgcgtcgttacagccggcgcatagccgcgccgacgctggttattcacggcgatcgcgatcggctggtgcgcaaggcgggtggggttgcgatcgcccgtgcggtcgccaacgccaaattgcatatcatgccgggcatggggcatgatatgcccgcgccattgaggccgcagctggcggcgatgatcgcccgtcatgcgctgggatga

SEQ ID NO: 423815 - DNA, 1500 bp, Serratia marcescens
atgacatctgcacattccaacacgtctgcttacgatctcctgcgcgccctgttcagccggctgtcgcgtttcggccacctgtccgccatcgccggttgggacatgcaaaccatgatgccgccgggcggcagcaaggcgcgcgccgaagcgctggccgagctgagcgtgctgcagcaccagattttaacagcacaaagcaccggcgcgctgttggatcgcgcgcagcaagagacgctggacgaaatcgaccgcgccaacctgcgcgaaatgcgccgccaatatgaagacgccgtgctgctgccggccgcgctggtcgaagccaaatcgctggccggcgcgcgctgcgaacacgcctggcgcgcccagcgcccggccaacgactgggacggcttcgccgacaacctgcgcgaagtggtcaagctcagccgggaagaagcgcagatccgcgcgcaggcggccggcaccagccgttacgacgccctgctaaacctgtatgaaccgggcatgcgcagcagcgatctcgaccgcatcttcggcgatttgaaaacctggctaccggatctgctgcagcgcgtggtggccaaacaggctaacgagccctgtcaggcgccgcagggtccgttcaatgtggacacccagcgccagctgagcctcagcgtgatgaagctgctcggtttcaacttcgacaacggccgcgtcgacgtcagcgcccacccgttctgcggcggcgtgccggaagatgtgcgcatcaccacgcgttacaacgagaaagagtttttgaccgcgctgctcggcatcgtgcacgaaaccggccacgcccgctacgagcagaacctgccgcgcgatctgctcggccagccggtcgccctggctcgttccaccgctatccatgaatcgcaaagcctgctgttcgaaatgcagctggcgcgcggcaatgaattcctgaagatcttgcgtccgttggtcaccgcgcagtttggcgaacagccggcgctggaagaggccaactttattcgcctcaaccagcgcgttaaaccgggcctgatccgcgtcgacgccgacgaggtgagctatcctgcccacgtcatcctgcgctacgaaattgaaaaagcgctgatcgaaggcgatatcgaggtggaagacattccggcgctgtggaatgagaagatgcaggcttatctcggcctcgacaccatcggcaactaccgcaacggctgcatgcaggatattcactggaccgacggcgccttcggctacttcccgacgtacaccctcggcgcgatgtacgccgcgcagctgttccacagcgtgcgtcaggccctgccttcgctgagcgaagatatcgccgccggcaacctgcagccgctgttccactggttgcagcacaatatttggcgccacggcagccgtttcccgaccgaaacgctgatcgccaacgcgaccggcgaagcgctcaatccacgctacttccgtcagcatttggaaacccgctacctgtaa

SEQ ID NO: 423816 - DNA, 1305 bp, Serratia marcescens
atgagaaaacttttcgtccagttcttcctgttgctattcgtctgttttctggtgatggcgatgctggtcggcctggtgtacaaagtgaccgccgagcgcgccggccgccagtcgatggacgatctgatgaaaagttcgctgtacctgatgcgcagcgagctgcgcgaaatcccgctgaaggactggaacaagaccatcgccacgctggatctcaacctgtcgttcaagctgcatatcgagccgctcggcaaacaggagctgagcgaggatctgaaaaagcggctgcggctgggggaaatcatcgccctcgacgatcagtacacctttatgcagcgcattccgcgcagccactatgtgttggtggtcggccccattccttatctgttctacctgcatcagatgcgcctgctggatctggtgttgctggtgtttatcggcatgtcgctggcgctgccggtgtttctgtggatgcggccgcactggcaagacctgctcaagctggaaaacgccgcccagcggctcggcgccgggcatctggatgaacgcacccacttcgatcccacctccagcctgagccggctcggcgtggcgttcaaccagatggccgacaacgtcaataccctgatcgccagcaagaaacagctaatcgacggcatcgcgcacgagctgcgcacgccgctggtgcgcctgcgctaccggcttgaaatgagcgataacctgtccgacagcgagcagcaggcgctgaaccgcgatattggccagttggagtcgctgatcgacgagctgctgacctatgcccgtctggatcgtccgcaggttgcgttaaacattgaacccatcgatctgccaaagtggctcgaggacaaggtcgatgatatccgcctgatccatcaggatcgcgacatccagctcgatatcccgcacgtcggcgacttcggcggcgtcgatctgcgcctgatggagcgcgtgctcgacaacctggtcaacaacgcgctgcgctattccgaacagcggctgcgcgttggcctgtggtttgacggcgacctcgcctgcttgcaggtcgaggatgacgggccgggtattccgccggaagagcgcgaacgggtgtttgaacctttcgtccgtctcgatcccagccgcgatcgcgctaccggcggctgcgggctggggctggccatcgtccattccatcgccgtcgcccaccagggacaggtgttcgtcgaaggcagttcgctcggcggcgccagcttccgtttctgctggccggtgaagccgacattcagtttaaaagccgatctggcgtaa

SEQ ID NO: 423817 - DNA, 726 bp, Serratia marcescens
atgcataaaattgtttttgtggaagacgatcccgaagtcggcaaactgatcgccgcctatctgggcaaacacgacatcgaggtgttgatcgaaccgcgcggcgacagcgcgcaggcgcgcatcgcgcacgagcaacccgatttggtgctgctggacatcatgctgcccggcaaagacggcatgacgctgtgccgcgatctgcgccccaccttccccggcccgatcgtgctgctcacctcgctcgacagcgacatgaaccatatcctgtcgctggagatgggcgccaacgactatatcctgaaaaccacgccgccggcggtgttgctggcacgcctgcgtttgcacctgcgccaacacggccaacagccgaaagaagagtcggttcagccgctcacccagcacaatgcgctgcatttcgggctattgtgcatcgatccggtcaaccggcaggtcacgctgggcgaagaaactgtcacgctgtccacctcggatttcgatctgctgtgggagctggcgacccacgccgggcagatcatggatcgcgaggcgctgctgcaaaacctgcgcggcgtgagctatgacggtatggaccgcagcatcgatgtggcgatctcccgcctgcgccgcaagctgtacgacaacgcgctggagccgttccgtatcaagaccgtgcgtaataaaggttatctgttcgcccctaacgcctgggcatcggtgcaacaatga

SEQ ID NO: 423818 - DNA, 723 bp, Serratia marcescens
atggaacaccccaactctgccccggtgctgattaccggcggcgcgcggcgcatcgggctggcgctcgccagagcgtttctccagcgcggcgttcccgtcatcatcgcctatcgcagcgaatatccggcgatggccgagttgaaagccttgggcgcctgctgcattcagggcgacttttccacgcacgaaggcatctaccgtttcgccgaccaggtgcggcaggtggcgcccaaattgcgcgcggtgatccacaacgccagcgcctggcaggcagagtcgccgcaggtgccgccggaacaggtgatggcgacgatgctgcaaattcacgtctatacgccctatttgctcaaccaactgcttgaaacctgcctgaccggccagggccaggccggcgcggacattatccatctcaccgactacgtggtggaaaaaggcagcgacaaacacatcgcctacgctgccagcaaggccgcgctggacaatatgacccgttcgttcgcccgcaagctggcgccggaggtcaaggtcaacgccattgcgccggcgctgatcatcttcaatcctggcgacgacgaggcttatcgccagcaggcgctggcgaaatcgctgatgaaggtcgcgccgggcgagagcgaagtggtcaacctggtgaactacctgatggagagccgctacgtcaccggccgcacccacggcgtcgacggcggccggccgctgcgctga

SEQ ID NO: 423819 - DNA, 411 bp, Serratia marcescens
atgaacagcaatcaccttgcatccatcgcgcgcagtgagaaaatctgtttcgactatatggattttctgtccgcatcgtgcaggaagcactggcgctttgttgatgctatttatggtgtgatgccgatcttcggcatggtgttgaaatcgcgcgtgaccacgtcacaaacgcgcaaagagcagttgaaagagctggcgctgcaggtggtgtcaacccaggtcagcgatgaaaccaacattgtgcgcctgattgacctggcgcagcagcagggcctgacggtatttgatattcagctgccctatgcgctggaggcgcagcagctggcggccattcagaaagagtgcgcggaaggcatcgcgatcgccctggtgggtgagcgcatgaccgtcaccattccccctaaaagctga

SEQ ID NO: 423820 - DNA, 396 bp, Serratia marcescens
atgaatgaattgaatgatgagatgaaaaagatgctggccaaacagctgcctgtgcaggcgaccagcagcccgagcggcgtgcccgatatcggccccaagcgctctttgcgcctgtatgacgaccgtacgctgatttacaacgaaaataccggcggccagacgctgcaaaatatcagggaaggatcgaaaatggccgtcgtggttatcgatcgcgaggcgctggacggttaccgcttcgtcggcaccccggaactgttcctggcgggcaagccgtttgacgatgcgctggcgtttgcagaaaaaaatggaataaagccgccgaaatacgcagtgctgattcatatagacggcatttataccctgcgctccggccccaatgccgggacccggctttaa

SEQ ID NO: 423821 - DNA, 486 bp, Serratia marcescens
atggctgaaaaactgctgcacgcattacccttgtttgccgcctgggaagcgctgatcgccgagggcaacacggcattcaatcagcggcgcgatcgcctggcgatggcgcactaccagcaggcactggaggccgctcaggcgctcgtcgccgagcggccctggcaaaacgcggaatataccgaacggtttgacgcactgcatcttttcgaatccaccctggccgcgctgatcgtcacgttcaacaacatcacccatctgcgcctgcggcaaaagccgcttcgcggcgtagaaccccacgtgcatcaggcccggctcgccatcgagcaactgatggacgacacctcgctgtgcgaacagatgcagcagatcgccgaacggcacctgctgcggttccgaattgaaacgctgcaggcgctgcgcgagcaccggctgccggaaaccagcgtctgcgcgcccgcggcgaaccattccgccaccgtgcattaa

SEQ ID NO: 423822 - DNA, 1392 bp, Serratia marcescens
ttggaaaaaaaactcggtcttaccgcgctaaccgctttggtgctcagctcaatgctgggcgccggcgtgttcagtctgccgcaaaacatggcgcaggtcgccagccccgccgcgctgctgctgggttgggggatcaccggcgtcggcattctgtttttggccttcgccatgctgttgcttacgcgtttgcgtccggatctggacggcggcattttcacctatgccaaggaagggttcggcgagctggtgggcttctgctccgcctggggttactggctgtgcgccgtgatcgccaacgtctcgtatctggtgatcgtgttcgcggcgctgagtatcttcaccgatcgcggcggcagcgtgattctcggtgacggcaatacctggcaggcgctgatcgccgaatccgccctgctgtggatcgtgcacgcgctggtgctgcgcggcgtgcaaaccgccgccagcatcaatctggcggccaccctcgccaagctgttgccgctgggaatgttcgccgttctggcggcgatcgcctttaaaatggacgtgttcacgctggatttcaaaggcatcgccctcggcaagccggtgtgggaacaggtcaaggacaccatgttgatcaccctgtgggtgtttatcggcgtggaaggcgcggtggtggtttccgcccgcgcccgcaataagaaagacgtgggccgcgccactatgctggcggtgctgtcggcgctggcggtgtatctgatggtgacgctgctgtcgctgggcgtggtgccgcgcagcgaactggccgaaatgcgcaatccgtcgatggcggttctgatggtggaactcatcggcccgtggggtgacgtgctcatcgccgccggcctgatcatttccgtgtgcggcgcctacctgagctggaccatcatggcggcggaagtgccgctgctggccgcgcagcacggcgcgtttccgcgcgtgttcggcaagcagaaccgccatcatgccccgtcctcttcgctgtggctgaccaacatcgcggtgcagctggcgctggtgctgatctggctgaccggcagcaactataactcgctgctgaccatcgcttcggaaatgatcctggtgccttacttcctggttggcgcgtttctgttcaaggtggcttaccgccgccgcgacaaacgcctgatcttcgccgccaccggcgcctgcgtctatggcctgtggctgctgtacgcttccgggctgatgcacctgctgatgtcggtgctgctgtatgcgcctgggctgttggtgttcatgtatgcccgccgcggccatcgggacatcaatctgctcaaccggctggaaaagagcagcatcttcttgctgctggcggccacgctgcctgccggttggcttatgctgcactaa

SEQ ID NO: 423823 - DNA, 951 bp, Serratia marcescens
atgaagctgaagaccacgatcatcgcgtcagccttgttatcactcaccgcgctgtctgctcatgcggcgcaagagttaactcctgagaaagcagcggcgctgaagccgtttgatcgcatcacgattaccggccgcttcaatgccatcaatgaagccgtcgacgccgtatcccgccgtgcagacaaactgggtgccgattccttctatatccaggacagcaacaacagcaacaacggcggcaactggcgcgtcaccgcagacctttatcataaagatgcgccagaagtgagcaaaacaccaaaataccgcgtatttaacggcgtgaacgaactgcctaaagaggaagcctatctgctggagccttacgataccgtgagcgtcagcggtttctaccgcagccagccggacatcaacgacgctatctccaaagaagcgaagaaaaaaggcgccgcctcgttcttcatcgtgcgccaggttgacgccaactccggcggcaaccagttcgttaccgcctacatctataaggccgatgcgccaaaacgccgcgtgcagagcccggatgccattccggccgattctgacgccggccgcgccgcgctggccgccggcggcgccgctgccgcgaaagtcgaaattcctggcgtcgcgtcttccggttcgccaagccgcgaagtgggtcgtttctttgaaacccagtcttctaccggccaacgctataccgtcacgctgcctaacggcaccaagatccaggaagtgaacaacgtgaccgccgcgcagatggtgccgttcgattccgtcaccttcaccggccacttcaacagcatgaccgatgtctccaccgaagtggcgaaacgcgcggccgagaaaggcgccaagtactaccacgtcacccgccagtggcagaacaagagcggcggcaacctgaccgtcagcgccgatctgttcaaataa

SEQ ID NO: 423824 - DNA, 1530 bp, Serratia marcescens
atgcgtattggtgtaccaagagagcggttggccaatgaagcccgggtcgcagccacgccgaaaacggtggaacaactgctgaagctgggttttaccgtcgcgattgaacgcggggcgggcaaactggccagttttgaggacgtcgcctacgaagccgccggcgcggcgctggtcgacgaaagcgaagtgtggcagtcggatctgattctgaaagtcaacgcgccgcaagacgacgagatcgccttgatgcgcgaaggcagcacgctggtcagctttatctggccggcgcaaaaccccgaattgatggccaagctggcggcgcgcaatgtcaccgcgctggcgatggactcggtgccgcgcatctcgcgcgcccagtcgatggacgcgctgagctcgatggccaacatcgccggctaccgcgcgatcgtcgaagcggcgcatgagttcggccgtttcttcaccggccagatcaccgccgcgggcaaagtgccgccggccaaggtgatgatcatcggcgccggcgtggccggcctggcggcgatcggcgccgcgggcagcctcggtgccatcgtgcgcgccttcgatacccgcccggaagtgaaagagcaggtgcagagcatgggcgcggaattcctcgagctggattttgaagaggaagcgggcagcggcgacggttacgccaaagtaatgtccgaagcctttatcaaggccgagatggcgctgttcgccgcgcaggcggcggaggtcgatatcatcgtcaccaccgcgctgatcccgggtaaaccggcgccgaaactgatcaccaaagagatggtggcgtcgatgaagccgggcagcgtgatcgtcgatctggcggcgcaaaccggcggcaactgcgagctgaccgtggccgacaccattaccgtgaccgacaacggcgtgaaaatcatcggctataccgatctgccgagccgcctgccgacccaatcttcgcagctgtacggcaccaacctggtcaacctgctgaagctgctgtcgaaagagaaaaacggcgagatcgacatcgatttcgacgatacggtgatccgcggcgttaccgtggtgcgcagcggtgaaatcacctggccggcgccgccgatccaggtctccgcccagccgaaagcggcccccgccgccgcaccggccgccaaacccgaagccaaaccgacctcgccgtggctgaagtacggcctgatggctctggcgatcctgctgttcggctggttggcggacgcggcgccgaaagagttcctgtcgcactttaccgtgttcgcgctggcctgcgtggtcggttactacgtggtctggaacgtcagccatgcgctgcataccccgttgatgtcggtcaccaacgcgatctcagggattatcgtggtcggcgcgctgttgcagatcggccatggcggctgggtgagtttcctctcctttatcgccgtgctgatcgccagcatcaatattttcggtgggttcaccgtcactcagcgcatgctgaagatgttccgcaagaactaa

SEQ ID NO: 423825 - DNA, 1395 bp, Serratia marcescens
atgtctggaggattggttacagctgcatacattgttgccgctattttgtttattttcagcctggcgggcctgtcgcgccatgaaacgtcgaagcagggcaacctgttcggcgtcgccggcatggcgatcgcgctgatcgccaccattctggggccggattccggcaacgtcggctggatcatcatcgccatgatcatcggcggctcgatcggcgtctatctggccaggaaggtcgagatgaccgaaatgccggaactggtggcggtgctgcacagcttcgttggcctggcggcggtgctggtcggcttcaacagctacctggatcacggcgcgccgatggagccggtgatggcgaacatccatctgaccgaagtgttcctcggcatctttatcggcgcggtcaccttcaccggttcgatcgtcgccttcggcaagctgcgtggcatcatctcttccaagccgctgatgctgccgaaccgccacaagctgaatctggcggcgctggtgatctcgttcctgctgctggtggcgttcgtgcgtaccgacagcgtgggctggcaggtggttacgctgctgctgatgacggcgatcgcgttggcgttcggctggcatctggtggcctcgatcggcggcgccgacatgccggtggtggtatcgatgcttaactcctactcggggtgggcggccgccgcggcgggcttcatgctgagcaacgatctgctgatcgtcaccggcgcgctggtgggttcttcgggtgcgatcctgtcttacatcatgtgcaaggcgatgaaccgctcgtttatcagcgtgatcgccggcggcttcggcagtgacggttcgtccaccggcgacgccgaagagatgggcgaataccgtgaaaccacggcggaagaggtggccgagcagctgaagaactccacctcggtgatcatcaccccgggttacggcatggcggtggcgcaggcgcaatatccggtggcggaaatcaccgagaaactgcgggcgcgcggcgtgaaggtgcgtttcggcattcacccggtcgcggggcgtttgccgggccacatgaacgtgctgctggcggaggcgaaggtgccgtacgacgtggtgctggagatggatgaaatcaacgaagatttcccggataccgacaccgtgctggtgattggcgccaacgacacggtgaacccggcggcgctggaggatccgcgcagcccgatcgccggcatgccggtattggaagtgtggaaggcgcagaacgtgatcgcgttcaaacgctcgatgaacaccggctacgccggcgtgcagaacccgctgttcttcaaggagaacactcagatgctgttcggcgacgccaaagacagcgtggaagcgattctgcgggcattgcagaagtaa

SEQ ID NO: 423826 - DNA, 963 bp, Serratia marcescens
atggcgaagtatcagaatcttctggtggctattgaccccaatcaggacgaccagccggcattgcgccgcgccgtgtacctggtgaaacggaacggcgggcgcatcaaagccttcctgcccatttatgacttctcttacgaaatgacgaccctgctctccccggacgaaagaacggcgatgcggcaaggtgtgatcagccaacgcgccgcctggatcaacgagcagtgccgcttctatctcaacgacggcgtgccgatcgaaatcaaagtggtctggcataaccgccccttcgaagccatcattcaggaagtgctttccggccagcatgatctgctgctgaaaatggcgcaccagcacgaccggctggagtcggtgatcttcacccccaccgactggcacctgctgcgcaaatgcccttgcccggtgtggatggtgaaagaccagccctggccggaaggcggtaaagcgctggtggcggtcaacctggccagcgaagaaccctatcacgatccgctcaatatcaaactggtgcaagaaaccgtcgaactggcgcagaacgtcaaccagaccgaggttcacctggtcggcgcctatcccgttactccgatcaacatcgccatcgagctgcccgatttcgatccgagcgtctacaacgacgccatccgcggccagcatctgatcgccatgaaggcgctgcggcagaaattctgcattaaggaagagttcacccacgtggaaaaaggcctgccggaagaggtgatccccgatctggccgaacacctgcaggccggcgtggtggttctgggcacgctgggccgcaccggcatttcggcggcctttatcggcaacaccgcggaacatgtgatcgaccatctgaaatgcgatctgctggtgattaagccggagaacttcaactgcccgattgagacggatgaagacgatgagcacgacgacgaagattaa

SEQ ID NO: 423827 - DNA, 765 bp, Serratia marcescens
atgatcccggaaaaacgcgtgattcgtcgtatccagtctggtggttgtgcgatccattgccaggactgcagcatcagccagctgtgcattcctttcacccttaatgcccacgagctggaccagctcgacaacattatcgagaggaaaaagcccatccagaaaggccagaccctgttcaaggccggcgacgagttgaagtcgctgtacgcgatccgttccgggaccatcaaaagctataccatcaccgagcaaggcgacgagcagatcaccggcttccacctcgcgggcgatctggtgggcttcgacgccatcggcggtctgaagcacccgagttttgcccaggcgctggaaacctcgatggtgtgtgagatcccgttcgaaaccctcgacgatctgtccggcaaaatgcctaacctgcgtcagcagatcatgcggctgatgagcggcgagatcaaaggcgaccaggacatgatcctgctgctgtcgaagaaaaatgccgaagagcgcctggcggcgttcgtttacaacctgtcacgccgcttcgcggagcgcggcttctcaccgcgcgagttccgtttgaccatgacccgcggcgacatcggcaactacctcggcctgacggtggaaaccatcagccgcctgctgggccgcttccagaaaagcgaaatcctcagcgtgaaaggcaaatacatcaccatcgaaaacgccgacgccctgtcggtgctggccggtacgccgcgcatcaacgtgtccgttaacgcctga

SEQ ID NO: 423828 - DNA, 525 bp, Serratia marcescens
atgcagacttttttgattgatcgtaccgccacgccggtgggagaactggtgctgattgccgatgaacaggggcgcctgcgggcgattgactggaccgatcacgaagcgcgcctgatgaagctgctgaatacccactaccgcgccgatcgcttcatcctgcgcgagcagcgcgatcccggcggcctgaccgatgcgatgcaacgctatttcgccggtgagctgagcattatcgatcggctgccggtgatgaccgccggcaccgagttccaacgcaccgtatggcaacagctgcgccaaatcccgtgcggcgagatcctgacctacggccagctggcgcaacgcatcggccgtccgaccgcctcgcgcgcggtcggcatggccaacggttcgaatccgatcagcatcgtggtgccctgccaccgggtgatcggttcgcagggcgcgctgaccggctatgccggcggcgtacagcgcaagcagtggctgttgcagcatgaaggctacctgccgaaaagtttgctgtag

SEQ ID NO: 423829 - DNA, 312 bp, Serratia marcescens
atgaaccattacttagccgtattaagcgcattggtcattctgcccttcgctctgcaagcaaaaccgctttccggcagccaggtcgcctccggcgtcgtgcgcttcaccggcgccattaccaccccggcctgcaccatcacacatcaggatgaacagcttgtctccaactgcttcggtaaagtgacggaatatcagaacggatatatttcctcttcgttaaaagagatgccaaaagaattagtctctgccgtcaccagcgaaatagtgaataacgatccccatttaaagcgcgtgaccatcagctataagtaa

SEQ ID NO: 423830 - DNA, 855 bp, Serratia marcescens
atgtatctgatagccaaccgagaaatgctgctcaaggcgcagcgtcagggttacgccgtcccggcgtttaacgtccacaatctggaaaccgtgcaggtggtggcggaaaccgccgccgaactgcgctccccggtgatcatggccggcacgcccggcaccttcagctatgccggcaccgactacctgatcggcatttgccaatctgccgcgcaccgctacgatctgccgttggcgctgcatctggatcatcacgaagcgctggacgacatcgagcacaaggtgaaaagcggcatccgctcggtgatgatcgacggttcgcatttgccgttcgagcagaacatcgccaaggtggccgccgcagtggccctgtgccatcgctacggcgccagcgtggaagcggagctggggcgcctgggcgggcaggaagacgatctgatcgtcgatacggcggacagcttctataccgacccggcggcggcacgcgagttcgtcgccgccaccggcatcgattcgctggcggtggcgatcggttccgcccacggcctgtatcacggcgagccgaagctggacttcgagcgcctggcgctgatccgcgaacaggtggacgtgcccctggtgctgcacggtgcctccggtattccggaagagatggttaagcgcgcgatctcgctcggcgtctgcaaggtcaacgtcgccaccgaattgaaaatcgcctttgccgatgcggtgaaaagctacttttcacagcacccggatgccaatgacccgcgcaaatacatcgtccccggcaagctggcgatgaaagaagtggtggcggaaaagatccgcatctgcggcagcagcggtatgctgtaa

SEQ ID NO: 423831 - DNA, 1167 bp, Serratia marcescens
atgaacgcgtatttctcttacgaggcggattggctgaagcagcgcaacgcctggcacaccgccgcagagatttggcagcagccggatctgtgggccgcgctgcaccggcaattgcaggatcaacaggcgcagtggcagccgttcctggcgccgctgctggccaatccgcgcctgcaaatcgtactgtgcggcgccggcagctcggcgttcgccggccgcgccctggcgccctggctgcgcgaacgaaccggccgcaacgtggcggcctacggcaccaccgatatcgtcgccaatccgttgcagtatctcgaccctgagcggccgacgctgctggtctccttcgcccgctcgggcaacagcccggagagcgtggcgacggtggagctggccgaccagctgctgccggaaagctatcacctgatgctggtctgcaacccggacagccggctggcgcagtatgcgcatcggcgggataacgtctgttcgctggtgatgccgcaaggctccaacgatcaaagcttcgccatgacctccagcttcagctgcatgatgctgagcgccgcgctgttgctcggcccggcttcgctcgaggccgcccaggcgccgctcaacgccatggtgcagcgctgccgtacactgcgcgaaacgctgcagccgcaggtgaaggcgttggccgccagcggtttcctccgttatatcaccctcggcggcagctgttttaccggcctggcggaagaggcctcgctcaagatgctggagctgaccgccggccgcatcgttacacgctacgactcgccgctcggcctgcgccacggcccgaaattcatggtcgacggccagacgttggtggtgctgatgttctcccgcgacgactacgcccgccagtatgaccgcgatctgtggaacgaactgcagcgcgacgggctggcgatgcagttggtcgggttgaccggcgagcgccaacccctgtccgatgccctgctgtatatgcacgacgcggccgatgatatctggctgctgttcccgtatctgctgttcacccagatgctggccttcgagagttcgctgacgctggggctgaccccggacaatccttgcccgaccggcgaggtcaaccgggtggtgaaaggcgtgacgatttaccgttttccttccccggtgctgtaa

SEQ ID NO: 423832 - DNA, 1722 bp, Serratia marcescens
atgttcagcctggattctctgttgcaagatgcatttccacaccgcaatacccctgcctggcagcgcagcctgctaagaacccttctcttcgaaaaagaattcaaacagttcgccgccgactatccccacctgaaagggctcgatctgatcgagcaggtggtggactacttcaacctcagctgcgagctggtggacggcgatctggaaaacatcccgagccaggggccggtggtgctggtggccaatcacccgatcggctcgctcgacggcctggtgctgctgcgcgccgtcgcggcggtgcgcccggatgtgaaagtggtggccagccagctgctgacctacatcgaaccgctgcgcaacctgttcgtgccggtggataacgtcgcttataaaaccagccgcaaacagattgaaggcatgcagcggcagctggacaatcagggcgcgctgatcctgttcccggccggcgaagtgtcgcgcatgagcccgaaaggcatccgcgacggccactggcataccggttttctgcgcctggccgccaaggcgcgcgcgccgatcgtgccgatccacatcagcgcgcgcaacagcaacctgttctactttacctcgctggtctaccggccgctgtcgacgctgctgctggtgcgcgaaatgttccagcagcggggcgggcgcatcaagatccgcgtcggcggccgcgtgccgttcgccagctggcacgacggccacaccagcgccaaggatctggcggagcgttttcgccgccacgtgtatcgcctggggcagggcaagccggggctgttcgccagcgaatcgccgatcgcgctaccggaagagcgtttggagctgaaaaaggcgctggcgaactgcgagcggttgggggtaacgccggacggtaaaaccatctacctctatcgccgccacgacgaagcgcgcacgccgatcctgcgcgaactggggcgtctgcgcgagatcgccttccgcgcggtaggagaaggctccggccgccgccgcgatctggacagctatgacgacgattactaccacctggtgctgtgggatgaggaggagctggagatcgtcggcgcctatcgttttatccccaccgccgaacaaatcgcgcgcaaagggctggaaagcatctacagcaacagcctgttccactacgatcgtgatatggagccgatcctggcgcaggggatcgagctggggcgcagcttcattcagccggcctattggggcaagcgcgggctggactatttgtggctgggcatcggcgcctacctggcgaaatacccgcagtatcgctatctgttcggcccggtgtcgatctccggcggcatgccgctggcggcgcgcgatttgctgatcgccttctatcggctctatttctcgccggaccacgccttcgcgcaatcgcgccggccttatccggcgtcgctgccgcaggtgctggcgcagtttgccggggataactaccaggaagatctggtgcggctcaagagcctgctcagcaatatcggctgctcgatcccgacgctgtacaagcagtacaccgaactgtgcgagccgggcggggtacagtttatcgacttcggcaccgatccggctttcaacaactgcatcgacgggctggtgctggtggataccacgcggctcaagccgtcgcggtatcagcgttatatcgcggtgcaccagccgcagccagccgagacggcatga

SEQ ID NO: 423833 - DNA, 783 bp, Serratia marcescens
atgcctcactcgtttatcccgccgttattgtccgccgacgaaccctctgccgccgccgttgaaatcccgcgcggcaaagcgccctttttgctgctgtgcgatcacgccggcaaggcgatcccgcaatccctcggcgacctcggtttgccgccgggggagatcgaacgccacatcggctgggacatcggcgcgctgagcgtgtcgcgccatctgagccgccaattggacgccacgctgatccaccagcgttactcacggctggtgatcgactgcaaccgggcgcccggcatcgccagctcgatcccgcatttgtccgagctgacgccgatccccggcaatatcggtatcgacgccgagcacgcgctggcgcgcgagcgcgaggtgtttttgccgtatcaccacgccatcgacgatcatctggggcaacgccaactgcgcgaactgccgacggcggtgatcgccatgcacagtttcacgccggtgttcaaaggggcatcgcgcccctggcaggtggggctgctgtttaaccgttacccggaatttgcccatctgctggccgagctgctgcgcgaagagggagatttgcaggtggggatcaacgaaccctatgcgatgaccgatgccaccgactacacgttgccggtccatgcggaacgccgcggtttgccttatgtcggcatcgaaatccgccaggatctgatcgccgacgaacgtgggcaacaggcgtgggcgaaacgtttcgcacgcctgctgccgcaggcctggcagcgctggcaaatttga

SEQ ID NO: 423834 - DNA, 714 bp, Serratia marcescens
gtggagcacagcgataacggactgttcatcaaacgggagcgttttgaagttctggcgattctgcgtgaaatttgcaaacaacgcacgccgctgcgcgtagaaaatcagcagcaccggtttcaaagtctgttattgagcgtcgggccggacaatatcgtgtttagcggtgaggaagcggaaaacgccatcgacggcgcctgcaccatcgtgattgaaagcaacgacgccaaaatcgagttttccgtcggccaggcggaactgaccgaacatcagggcgtccaggcctgctcgacccggctgccgcaggagttggtttacatccagcgccgccgccagttccgcatcaccacgccgcactggcgccaattcttctgtaccggcgaatacccgaacggcacgccttatgagctgcggatccacgatctgtccgccggcggcgtcggtttgcgtttcgacggcccgctgccggatttcttccagccgggcctgcagttcaagaaagcggagttggatttgggcagctacggcagcttcaaggtcaacatggagctggtggtggtcaacgacgatcaggaaaccgacgataacgatcaggtggtgcacttctcgcgcttgtcatgccgcttcctcaagctggggctggcgatggagcgcaaaattcaaagcgcggtgttcgccttcgagctggatttcaacaaaaagaaaaaacgctga

SEQ ID NO: 423835 - DNA, 843 bp, Serratia marcescens
atgcaacagacttcacccttgcgatcaccgtccatcgacgtgatcagcattcaatctcaggtggtctacggcagcgtcggcaacggcatcgcctaccgcgccctgctgaaaaaagggctggaagcgctgcaggtgcccagcgtgctgttcggctgcccgccctattacggcaagccgcacggcggcgtcatctccggcgagtggttcggcggctttctcgacgatctgatcgcccgcggcgtgatgaagcgcgcccgggcggtgatcgtcggctatctaggcgacgtgatgcagtgccatattctggccaactggctgcagcgggtgcgcgccctcaatccgcagataaagatctatatcgatccggtgatgggcgattacggtgaagggatctacgtggatgagcgcatcgtcaactgctatcgctcaccgttcctgcggctggccaacggcctgacgccgaacggtttcgaactggagcagctgtgcggccggcaactgagcagccaagagcagacgcagcacgccgcgcaggcgctattgaacgacaccaccgaatgggtgctggtcaccagcgcgccgggcgtggcgcagcacgaagacgaagtgggattgatgctggtcacccggcaggaaacgcagtgctttacccatccgaaggtcaaatcggcggtcaaaggcaccggcgatctgttcgccgcactgctggtaagccatctgctgcacggcgccgcgcttgacgcagccgtggtcgccgccggcggcgaagtgtgcgacgtgctggccgaagcggcgcatttcggttgggaagagatcggcagcctgcgggcgttacagtcgtaa

SEQ ID NO: 423836 - DNA, 717 bp, Serratia marcescens
atgaagaaagccgtcgccattcgacacgtcaattttgaaaacctgggcatcctcggttccctgctctcgctgcgcggctatcagatcgactattacgatgccggccgcgatgatattcgtgctatcaataatgaagagaccgatctgttggtggtgctcggcgggccgatcagcgccgcccaacacttttccggcgcgcagcgctatgattttctcgaccatgaattggcgctggtcaaacagcggctggcgcagcggcggccgacccttggggtgtgtctcggcgcgcaggtgatcgcccaggcgttgggcgccgacgtgatctcgctcggcgtcaaagagatcggtttcaccccgctgaccacgctcacggcgcaagacgactcggtgctggcaccgctggccgatacgccggtgctgcattggcacggcgatatgttcacgatcccggagggcgcccgctgcctggccggcacggcggtttgcccgcatcaggccttcgactatcaggggttcgcgctcgggctgcagttccatctggaggcggatcatcgcgatatcgaacgctggctgattggccatgcctgcgaactggaactggccggcatcgcgccccagagcctgcgcgaacaggcggcgcgccacggcgcacagctggaacagcgcgcgcggcaggtgttcgcccgctggctggataataacgaaccaaggatgtaa

SEQ ID NO: 423837 - DNA, 255 bp, Serratia marcescens
atggataaacattacgtgctcgacattcagtatgcaggaaaggcctttgcccgcctgcagatgttcacgccctgggcggccgatcagctggagcaggcttgcgcgctgttcccggccgcgcagggttatcaggtgcagctcagccaggtcagcgaacgccgcatcgtctaccagagcggcgcgcaaggcatcgcggtgctgggcgagtcgctggcgctgacgccgttcacccacgctcacgaggttaaacaatga

SEQ ID NO: 423838 - DNA, 1305 bp, Serratia marcescens
atgacttcattgtatgcaaaaggcggcggcgctgtccagattgccgagcagatcgccgcacgcatcaaagacggcgcgctgcggccgggcgagctgttgccgccggtacgccagctagcggcggagctggaggtcaatccgaataccgtcgccagcgcatacgcccgattgcgcgatgccggtctggtggtgacgcgcgggcgggcgggaacggtggtgctggagccgccgctggcggcggtgagtgcggcctatgcgccgcgccaggtgccggcggggatgtgcgatctggccagcggcaacctcgatgccgcattgttgccggcgttggcgctgggcgcggcggaggcgttcccgcagcaaaacggctatgacatcagcggcgatctgccggtattgaccggcctggggcgcgagtggctcggccgccagggcgtcacgctgggggaaccggcggtgttctccggcgcgctggacgcgatggaaaaggcgctgcgctgccatatgcagccgggcgcggcggtgtgggtggaagatccctgctggccgccgctattgacgctgctgcgccacctgcgtctgcggccgctgccgctggcgatggatgaacaggggtgtcggttgccggaaagcggagcggcgggcgcggtgatcctgacgccgcgcgcccacaatccgaccggcgcctcgctctctgcgcaacgcgcgcagcagtggcggcgttttctcagcgcgaatccgcagtgtctggcgatcgtcgacgacttctgggggccgctgtcgcagcagccgttgcatctgccgttcgacggcgatcgcgggctgtacgtgctgtcgctgagcaagtttctcagcccggatctgcgcatcgcgctggcctgcggcaacccgacgttgctgcaggcaatgcgcgccgatcagtacatcagcgagcgctgggtcagccatatcttgcagcagatcgccgccaggctgtgggggcaggctttgcaggaagggcagctgcagcgggcgcagcaggcgtatcaggccagaagggatgaactggtgcaacggctcaacgcgctgaatcacacggcgctggcggtaggtgaagggctgcacctgtggttgccggtgcgctcggaaaccgccgccgcgcagctgatggcgcagcgggggtggctggtgcagggcggcgagccctttcgtctgaagagcgatcctgcgatccgcgtcagcctggccaacgtggcgccggcgcagctggcggttctggcgcaggatctggccgacgccatgcgggccagtacggcgatcaactag

SEQ ID NO: 423839 - DNA, 987 bp, Serratia marcescens
atggcttatgccttgagcatattggaaaagagtccgatcgccgacggggaaagcgccgcccaggcgctggcgcgcacgctgcatctggcgcaacaggcggaacgctggggctatcggcgtttctggctggcggagcaccacaacacgccgcagctcgcctgcccgtcgccggaagtgctgatcggctacctgctcggccagacgtcgcgcattcgcatcggctccggcggcgtgatgctgcaacactacagcgcctacaaggtggccgaaaactttaacctgctggcggcgttggcgccggggcgcgtcgatctcggggtgggcaaagcgcccggcgggctgccgctcgccacccaggcgctgcaggccgcccatgaccggcaacacaaaccggctttcccgcagcagctgtcgcagctgaccgcctatctgaacgacgacgccgagcccggcctgagcgccacgccgctgccgccgcacggcgctcagcgcttcctgctcggcgccagcaaagagagcgcgacgctggcggccgaatccggctggattttcgtgttcgccgcgcatctgaacggcaatccgcaagatatcagcgcggcgctggcgcactacgccgcacacagcggcggccgcaaggcgctgctggcggtagcggcgatcgtggcgccaagcgcggaacaggccgcggcgctggcggcggatatacagcaataccgcgtccacgtcgccggtgagcagagcgtgaccgtcggcagcctggcgcaggccgagagtttcgtgcagcaggccggcgccaccgactaccgcatcgagccgcgggaaagccatatccttctcggcaccgcgccgcaggtgcatcagcaactggcgcagctgcagcagcggtacggcgtggacgagttcatcatcgacacgccgatcggcgaaccgagcgcccggctcacctcactgcagctgctggcggaggagagcctgacgccggcctag

SEQ ID NO: 423840 - DNA, 837 bp, Serratia marcescens
atgcttttatctcacgcttttctccgtctgcccgcccggcgcttcggcgccgccctcctgttcagcctgctgttcgttttggcgcccgtgcatgccgctgcgccgccgctggtgctgaacgccaaatcggtgctggtcgtcaatcaacgcaccggaaagacgctctatcagaagcagccgaaccgcgtgctgccgatcgcctcgctcaccaagctgatgaccgccatggtcgccctggacagcaaacgcccgatgggcagcaggctgaaagtcaccgccgccgatcgcgatctgctgaagaaaacccactcgcgcctgaccatcggctcggtgctcagccgccgcgacatgctgcacatcgccctgatgtcttcggagaaccgcgccgctgcggcgctgagccgcagctatcccggcggacgcaaggccttcgtggcgaaaatgaatcagaaagcgcgcaccatcggtatgaaacgcgcacgcttctacgatccgaccgggctgacgccgcgcaatgtggcgaccgccaacgatctgctgaagatggtcaatcacgcctatcgctatcaatcgattcgccgcttcagcaccgacaagcagcagatcgtgcgtcctggccgaggccagttggtctaccgcagttccaacggcctgatcaacaacccagcctggaagatccagctgcagaaaaccggctttaccgacgaggccggccactgcctggtgatgcgcaccaccatcaaagggcagccggtggtgatgatcctgctcggcgcgcagtcgcgctacggccactaccgtgacgccattcgtctgaaggcctggctcgaaggataa

SEQ ID NO: 423841 - DNA, 426 bp, Serratia marcescens
atgcgccagcgcatcattgtctgcccgctgattgaaaacgataacgccttcctgctgtgcaaaatggcggcgcacaagggcgtgttccccggccagtgggcgctgtccggcggcggcgtcgagccgggtgaacagatagaacaggcactgcggcgcgaagtgcgcgaagagctgggcgccgcgctgatcctcgacggcatcacgccctggaccttccgcgacgatgtgcgcatcaaaacctatgccgacggcagccgggagcaaatctatatgatttacctgattttcgactgccatgccgccaaccgcgacgtgacgatcaacgacgagttcgacgactacgcctgggtgccgcgcgagcgtctcgcggactacgatttgaacgaggccacacgcttcacgctgcaacaaaagggattgttgtaa

SEQ ID NO: 423842 - DNA, 915 bp, Serratia marcescens
atgaccatgcatgaagtcaaccgcgatgacggtttcaaccagcgcctgctgcaagagttttacgacagctacgacgaagagctggaaatggagctggacgacctgcgcttcgacgcggcagaagtcgacagcgacgcgaagaaagcctggcgcaagcaatacttccgcgagttgctgcgcctgcagggcgagctggtgaagctgcaggattgggtgatgcgcaccggccaccggctggtgataatcttcgaaggccgcgacgccgccggcaagggcggcgtgatcaagcgcatcacccagcgcctcaacccgcgcacctgccgcgtgtcggcgctgccggcgccgaacgatcgcgaacgcacccagtggtattttcagcgttatatcgcgcatctgccggccgccggcgaaatggtgctgttcgaccgcagctggtataaccgcgccggcgtggagcgcgtgatgggcttttgcaacgacgaagagtatgaggagtttttccgcagcgtgccggaattcgaaaaaatgctgacgcgcagcggcatccaaatcgtcaaatactggttttcaatcaccgatgaggagcaggagctgcgtttcctcagccgcattcacgatccgctcaagcagtggaagctcagcccaatggatctggaaagccgccgccgctgggaggactacaccgaggccaaagaaatcatgttagcgcgcactaacattgccgaagcgccctggtgggtggttcagggcgtcgacaagaaaaaggcccgtctgaactgcatcacccacctgttgcagcaggtgccttatgaggaagccgaaggcaacgtcatcacgctaccgcagcgcaaacgcagcccggaataccaccgtagcccggtgccggacaacatggtggtgccggaaatctactga

SEQ ID NO: 423843 - DNA, 1611 bp, Serratia marcescens
atgagcgataacagcgccgttcaaccggacatgccggccgcctccagcctgcccaaactgcatcaaaagaacagtcgactcactgttcttttttttgtgttcttattaattctggggatcgcgttcgccggggtgaacttatttaacgacgtcagcgacgccggcgccgtctataccagttacgttccgtttttattattggggctggcgctattgatcgcgctgggctttgaattcgtcaacggcttccacgataccgccaatgcggtcgcaacggtgatttacactcattcgctctcgccgatggtcgccgtggtgtggtccggtttcttcaactttctcggagtgttgctctccagcggcgtggtggccttcggcatcatttcgctgctgccggtcgagctgatcctgcaggccggcaccggcaacggtttcgccatggtgtacgccctgctgttctccgccatcatctggaacctcggcacctggtggctcgggctgcccgcctcgtcgtcgcatacgctgatcggctcgattatcggcgtcggcgtagccaacgccctgatccacggccgcaccggcaccagcggcgtggactggggccaggcgatcaaggtgggctacgcgctgctgctgtcgccggtgatcggcttcgtgttcgccggcctgctgctgctggcgctaaagctgttcgtcaagaaccgccagctgtacagcgcccctaagggcaataccccaccgccgctgtggatccgcgggctgctgatcctcacctgcaccggcgtttccttcgcccacggttccaacgacggccagaaaggcatgggccttatcatgctgatcctggtgggcaccatgccgatcgcctacgccctgaaccgttcgatgccgccggagcagattccccgggtggcggcgctggcggaggtgacccaaaaccagctgctgcgccagttcccggccggcggccaaacgccgccgcgcgaggtgctgaccggctatgtgcgcaccagcgagctgacgccggaggtggtgccggcgttggcgcagctggccggcgcgatcggcgatcaaatccgtcagtacggctcggtcgacaagatcccggcgcaggcggtgtcgaacacccgcaacgacatgtatctggcgtccgagaccatcaagcacctgaaggcagagcatcagctgcagatcaatcccgacacgcagcgcaacctcgacgcgctgaagggcgaactcgacaacgccacccgcttcattcccttctgggtgaaggtggtggtggcgattgcgctggggctcggcaccatggtcggctggcgccgcatcgtggtgacggtgggcgaaaagatcggtaaatcgcacctgacctacgcccagggcgccagcgccgaactggtggcgatgaccaccatcggcgcggccgacgccttcggcttgccggtttcgaccacgcacgtcctgtcgtccggcatcgccggcaccatggccgccaaccgctccgggctgcagatggccaccctgcgcaatctgctgatggcctgggtgctaaccctgccggcctcggtgctgctgtcggcggtgctgtactggatcttcaaccatttctaa

SEQ ID NO: 423844 - DNA, 1029 bp, Serratia marcescens
atggtgcaacggttagcggaaaagatgcacaagctggattttgatgatgaagtaaccgggctgatctacggccatgtgtttcgttccggtgagccgccgaggcgcctgaactcgcagcaggtctgccaggcctaccagacgttgccgcccggcgacggttttatctggctgcacctcaatctcaaccacgcggcggcggagaagtggttgaaaaatcatttcgccatttccgattttttcttccacgagattcgccacggttcgcacaccacgcgcattgagcgccagggcgacgatctgttcgcggtgctcaacgatgtgatcttccaccctgaggagagcaacccggaaacggcgacgctgtggctctattgctgccgcgggctggtggtgaccgtgcgccataaaccggtgcggctgattgaacggctgctcggccgcctgacggcgctgcagctggcctcgtctaccgaactgctggcgcacctgctggaagagcaggaggacgtgctggagcaggtggtgcggcaggccaaccagtatgtcgataccattgaggatcgcctgctgacgcgccgcgtcaaacgcaatcgcaccgagctggggcgcatgcgccgcatgctgctgcgctttcagcgcctgttggcgcccgaaccggccgcgctgtttcgcctgttgaaccggccgccgacctggctgagccgtgaggtggtgcaggatctgcggcagtttaccgaagagttcaccgtggtgttgaacgatctcgccagcctgaccgaacgcatccggctgctgcaggaggagctgggcgccaagctgatggagcagaacaaccgcacgctctacacgctgacggtaatcaccgtgctggcgctgccgatcaatatcgtcgccggtttcttcggcatgaacgtgggggggatcccgctggccagcaatcaccacggttttatcctgctggtgttgctggtcggcagttttacgctgatcgccggttatctggcgttcaggcgcagggacgagtcgtaa

SEQ ID NO: 423845 - DNA, 534 bp, Serratia marcescens
atgaatgattacggcatgattatcgaacccggtacgctgcgcatccagcggctgctgcccggccccatcgagcgggtgtgggcttacctgaccgaatccgacaagcgcgccacctggctggcggccggcgccatgacgttggagaacggcgcgccgctggagctggaatttcgcaactccgatctggcgggcgagcacgaacccccgccggccaagtacaaacagcacggcggctgcgtcagcaaccgcggccacatcacctgcctgttcccgccgcgcctgctgagctttacctgggccgaacaggatcagggccgcccttccgaagtgaccttcgaactgacggaacagggaagcgccgtgctgctgacggtcacccaccggcgtttggccaaccgcgacgagatgctcagcgtcgccggcggctggcacacccatctggatatcctgctggatcgcctgcacgatcgggcgccgcagccgttctggagcacccatgcccggctggaagaagagtaccgcgcccgcctgtaa

SEQ ID NO: 423846 - DNA, 348 bp, Serratia marcescens
atggttgaattatcttcctcacagctggacgccatttttcatgcgctggccgacccgacccgccgctcgatgttgcgtgcgctggccggcggtgagcgcagcatcggcgaactggccgcgccgctgcagatgtcgttcgccggcgcctccaagcacgtgaaagcactggaacatgcgggcctggtgcaacgcaccgtgcaaggaagaaaccatatctgccggctcgaacccgagcctatggcgcaggccatgcactggctgcaaacctatgaacatttctggactgaacggctggatgcgctcgaacaggcgctgctgcagcccgaacagcttcctcccaaggagtga

SEQ ID NO: 423847 - DNA, 1227 bp, Serratia marcescens
atgacgtatcgggtcaacggcgagcgcctgtggcaaagcctgcacgcgatggcgcagttcggcgccatcgccgacaacggcgtcacccgcctggcgctcagcgaagaggatcgccaggcgcgcgaccagttgcgcctgtgggcactggaggccggttgcagcgtgcgcgtcgatcgaatgggcaacatgttcctgcgccgtgaaggttcgcggcccgagctggcgccggtggtcaccggttctcacggcgactcgcagccccgcggtggccgtttcgacggcatctacggcgtgctggccggattggaggtgattcgcagccttaacgatcggcagatcgtcaccgaacgcgcaattgaagtgatcaactggaccaacgaagaaggcgctcgcttcgcgccggcgatgatcgcctccggcgtgttcgccggggtcttcgagctggaatacggtctgacgcgccgcgacgagcacggcgtcagcctcggcgacgcgctggaacgcatcggctacgccggcgaacacccggtgggcggcacgccgatccatgccgccttcgagctgcacatcgaacaggggccgattctggaagcggagcacctcaacatcggcgtggtaaccgccgcacaggggcagcgttggtacgagctggaggtcgtcggcttcagcgcccacgcaggcaccacgccgatggatcgccgccgcgacgccctgctgggctttacagagctggtgacggcggtcaaccgcatcggctgggatttcgcgcctgacgcgcgcgccacggtgggcatggcgcaaattacccccaattcacgcaacgtggtgccgggccgggtctttttcagcgtcgaattccgccatccgcaggagtcaattctggaacagatggagcagcgcctgctggcggcggtaaaccacgtcaacggcggcggcctaaccgctcgcgccgagcgcattttccagtatcccccgatcgcttttgatcggggctgcatcgacagcgtacgtcatgccgcgcaagcgttgggctaccgccatcgtgacatgatttccggcgccggccacgatgcctgttaccttaaccgcgtcgccccaaccgccatgattttcattccctgcgtggacggcatcagccacaacgagcgggaagacatcacccccgcctgggcaaccgccggcgccgaggtgttgctgaacgccctgctggcgcacgccggcgcctga

SEQ ID NO: 423848 - DNA, 492 bp, Serratia marcescens
atgagctgtgcaaacaacgagttgggcattttggcccgcagaaagatcgaagcggagatcatcaaaccgatctaccagatcctggtgcgtgaaatcggcaaggcgcgcgctcaggcggtgatcggcgaagccatcgagaatgccgccatcgaggcgggcaaacggttcgccgcacaggagccgaacggcgcggatctgcgcagcttcgccgccttgcagtacctgtgggaaaaagacgacgcgctgcgcgttgaggtgatcaaccaggacgaacaacacttcgactataacgtcacccgctgccgctacgccgagatgtaccacgagatggggctgggagaaatcggccacctgctctcctgcgcgcgcgacagccagtttatcgtcggctatgcgccggaggtcgagctgcagcgcagccaaaccatcatgtccggcgccccctgctgcgatttccgctacacagccaaaacgccgggagaagaacaatga

SEQ ID NO: 423849 - DNA, 1152 bp, Serratia marcescens
atgcagcagaactttcgcatcaagccgttggcgctgggcgccatgacgatgatcctgagcctcccggcgctggcggacgacaccgtgctgatcggcctggccgggccgctgaccggcccttccgcgcgcatcggcaaagatctcgaaaacggcgcgcggctggcgatcgccgacgccaacgcgcaaaagccgacgctgaacggcaaaccggtcaccttcaaattgctgtccgaggacgatcagtccgatccgcgcaccgccgtggccatcgcgcagcgtttggtcgacgaaggcgtcgccggcgtggtcggccactggaacaccggcaccagcatcccggcggcgcgcatctatcacgatgccggcatcgcccaggtggcgccggtcgccaccggccacggctacacgcaacaaggctttgacaccagcttccgcgtgatgggccatgacgacgacggcggcaactatgccgggcagtatgcggtgaaaacgctgaaagcccagcgcatcgcggtgatcgacgatcgcaccgccttcggccagggcctggcggacgagttcatcaaatcgctgcaggcccagggcgtgcagccggtcacccgcgaatacgtcgacgacaagaccgtcgatttcagcgccgtgctgaccaccgtgcgcagcaaaaacgccgatctgatcttcttcggcggcgtggactcccaggcggcaccgctggcgcgcaaactgaaacagctgggcatgaacgcgcagctgatgggcgcaggcggctttgtcagccagaccttcctgacgctggcgcagcgtgaaggcgaaggcgtcgtcgcgctggagccggggctgccgctggaacagatgccgggcggtaaggcgtttgaacaagcctaccgcgaccgttaccacacccacatcgaactgcatgcgcccttcgcctacgacgccacccgggtgctgatcgccgccatcgaacaggccggctcggccaatccggccgattacctgccgaaacttcgcgccatccattatcagggcgtgaccggcgccatcgccttcgatgcgcagggcaacctgcaacagccgagcttcaccctgtaccgggtagtggacggcaaatggcagccgcaaaccgtgttgggcggcgccaaaccacaataa

SEQ ID NO: 423850 - DNA, 714 bp, Serratia marcescens
atgtctgaagccctgctgagcgttaaacgactcaaagtgtcctacggcggcattcatgcggtcaaaggcatcgattttacggtcaacgccggcgaacaggtcacgctgatcggcgccaacggcgcgggcaagacctccagcctgcgggcgctgaccgggctgcaaccgttcgagggcgacatcctgttcgacggccgttcgattcgcggcatggcgccgcaccgcttgctgcaacaggggctggtgatggtgccggaaggtcgcggcattttcacccgcctgacggtgcgagaaaacctgcagctgggcgcctatgcgcggcgtgacaaaccggcggtacggcacgatttcgaacgggtatgcgccaccttcccgcgcctgaacgagcgcctgaaccaaccggccgggctgctttcgggcggcgagcagcagatggtggcgatgggccgtgcgctgcttagccgcccgcgcctgttgatattggacgagccgtcgatggggctagcgccgattgtggtggaagccattttttcggtcatcaaacagctggcgcgtgacggcgtcacgctattgttggtcgagcaaaacgcccgcctggcgctggaatccaccgatcgcgcctatgtgctggacagcggcagcctgagccacagcggccgctccgccgacatgctggacgatgaaaaaatcaaacagatctatttgggtgaataa

SEQ ID NO: 423851 - DNA, 771 bp, Serratia marcescens
atgacgcctttgctcgctttaaatcacgtcagcaaacgcttcggcggcctgacggcggtggatgacgtcagcatgagcatccgccagggggaaatctacggcctgatcgggccgaacggcgccggtaagaccacctgcttcaatctgatcaccggtctgtatcgcgccgacgcgggcgaattccgcctgtcgggccagcgctataggccccaggcgatcgataaagtggcgcaggccggcatcgcccgcaccttccagaacctgcggctgttcaacgaaatgagcgtgctggaaaacgtgatggtcggctgccacgtgcgcacccgcaacggcctgtgggcggcgatcgcccgccaccgccgcgccagggaggaggaacaggcggtgcgcgataagtcccatgcgctgctggagtacgtcggcatcggccaattcgcctattaccgcgccggcgatctcgcctatggtcatcagcgccgcctggagatcgcccgcgcgctggcgaccgaaccccggctgctggcgctggacgaaccggcggccggcatgaacgccggagaaaaagtggcgctgcgcgagctgctgctgcgcattcgcgacagcggcaaaacgctgctgttgatcgaacacgacgtcaagctggtgatgggcctgtgcgatcgccttacggtgctggactacggcaaagcgatcgccgaaggcgaaccggcgcaggttcggcgtgaaccggcggtcattcaggcctatctgggaggtggcgcgcatgtctga

SEQ ID NO: 423852 - DNA, 1113 bp, Serratia marcescens
atgaccgttttaacttccacgcttcccctggccacgcctcggcgcgccaggctggggctgacgctgttcattctcgccctgctgctggcgccctgggttgcgggcgccgccggcggcaactactgggtgcgcgtcgtcgacttcgcgctgctgtacctgatgctggcgctcgggctgaacatcgtggtgggcatgaccggcttgctggacatgggctttatcgctttttacgccgttggcgcctatctggccgcgctgctgtcgtcaccgcatctgacgcagcagttcccgctgctgctgcagtggttccccgacgggcttcatctgtcgatgctgtggctgatcccgctggcggcgctgctggcggccgtgtgcggcattctgcttggcgcgccgacgctgcggctgcgcggcgactatctggcgatcgtcacgctcggtttcggcgagatcgtacgtattttgatgcgcaatctcgatcgcccggtcaacctcaccaacggccccaaaggcatttccggcatcgacccggtcagcctgttcggcctgaagttttccggcatgcatgagtggttcggcgtgcgtttctccggcctgtacctctattactacctgttcgccgccctgctgctggcgatcctgtttatcagcctgcggctgcaaaattcgcgcatcggccgcgcgtggacggcgatccgcgaagacgaggacgccgcgcgggcgatgggcatcaacacccgcaacttcaagttgctggcctttgccatcggcgccaccttcggcggcgtggccggcgcgctgttcgccgcgtttcagggcttcgtgtcgccggaatcgttcaccctacaggagtcgatcgccgttctggcgatggtggtgctcggcggcatggggcacatccccggggtgatcctgggcgcgctgctgctggccgccctgccggagctgctgcgcagcagcatggggccgctacagcaggcgctgttcggccaggtgctgatcgacccggaaatcattcgccaactgttttacggcctggcgctgatcctggtgatgctgtatcgcccggcgggcctgtggccggcacgccatataagggggaacgccgcatga

SEQ ID NO: 423853 - DNA, 951 bp, Serratia marcescens
atggatacgctggtacagcagaccgtcaacggtttgatgctcggcagcatctatgcgctgatcgcgctcggctacaccatggtgtacggcatcctgcgcatcatcaacttcgcgcacggcgacgtgctgatggtcggggcgctcagcgcgctgtcggcgatcggcgtgttgcagcatcattttcccgcgttaccgccctacgccacgctgctgctggcggccctgttcgccatggccgtctgcgccatcacctcgatggcgatcgaacgtctggcctatcgccggttgcgcaatgcaccacgcctggccccgctgatcagcggcatcggcgtctcgctgctgctgcaaaccctggcgatgctgatctggtcacgcaatcccctgatgtttccgcagctgttaccgatggcgcccatcgccctgaccgcaggcagcgccgagcatgcgccggcggtgatcaccggcactgcgatcgtcacgctggcggtggccgtggcggtcatggccggcctctggctgctggtcgaacacagccgtttcggccgcgccatgcgcgccacggcggaaaacccgcaggtcgccggcctgatgggcatcagtcctgaccgcatcatcgttctgacctttgcgctcggcggcgcgctggcggcggtagccggcatcatgatggccagcaactacggcaacgccggtttctcgatgggctttctgcccggcatcaaagcctttaccgccgccgtgctcggcggcatcggcaacctgcgcggcgcgatgctcggcggtttgctgctggggctgttcgaatcgctgggcaccggctatctcggcgagctgaccggcggcgtattcggcagcaactaccaggacgtcttcgcgtttctggtgctgatcgccgtactggttttccgcccttccgggctgttgggcgaacgcatcgccacgcgcgcataa

SEQ ID NO: 423854 - DNA, 897 bp, Serratia marcescens
atgctgccgaacgatccgccgctgcgcgccgtgcgggcgttcgaggccatcgcgcgcctgggcagcatcagcgcggcggcgaaggagctgatgatttcgccttcggcggtcagccatcagttgaaaacgctggaggcattcttgcagatgccgttgaccgaaaggcaggggcgccatctggtgctgcgcggcgaggggcgggaatattaccgctcgatccgctcggcgtttaacgtgctgcgccaggcgaccgaacacgtgcgcgagcagtccgcgtcgcggcaggtcaccatcagcctgatcccgctgttcggcatgggctggttcattccgcggctgcgcggctttctgcgcgaaaatccggaaatcgacatcaatgtggtttacgccaaccaccgcaattacctgagcgacgccgccgatctgtcgatccgcttcggggttgggcagtggaccggctatcgcagcgaaaagctgatgtccggccaaatggtgccggtgtgcagccgggcattcagcaaactgcacggtttgctcgatacgccggatcagctggcgacgctgccgctgctgcacgacgaggagcgcaatacctggatgcaatggtttcagcaggccggtgttaaacgcccgctgcgcagtatcggcccgatgttcgaagacggattgttgacgctggcggcggtgcaggcgggattgggatgcgcgctgatgcgtgagccgttaatcgcccactaccttgagagcggtgagttaatcaaaatgttcgatctgccgatcgacgacggccgcgattattacctgtgcgctcgcctggatagcgaactgtcgcaggaaggcgaaaatctgcggcagtggttgcgccgtgaggcggcggctcagaacgccggggcataa

SEQ ID NO: 423855 - DNA, 591 bp, Serratia marcescens
atggcaggcagaccgcgcgagttcgaccgcgaacaggcgctcttgaaggcgcgaaacttattctggcgacagggttacgaaggcacctcgatgtcggatctggtggcggaattgggcattgcttccgcgcgcatctacaaggcgttcggctccaaagagcaactgttccgcgaggcgatcgccagttatgaaaccgaggaaggtggcttcgccgatcgcgccttcgcgcaggaaagcggcattcgcccggcgatcaaacgcctgctggaagacgccgtgcggctctacagccggccggatctgccgcagggctgcatggtggtctcctccgccgccagcgtcagtgcggaaaacgacgggctcaaagtctggctggctgagcatcggttgcagcgcacccagcagatcgtcgaacggctgcggcaggcggtgcaagccggcgaactgccggccggcaccgacgccgacagcctgggggactttttcgcggtcttcctgcacggcctgtcgattcaggcgcgtgacggcgtcactgaaacacgactgttggcggcggtaaaggtggcgctgacggccctgggcggcgcttaa

SEQ ID NO: 423856 - DNA, 1056 bp, Serratia marcescens
atgaaaaccctcaaaggtccaagcctgcatctcgcgcagttcagcgatgagacagcgccgttcaacagcctgcccgccattgccgagtgggcggcgcagaccggctttagcgcgctgcagatcccggcctgggatcggcgtttattcgacgtggccaccgctgcggaaagccaaacctactgcgatgatttgaccggcatgttggcggaacaggggttggtggtcagcgaattgaccagccatatcttcggccagctgatggcggtacacccggcttacgatgcgctgtttgacagcttcgcgccgccggcgctgcagggcaatccgcaggcgcgcggcgagtgggcgcggcagcaaatgctgctggcggtgaaggcgtcggcgcggctcgggctcagcgagctgggcaccttttccggttcgctggcctggccctatctgttcccgttcccacagcgcccggaagggctgatcgacaccgcgttcgacgagctcgccaggcgctggctgccggtgcttaacgcctgcgacgagcaggggatcaacctgtgttacgaaattcatccgagcgaggatctgcacgacggcgtgacgttcgagaggtttcttgagcgcgtcggccatcatccgcgttgccgggtgctgttcgatccgagccatatggtgctgcagcagctcaactatctggagtttatcgatatctataaagaggttatcggcatgttccacgtcaaggacgccgagttcaatccgaccgggcgccagggtatttacggcggctatcaatcctggatcgatcgcgccggccgcttccgctcgctgggcgacggccaggtcgatttcaacggcatcttttcgcgcctgacgcagtacggttattcgggctgggcggcgctggagtgggaatgttgcctgaaaaatccgcaggatggcgcacgcgaaggcgcagccttcatccgcgatcgcattatccgcgtcaccgataaagtgttcgacgacttcgccggcgcgccggtcaacccacagcaaatcaacgcgttgctcggtattcgctga

SEQ ID NO: 423857 - DNA, 897 bp, Serratia marcescens
atgcaatacctacagaacgagatcccgttggcggatctcgcggcggaacatgtctatctccaggtcaacggccggcgccttcactgcgtgatggccggtgaagggcggccggtgctgctgatccccggctggccgcaaacctggtacacctggcgccatgtgatgcaagcgctggcggcggccggttttcaggcgatcgccgtcgatccgccgggcatcggcgattccgacaagcccgctggcggctacgacaccggcagcgtcggtgcggcgttgcacgcgatgatgacgcaactgggccatgaacgttaccaactggttggccacgacatcggcatgtggatcggttacgccatggcgagcgatttcccgcaggcggtggagcgcctggtgctgacggaagcggtgatccccggcctggcgccgccgccgccgattttcgtcgcgccggaggagaacatcttcctgtggcatttcatgttcaaccagctggcggatttgccggagaccctgacccaggggcgtgagcgggagtatctcggctatatcttcaatcgctggtcctatcggcgcgatcgggtggcggcgcaggtgtatatcgccgcctattcggcgccgggcggcctacgcgccggattcgactattaccgggcgatcccggagaccgtgcggcaaaaccgcctgcgcgccgccacgcccctgacgatgccggtgttgacggtgggggcagagcacgccaccggcgacgcgccgctgacgacgctgcggggcaatgcgcacgatctgcggggcgaaacgatcgccggctgcgggcatttcattaccgaagagtgtcatgaggcatttattgcactgattacgccgttcctggcaggagagccacatgccgctcgatga

SEQ ID NO: 423858 - DNA, 903 bp, Serratia marcescens
atgccgctcgatgaacgcattgccgcctttttgacggcatcggccgatgcgccgccccccgcgtcgctggcggaaatgcgcgcggctacggaaaccggtttacgccagctgcagggcgaggcggaaccgagcggcggcgtcagggactttacggtggtcgcggccgatgggtatcggatcgcgctgcgcgcctatctcccggcgggggaaaaccgcgccgccgcgcagccggcaatgctgttcgcccacggcggcggttggtgcctcggttcgctggcgctgtacgatcggccctgtcaggcgctggccaacgccaccggccgggtgatcgtgtcggtcgactatcgtctggcgccggaatacccgtttccgcagccgctggaagatgtctatcgggcgctctgctgggtggcgcaacaggcgccgcagttggggatcgacgcgaagcgcctggcggtgggcggcgacagcgccggaggcaatctggcggcgggggttgcgctgctggcgcgggatcgcggcggcccacacatcgagcgccagctgctgctgtacccggcgctcagccgcgagatgacgacgaagagctattgcgagtttgccgaggggtactttctgacgcgcgatgcgatggtattttgttggcagcagtatctagcccagcggcgcgatcccggcgccgaaccgctgcacgccgctacgctgcgcggattgccgccggccaccatcctgagctgcgaatatgatccgctgcgcgatgaggccgagcagtatgcgcagcggctgcgcgaggcgggcgtgccgatacgctgcgaacggttgccgggcatggtgcatgcctgcattcacatgctggggctgactccggcggcgcggcggctgttcgaactggctcgcgagtaa

SEQ ID NO: 423859 - DNA, 1434 bp, Serratia marcescens
atgtatccggatactcaactgtatatcgatggacaatggcgcaacgcactggccgggaaaaccctgccggtcaccaaccccgccaccgacgagataatcggtcaagtggcgcacgccgccacagaggatctcgatctggcgctggccgccaccgagcgcggatttaacgtctggcgcgacaccgccgcgcaccagcgcgccaacctgatgcgcaaagcggcggcgctgctgcgcgaacgcgccaacgccatcgccgccgtcatgacgcaggaacagggcaaaccagcagcgcaggccaaagtcgaaattctcaacgccgccgacgtcatcgactggttcgccggcgaagccacccgcacctacgggcagatcattccgtcccgcgcccgcgacgtgcagcagcaaaccctcaagctgccggtcggcccggtggccgccttcacgccgtggaacttcccgatcaaccagatcgtgcgcaagctgtccgccgcgctggccgcgggctgctccatcatcgtcaaaggcccggaagaaacgccggcctcgccggctgagctgatcaaagccttcgccgacgccggcatcccggccggggtgatcgcgctggtgtacggcaccccggcggaaatctcggaatacctgatcccgcatccgaccattcgcaagatctccttcaccggctctacccgcgtgggcaagcatctggcggcgctggccggccagcatatgaaaaaggccaccatggagctgggcggccacgcgccggtgttgatcttcgacgacgccgatctcgacgcggcggccaaagagctggcgcagtccaagttccgcaacgccggccaggtctgtatcgccccgacccgcttcctgatccagcaaggcgtttatgaagacttcgtggagaaattcaccgccgccgtgcgtgaactcaagctcggcaacggtctggaagacggcatcaccatggggccgatggtgctgggccgcagcgtcgacaatatcgaggcgctggtgcaggatgccgtcgcccacggggcaaaagcctgcaccggcggcaagcgcgtggcgggcaaaggcaacttcttcgagccgacggtgctgcgcgacgtgccgctgagcgcccgcgccatgtcggaagagccgtttggcccggtcgccctgctgcgcccgttcgccacctatgacgaggcgatcgccgaagccaaccgcctgccgtacggcctggccgcctacgcttacagccgcaacatcgccaccgtcaatgcgctggggcgcgacgtggagagcggcatgctgagcatcaaccacatcggtttcggcctgccggaaacgccgtttggcggcgtgaaggactccggtcacggcaccgaaggcggcagcgaagcgatcgaatcctacctggaaacccgcttcgtcaccgtcgccggccgttaa

SEQ ID NO: 423860 - DNA, 828 bp, Serratia marcescens
gtgcaaggggtaccgcaacagtttccgttcgagaaggattgcgcgcagttccgccatttgtcgcatctgccgggcgtcgaactctatcaggcgcacattgagcgctatgccttcgagccgcatacccacgacgccttcgctatcggcaccgtagacgccggggcggagcgtttccgctatcgcggcgcgcagcatctggcggcgccgggcgcgctggtgctgatgaaccccgacgagctgcataccggcgaagccgaaacgccgggcggctggtgttaccgcatgctctatctggcgcccgaggcgctggagcagctgtccggcgctcggagtcagtggttcaccgatgcggtgcgccacgatccgcgggcggcgcagcgcctgtccgccattctcgccacgctgtggcaaaccgacgatccgcttacgctggacggcctgctgttggaggcggtcgagctgctgtacccgcatatccgcaccgggcagcgggaaaaagccgaggcggcgcaccgtttcgaggtggtgaaaagctacctgcacgataacttcgccgaggccgtgaccctcaatcagttggccgagctggtgtcgctcagcccgtaccattttctgcgcaagttcaaggccgaataccacgtttcgccgcagcagatgctgatggcgatccggctgtcgcaggccaaacgcatgctggagcgcggcatgcccgccgcacaggtggcggcggcggcagggctgaccgatcaggcgcacctgacgcgcgccttcgccaatcgttacggcgtcacgccagtgcgtttccagaaacaggtgaaattgggttaa

SEQ ID NO: 423861 - DNA, 969 bp, Serratia marcescens
atgttcattggcgttgtgtttgccctggccgccgggctgatgtggggattgatcttcgtcggcccgctgctggtgccggattatcccgccgcgctgcagtccaccgggcgctatctggccttcgggctgatcaccttgccgctggcctggctcgatcgtcgccgcctgcgcaagctgcggcgccaggattggctggaggcgctcaaactgacggccatcggcaacctgctgtactacctgtgcctggccagcgccattcagcgtaccggcgcaccggtgtcgaccatgatcatcggcaccttgccggtggtgatcgccatctgcgccaatctgttttacggccggcacgacgggcggctggcctggggcaagctggcgccggcgctgctgctgatcgtctgcgggttagcgtgcgtgaacgtcgccgagctgcgcggcaatgcgctgccggtcgacggctggcgctatctcagcggcctggggctggccgtgttggcggtggcgtgctggacctggttcccgctgcgcaactcgcgctggctgcgggagaacccgacgcagcggccggctacctgggccacggcgcaagggctggtgacgctgccgctggcgctgctgggctatctggcggtctgcggccaattggcgctgagcgaaccggcgttcgccttgccgttcggcccgcgccccgaggtgtttatcccgctgatgctggtcatcggcgtgttctgctcctggctgggggcgctgtgctggaacgaagccagccagcggctgccgacggtgttggtggggccgctcatcgtgttcgaaattctggcggggttggcctatacctttctgctgcgccaggcctggccgccgctgctgacgctggccggcatcgtctgcctgatcgccggcgtggtgtacgccatgcgcatcaagccgcagccggtggtggtggcgctggaagacaagcaggggtga

SEQ ID NO: 423862 - DNA, 2106 bp, Serratia marcescens
atggctcgcaccacccctatcgaacgttaccgcaatatcggcatctccgcgcatatcgatgccggcaaaaccaccaccaccgagcggattctgttttacaccggggtcagccacaagctgggtgaagtgcatgacggcgcggcgaccatggactggatggcgcaggaacaggaacgcggtatcaccatcacttcggcggccaccacctgcttctggaacggcatgcagcataattatccgcagcaccgcatcaatatcatcgacacccccggccacgtcgatttcaccattgaagtggaacgttcgatgcgcgtgctggacggcgccgtaatggtctatgactcggtgggcggcgtgcagccgcagtcggaaaccgtctggcgccaggccaataaatacaaggtgccgcggctggcgttcgtcaacaagatggaccgcatcggcgcggactttttccgcgtgcgcaaaatgatgatcgagcgcctgaaagccaacccggtgccgatcgttattccgatcggcgccgaagaccacttcagcggcgtggtggatctggtgcggatgaaagccattctgtgggacgaggcctcgcagggcatgaacttcagcttcgaagagatcccggccgagctgcgcgattcggcgcaggagtggcgcgaaaacatgattgaggccgccgccgaagcctcggaagagctgatggaaaaatacctcaaccaggtgccgctgagcgaagaggagatcgtccacgggctgcgggtgcgcaccgtcgccggcgaaatccagccgatgctgtgcggctcggcgttccgcaacaaaggggtgcagcgcatgctggatgcggtgatcgagctgatgccctcgccgctcgacgtgccgccgatggagggccacggcgaacatgatgaaatcatcacccgcaaagccgacgacaacgaaaaattctcggcgctggcgttcaagctgatgaccgacccgttcgtcggccagctgaccttcgtgcgcgtctactccggggtgctggccaaaggcagcagcgtttacaacccgatcaagggcaaaaaggagcgcatcggccgcatcgtgcagatgcacgccaacgatcgtaaggacatcgacgagctgcacgccggcgacatcgccgcctgcgtcggcctgaaggacgtcaccacgggcgatacgctgtgcgatcccggcgccatcatcacgctggagcgcatgactttccccgaaccggtgatcgcccaggcgatcgagccgaagaccaagggcgaccaggagaaaatgggcatcgcgctgcagcgcctctcttcggaagatccgtcgttccgcgtgcgcaccgatgaagaatccggccagacccttatctacggcatgggcgagctgcacctggagattatcgtcgatcgcatgcgccgcgaattcggggtggagaccaccaccggcaagccgcaggtgtcgtaccgcgaaaccatccgcaaacgggtggccgacgtggaaggcaagtttgtgcgccagtccggcggtaaagggcaatacggccacgtggtgctgaccgtcgaaccgaacgaacccggcaaaggcttcgagttcttcgatgagatcaagggcggcgtcattccgggcgagtttatcccggcggtgaaaaaaggcgtgctcgaggcgctgaacaacggcgtgctggccggttatcaggtggtggacgtcaaggtgcacctgaccttcggttcttaccatgacgtcgactcgtcggagcaggcgttccgcatggcggcgattttcggcttcaaagacgcctgccgcctggcggatccggtgatccttgagccgatcatgtcggtggaggtggaaacgccggaggattacgccggcaacgtgatgggcgacctctcctcacgccgcggtctggtgcagggtatggaagagatcccgggcggcggcggcaaggaaattcgcgccaaggtgccgctatccgagatgttcggttactcgacgaccctgcgttcgatgtcgcagggccgcgccacctacaccatggaattcagccactacgctgaagcgccgcgcaacgtggccgaagagatcattcaccacagcaagcgttaa

SEQ ID NO: 423863 - DNA, 249 bp, Serratia marcescens
atgtttggaaaagcggaagacaaagccaatgaagccgcaggcgcggtagaagaagcgttcggcaaagccgtcgattcgccggagcatcaggtgcgcggcgcggcgcgcaaatacgcctcccaggccagctatgccgcccgagacgcagcggacagcgtaagaacccaggtggaagccaacccgctggccggcgtggccgttgcggcggcggtcggcatcgttttcggcttcttgctgggacgcaaataa

SEQ ID NO: 423864 - DNA, 1497 bp, Serratia marcescens
atgtcagtactgcgtattctggcgctgctcgccgcgaccgccgccgcattgcccgcccaggccaggcctgcggctcacggcgcggcggccgagaacggcattcgttggcaatcttgtctcaacagcggctttcaacgctggttcgatgagccgccgccgccggggctgcgctgcggctaccttgaagcgccgctggcgtacgctacgcctcctgctcatgcggcgcgggcgggcgaacagaccgtgcggctggcgctgaccctgctgcccgctaccgggccgaaaaagggcagcgtggtgatgatcagcggcgggccgggtctgccgggcattaacccttatttaggcaacgacgcccacgtcgccagactgcgaaaatcctacgacatcatcggttacgatccgcgcggcgtcggccaatcgacgccgaaaatctcctgccagctggccgaaggcgacgaaaccccgtcaccggacgacaacgacgtggccggtgcggaaagccagacgcgcaccctgattgccgcctgtatcaaacagaccggcgcggaagtgctgcaacatatcggcaccgacgaagcggtcaacgatctgaatgcgatccgccacgcgctgggcgaaccggggctgacggcggtggcgtactcttacggcaccaaggtggcggcgctgtatgccgagcgttttccgaagaaaacgcgcgcgctggtgctcgacggggtggtggatctggcggaggacgatttcacccagcggctgaaccaggagcggggtttccagcaaagcttcctgcgcttcgccgcctactgtggaaaaaccgacagctgccagctgggtggcggcgccaatcaggcgctgcagcgctatcacgccttgctgcgcaagctgcatgagcagccgttcgtcaccgcggcggggtatgaaatctccgccgacgacgtgctgacggtcacgcgttcgctgctgctgtggccggagcgctggcacgagctggcgaccgtgctgcgccagctcgatgccggcatcgccgggcagcaggtttccgatctgatcgacgaaagctattcgccggatgccgatgacgccctgaacgtcatcacctgcgccgacgtcgccaacccgacggccgatccgcagcagttgcgccggcagcggcaggagatcaataccgccgctttgtatgcccactatctgccgctgcacgaatacccgctggagatgtgcgatctgtggccgtatcgcggcaaagatcggccgcacacgccggtggcgtccgccgcgctgccgccgctgctgttcgtcgcccagcgctacgatccgaccacgccgtaccgcaatgcgcaggtgatggccgccgcctttaaaagcccgctgatcacccgcgaacgcgacgggcatacgctggcgctgaacggcatcgacagctgcgttgacgaaagcgtagtggattatctgctggcgccgaaaaagccgcgtcgcgacaaaatttgccgttga

SEQ ID NO: 423865 - DNA, 1038 bp, Serratia marcescens
atgagcacgctcgaactgcacggtatcgaaaaatcttataacgccatcagggtgctggaacgcatcgacctgcaggttgccgccggcagccgcacggcgatcgtcggcccttccggctccggcaaaaccaccctgctgcgcatcatcgccggctttgaaattcccgacggcggccagatcctgctgcaggggcaagccatgggcaacggcggcggctgggtgccggcgcatctgcgcggcatcggcttcgttccgcaggatggcgcgctgttcccgcactttaccgtcgccggcaacatcggttttggccttacaggcagcaagcgtgagaaacagcggcgcatcgaggcgctgatggagatggtggcgctggatcgccgtttggccgcgctgtggccgcacgagctgtccggcgggcagcaacagcgggtcgcgctggcgcgtgccctgtcgcagcagccccgtttgatgctgctggacgaaccgttctcggcgctggataccggcctgcgcgccgccacccgcaaagcggtcgccgaactgctgacggaggccaaggtggcgtcgattcttgttacccacgatcagagcgaagcgctgtcgttcgccgatcaggtagcggtgatgcgcaacggccggctggcgcaggtgggcgcgccgcaagatctctatctgcggccggtcgatgagccgaccgccagcttccttggcgaaacgctggtgttgaccgccgaactggcgcacggctgggccgactgcgcattggggcgcatcgccgtcgacgatcggcaacgcagcggcccggcgcgcatcatgctgcgcccggagcagattcaaatcggtttgccagatccggcgcagcgcggccaggcggtgatcaccggcatcgatttcgccggcttcgtctctacgctcaacctgcaaatggccgccggcggcacgcaaatcgagatcaaaaccgtcagccgcgaaggcctgcagcccggttctcaggtcaatctcaacgtgatgggccaggcgcatattttcgccggttga

SEQ ID NO: 423866 - DNA, 1584 bp, Serratia marcescens
atgtcaaacctgagtacccacgccgcgcagaccgcgcggcgttattctattgccctccgttacccgcggccgggggcgatcgtggtggccagcgccgtgttgctgtcgttgctggcgctgctgccgctgggattcgttatcggcgtggcgtttgaaaccggctggcaaacggtcaaagctctggttttccgcccgcgcgtggcggaactgttgttgaacaccctgctgttggtggtgctgacgctgccgatctgcgccgtgctgggcgtggccctggcctggttgaccgagcgcactacgctgccgggccgccgtctttgggcggtactggccaccgcgccgctggcggtgccggcctttgtgcaaagctatgcctggatcagcctggtgccgtcgatgcacggcctgagcgccggggtcatcatctcggtgctcgcctatttcccgttcatttacctgccggccgccgccgtgctgcgccgtctggatcccggtatcgaagacgtcgccacctcgctcggttcccggccgccggcggtgttttttcgcgtggtgctgccgcagctgaagctggcggtctggggggggtcgttgctgatcgcattgcacctgctggcggagtatggcctgtatgccatgatccgcttcgataccttcaccaccgcgatcttcgatcagttccagtcgaccttcaacggcccggcggccaacatgctggccggcgtattggtgctgtgctgcctcgggctgctgttgcttgaggctctcagccgcggccgcgcgcgctatgcccgcgttggttccggcagcgcccgcagccaaacgccgcgtcgcctttcgctgccgctcgccgcgctggcgctgctgctgccgatttcgctgaccgcgctggcgctgggcgtgcctttcatcaccctggcccgctggctgtggctgggcggatgggaggcgtggcgcaacgccgacctgtggcctgcgctgtggcaaacgctgtcgctgtccgccgtcggcgcgttgctgatcacgctgtgcgccattccgatggcctggctgtcggtgcgctatccagcccggctgtaccgcgtgctggaaggctgtaactacgtaaccagctcgctgcccggcatcgtggtggcgttggcgctggtgaccatcaccattcacagcttccggccgatttaccaaaccgaaatcaccctgctgctggcctatttgctgatgtttatgccgcgggcgctgatcaatctgcgtgccggcatcgcacaggcgccggtggaattggaaaacgtggcgcgcagcctcggcaaatcgccggcgcaggcgctgtggagcactacgctgcggctggcggcgccgggtgccgcggcgggcgccgcgctggtgttcctggcgatcgccaatgagttgaccgccacgctgctgctggcgccgaacggcacccggacgctggccaccggattttgggcgctgaccagcgagatagactacgtcgccgccgcgccttatgcgctgattatggtggcgctgtcattgccgctcacctggcttctttattctcaatctaaacgcacggcgggactatga

SEQ ID NO: 423867 - DNA, 1017 bp, Serratia marcescens
atgaagctgcgtatttcatctctcggccccatcgccctgctcgcctcctcgatgatgctggccttcggcgctcaggcggcctccgccgaccagggcatcgtcatttacaacgcccagcatgaaaacctggtgaaatcctgggtcgatgggtttaccaaagacaccggcatcaaggtcacgctacgcaacggcggcgacagcgagctgggcaatcagttggtgcaggaaggcagcgcttcgcctgccgacgtgttcctgacggaaaactccccggcgatggtgttggtggataacgccaagctattcgccccgctggacgccgcgacgctggcccaggtggaaccgcagtatcgcccaagccacggccgctggaccggcatcgccgcccgctcgaccgtgttcgtctacaacccggccaaactgaccgacgcgcagttgccgaagtcgctgctggatctggccaagccggaatggaaaggccgctgggccgcctcgccgtctggcgccgatttccaggcgatcgtcagcgcgctgctggcgctgaaaggtgaaaaagcaacgctagagtggctgaaagcgatgaaaaccaacttcaccgcctacaagggcaacagcacggtgatgaaagcggtcaatgccggccaggtcgacagcggcgtgatctatcactactacccgttcgtggacggcgcaaaaaccggcgaaaacagtaataacatcaagctgtattacttcaaacatcaggatccgggcgcgttcgtcagcatctccggcggcggcgtgctggcttccagcaagcatcagcagcaggcgcaggcgttcatcaagtggatcaccggcaaacagggccaggagatcctgcgcaccaacaacgctttcgaatacgccgtcggcgtcggcgcggcctcgaacccgaaactggtgccgctgaaagatctggacgcgccgaaagtagacgctgcgcagctgaacggtaaaaaagtggtcgaactgatgaccgaggcgggcctgctgtaa

SEQ ID NO: 423868 - DNA, 576 bp, Serratia marcescens
atgccttcattgcaagatattacgcctgaacaggctaacacattgaataaacaatcacgtgacgcctataacgcggaagtgcagagccgacaggcgctgctcaaccaacatccgcaattgaaaccggcgttcaaccagcaagtgcatccgcaatccttgtgtggatgcgggtgccaacaaaatatctgcggctacttcagcttccagggttgtggatgcgggtgtggctgcgcgccacatgcggagaccgtgcaaatttccgcacagctcgccaatattggtcccaatgccccatcaagcggtacatcggtgcgttttatcggccaggccaccggcaccggctcagacggtaacatcaacatcccgacaatctatttgcaaggcaccgtgcccgatgccgaaaatctgatcggcgttccgttaaccctgcaactggccatcaaccccggttcgatcgtcctgacgctgctggagaatggtcgggtgctgacctctttggttcatccgccgcagtacgcaggcagtatcaacgggcaattcttcggcgtcggcaacggtgagtttgtgccggcgtga

SEQ ID NO: 423869 - DNA, 270 bp, Serratia marcescens
atgtctaatggaccgttttataccaatcctatcgtggtcatcgatgtagctaatgattgcgtgcatgtggagatggcgatcgatggaggattatacgaaaacgtgtttccgctgtcggtagcggctaatgaaccctatccgaaattgctggtgaatctggcgatccaggcacaggcgagcggtaaatccttaatggtgtggggggaacccggcccagagccggttaaaggcctgccgctgtttggtatcacgaccgtgaacatcaagtag

SEQ ID NO: 423870 - DNA, 1620 bp, Serratia marcescens
gtgaaatattcatttaatggcaagaaattggctggtttaatcctcctggcttttaacgcggcgaacgctcaggcggccgaggtgccggcgggtgctaaactggcggaggtgcaagagctggtgcgtgccaacgggtatgagccggcgacgctggatccgaacctggccgagagcaatgtggagttctacatctttaacgatctgttcgaagggctgctgcgcgtcggtaaagacggcgaagcggtcccggcgctggcgcagaaatgggagcatcagggcaacgtctggatcttccatctgcggccgcaggccaaatggtcgaacggcgatccggtgaccgccgacgattttgtctacagctggcggcgcctcaccgatccgaaaaccgcgtcgccgtacggcagctatctggcttcggcctacgtgctgaatgccgcggcgatcaacgccggcagcaagccgccgagcgagctgggcgtcagggcgctggacgcgcacaccctgcaggtgacgctgtcggagcccaactcctacctgctcaagcaactggtgcattttccggtcttgccggttaaccgcaaggtggtggagcggtacggcaagaactggactcaaccggcgcattttgtcggcaacggcgcattccgcctcagccagtgggtggtgaacgaaaaggtggtggtggaacgtaatccgcagtattgggacaacgccaacaccgtgctcaacaaggtgacgttcttgccgatacagggtttcccggaagtggcgcgttttcgcgccggtgaggttgagttggggtataccacgccgccggagctgtatcagcagctgaaaaaaacgctcggcgagcaacagctggtgacctatccgctgctctccaccagttacttcgccttcaacaatcgccaggcgccatttaacgacctgcgggtgcgccaggcgctgaatctggcgctcgacaaagagatcatcgccggcaaggtgctgggatacggccaacagccggcctggacctttaccccaacgggggcgggtggctatagcctgcagcccggcgctgcggccggctggacgccggaacagcggcacgcccaggcgaagcagttgctggcgcaggccggtttcaacgccgagaatccgctgcggtttaccgtgctgtacagcaacgacgccaccatcaagaagatcgtcatcgccgccgccgccatgtggaaaaagaaccttggggtagaagcccgcttgcaaagccaggagcgtaaagtgacgctggataatatcaaccgcgggcagtacggcgtggcctttacccgctggctggcggactataacgatccgtctacttttctgaacgtgttccgttccgacagcagcgagaacagcgccaaataccgcaacccggactatgaccgcattctgcaccaggcgacggcggcgcagacgccgcagcaggtgcagcgctacttccagcaggccgaggtggtgctggccgccgatacgccggtggcgccggtgtactacgaggccaacgccacgctcattaaaccttacgtgaaggggatcgactttacccgccagggcgccttgtacgataaaaacgtctaccttctcgagcactga

SEQ ID NO: 423871 - DNA, 1023 bp, Serratia marcescens
atgataaagtcacatcaacattattcttctccggcgctgagcacgactgaaactctcgacgagacatcggtcgccggctatatgaacgccgattttattaccgttcccgcgacgatgacggtcaatcatgcccgggaatatttactttcacagcttaaaacggacgaaattcccacccgggtatttattaccgcggacgattatcatctgcgcggcacgctgtcggtaaaaaaactgctgcagtgcgacgagcaggataaagcggtcggcgtgatgatggatcacagttattttcaggtttcacctgacgacgatcgcaacgacgtggcgcatctgctcggcaagggcggcctggacgtggtgccggtcgtggcgaacaacacgctggtcggcgtgctgggggagcgagagatcgcccggttggtcgaggctgaaaacaccgaagacgcgcagcgccagggcgcgagcctgccgctggacaagccttatctggagaccagtccgtgggcgctgtggcgcaaacgctcggtgtggctgctgatgctgttcgtcgccgaggcttacaccggcaacgtgctcaaggcgtttgaagagcaactcgaagcggcgatcgcgctggcgttctttatcccgctgctgatcggcaccggcggcaacagcggcacccagatcacctcgacgctggtgcgcgccatggcgctgggcgaggtcagcctgcgtaacctgggcgcggtgatccgcaaagaggtcacgacctcgctgctgatcgcggtcaccattggcctggcggcctgggtgcgcgcctggatcatgggcgtcggcatggaggtgacgctggtggtcagcctgtcgctggtggcgatcaccgtgtggagtgcgattgtctcgtcgatcattccgatgctgttgaaacggctcggcatcgatccggcggtggtgtcggcgccgtttatcgccacctttatcgacggcaccggcctgattatttatttcaaaattgcccagtacgttttggggatttaa

SEQ ID NO: 423872 - DNA, 180 bp, Serratia marcescens
atgacgattcttattctgggattgctctacgccattttaatgatctcggtgggcgttaatgagatttatttttattccaccggaaaatccaattttcttactagcctcatgctgacattctctggcagtatgctgctgatcgccgttgtctggcaattatcctctaaaataaaaaaataa

SEQ ID NO: 423873 - DNA, 1377 bp, Serratia marcescens
atgcagaatgaaaaacaggccgtggccagaaactcgatgatcgccagcgggttactggccacgggcaaatttgtcgccggcatttttaccggcagtattggcctgatatccgaagggatccactctttcaccgattttatcgccaccagcatcacctggctggcggtgcgcatcagcgataagcccgccgatgacgatcaccacttcggccacggcaaggtggaaaacctggcggcgctgttcgaggtgctgctgttgctgggcgccgccggttggattgtctatgaggccggcagcagcctgctcgggcagccgcatgagatcgtcgccgcgccggtggtgatcgcggtgctgctgatttccatctgcgtcgatttcttccgcgtgcgggcgctcaaccgcgtcgccaaagcgaccgacagcgcggcactggaagcggatgcgctgcatttcttctccgacatgctttcgtccggcgtggtgctgctgggcatggtgtttgtgctgctgggctttggccgcgcggacgccatcgccgcgctgatcgtcgccggctttatctttgtcgccgcgatcaaactgggtaaacgctccttcgattcactgatggatgccgcgccggccggggctaccgaggcgatccgcgccacgctggcgcgttttccggcggtgctggcctgcgacagcgtgcgcattcgcaatgccggcgcggtgctgttcgtcgagatcacggtggcggtgtgccgcaccttgccgctggagcgcatcgacgcgctgaagcaagagatcgtcgagcgactgcgggagcactacaccagggcggaattcaccgtcatcgcggtgccgcagacccgcagcgatgaagacatggcgacgcgcattcgggcgatcgccgccaaccacggcgcgcaggtacagaatgtgaccttgcagcagctgccgacgcgcatggcgatcggcatggatttggcggtgccggccaacgccagcgtggcgcaggcgcatgacatcgccacggagatagaagggatcctgcgccaggcgatcggtgaggacaccgagatagagacgcacctggagccgcagacgccgcactggctgaccagcgaggatgtcgatgcgacggagctggccgatattcggcggatcctgcagtcggcgctggagcagggagagagcgtgcaagacgtacacaacgtgcgcgcacgcaagagcgacggcggcatcattgtcaatttccactgccgggtgtcgccgtcggtgaccatcgccgccgcgcacgatgcggtcgatcgggtcgagcgccggctgcgcgcgctttatccggccatcacgcgcgcgatagggcacgtcgagccgatcaagcccggcatatga

SEQ ID NO: 423874 - DNA, 846 bp, Serratia marcescens
atgacttcactctccccacgggacatcgaggcgcgctaccgcttcgcgcgtgagatcgcccgcgccgccgccgatctcgccttcagcttttatcaacggcggcaaagcctggctgtcgacttcaaacaggggctgcaggacgtggtcagcgaggccgatcgccgcgtcgaagcgctgatccgccgcatgatcagccgccgttttccccaggacgggtttctcggcgaggaaagcggcagcgccggcgagaatgccgcctgtatttgggtcgtcgatccgattgacggcaccgcctgcttcctgaacggattgcatacctggtgtatcgcgataggcgtggtgatcgacggcgagccgacgataggcgtggtctacgatcccaaccaccgcgagatgttccgcgcctgtcgcggcggcggcgcctttctcaatggggagccgatcgctgtgcatgccgggcgcagcgtcgcggatggcgtgatgggcgtcgggatttccccgcgcgcctcggcggcggaattcagcggctttctctgtcgcctgctgcaggcgggagggatgtttgtgcgcagcggctccggcgcgttgatgaccgcccaggtggccgccggacggctgctgggctattacgaaccgcatatgaacgcctgggatagcctgcctgggtgggtgctgacgcgcgaagccggcggcgtggcgaatgactttatgcacaacgacgggctgcggcgcggcaacccgttgctgctggccaacgcggcgctctacccgcagttggccgagctgattcatatgccgggcttgatcggctcgacgtgccctatcgcgcgcgtgatggccggataa

SEQ ID NO: 423875 - DNA, 3105 bp, Serratia marcescens
atgctagcgcattttttcgtctttcgaccggtatttgcggccgtgctggccatctgcattatggcggcgggcgcactggcgctctggacattgccggttgagcaatatcccgacatcgccccacccggcgtcacggtgaccgccaattaccccggcgcttcggccaaaacggtagaggacagcgtaactcagattatcgaacagcaaattaaagggatcgatggcctgttgtatttctcatcaaccagcagttcggcgggtcaggctcgcatcagccttagcttcgaacaacaaaccgacccggacattgctcaggttcaagtgcaaaatgcggtcaatcaggcaacgtcgcgattgccgcaagaagtgcagcagcaagggatctcggtgacaaaatcgcagggcgatagcctaatggtagtcgccctgtacgacacgcaaggccgcatggacagcgttgatatcaatgattttctggtcagttcgctgcaagatccgctgagccgggtggatggcgtcggggagacgacggtatttggcgctcaatatgcgatgcgcgtttggctcaatccgatcaagttgagcggttatggcctgatgccatctgacgtgcaagccgcgatagaagcgcaaaatgcccaagtcaccagcggtgagatcggcgcattgcctacgatggatggccaggcgttgaacgcgaccgtgaccacgcaatcgcggctggaaacgccggagcagtttgagaatattattctgcgcaccaataccgacggttcggcggtgtatttgcgcgatgttgcgcgcgtggagatcggtgcggaaaactatcaaaaccaaacgcgtctcaacgggtacccagcggccggcatatcgattcaactggcttccggcgccaatgcgctggaggttgctgaacgggtgcgggctgaagtggagcgcatggcgccgcagtttccgccggggctgcaggtggcttatccgcgtgacagcacgccgttcgtactggtgtccattgaaggcgtcgtgcaaaccttgttggaagcgatcgcgctagtgattgtggtgatgtatctgtttttgcaaaattggcgcgccacattgatccccgccattacggtacccgtagtgctgctcggcactttcggcattttggcgctgttgggttacagcgtaaacaccttgacactgttcgccatggtgctcgcgatcggcctgttggtggatgacgcgatagtggtggttgagaacgttgagcgcgtgatggaggaagcgcaattgccgccgcgcgaggcgacgttgcattcgatgcgggagatcaatggtgcgctgatcggcatcgcgctggtactttcggcggtatttgttccgatggcatttttcggcggttcaaccggcataatctaccgacagttttccatcacgctagtcgctgcgatggtgctgtcggtgttggtggcgttgaccttgacgccggcattgtgcgccggtttgctaaaaccgtcggtgcagcggccgcgcagccgcttttttcgcggctttaaccgcctggtggaatacggacagcggcgttatgggttgggattgaaccatgtgatggcgcgtaaagggcgtttttgcatgttggcgctgctgctggtcggttttatgatttggcaatatctgcggatgcctaccggttttctccccgtcgaggatcagggctcggtaatggtccagttttctctgccgccaggcgccccgatggccagaacgcaacagactgctgacgctatcgccgactatttcatgaccgccgagcgggataacctgaatgtgatcttcatggttgtcgggcgcaataacgccggcagtggtcagaatgtcggcatggcgtttgccgaacttaaacattggtcgctgcgcagcggtaatgagaataacgcgctggcgattattagccgcgccaatcgccatttcaaaaactatcgcgacgcgcagatcaatgtgttgtcgccgccggcggtgcgcggattggggcagtccagtggatttgaactgtggttacaggatcaaaacggcgttgggcatgacgcactgcaagctgcgcagaggcaagtgatcgccgccgctgccgaagatccgttgttaacggcggtacgcatcaatggcctcgaagataaagcacaattgcaggtcgatatcgatcagcaaaaggccagcgcacaagggctgcagcaggctgacatcaccaacacgctttctgccgcctgggggggcgcttatattaacgattttatcgatcgcggccgcgtaaagcgggtctacatgcagggggacgcggcctggcgatcggcgccggatgatatcgataattggttcgtacgtggtgaaagcggcagcatggcgtcctttgccagcttcgcgactacgcgttggctctcagggccacaaatgctgcagcgctttaacgggctgtcggccacgcagttacaggggacggcagccgagggcgaaagctccggcaccgcgatggcgcgtatgcagagcatcatcggcggtgtagacggctaccgccttgagtggagcgggctctcatatcaggagcaattggccgccgggcaaacattgctggtgtatctggcttcggtgttgttcattttcctctgcctggccgcgctgtacgagagttggtctatcccattgtccgtgatgttgatcattcccctcgggattatcggagccgttgtcgccgcgcgccttgcggggtatgaaaacgatatttacttccaggtgggaatgttgacgacgattggcctgtcggcgaaaaacgctatcctgatcgtcgagtttgttgaaacacggctcaaagcgggatccgctttgttgcaggcgaccctggaaggggcgcgaatgcgtctgcggcccatcgtgatgacctcattggcgtttgtcgcgggtgtgatccccctggcgctttctgtcggtgccggggccgccagccggcgcgaaatcgggattgcggtgatcggcggcatgatttctggcacactgctgacattattgttcgtaccgttgttttttgttctgaccaaacaagggttggcacgacttaaggcgcgaaaatga

SEQ ID NO: 423876 - DNA, 633 bp, Serratia marcescens
atgatcaaccgccaaccgggacggccgatgaaggccaggccacggatactggaaaccgcctgcgttctgtttttgcagcagggcttggatatctcgctggacgagatagccaacgaggcgggaaccacccgtcaaacattatataatcacttcccgagcaaagacgccttggtgttggagacgttcaaccatcttatcgagaagatgcagccgccgatcgccgccattttggctcaggagagtatggatttaccgcaggtgctggcgcgtttcgcttcggtggtgcaggcgcattttttcagcgttgataacgtgcattttcagcggctgatggtgcaactgctgttgcagaaacctgagttgtacgccacgttgcgtgaacgcaatgccggacgggtgctgcaggcatttgtgaaaatgttggaacaggcgcggcaacatgggcaagtccaatttgctgatgcgcagcctcaggctatggcatttctgggcgcggtgatggggtatccgttgccggcggctctgttatccgatcagtggccgacgccggaacagttgcaacagatggccgaagcggctatcaccgcgtttcttttagcctggcgatattcgccgcctgccattaccgaataa

SEQ ID NO: 423877 - DNA, 1731 bp, Serratia marcescens
atgagcacactactgtctgcacaatctgtcggttacgacaacgcgttcggcgtcctgctgagcgagatttccttcaccctgaaaaaaggcgatcgcatcggtttgatcggcgacaacggctgcggcaaaagcaccctgctgcaactgctcagcggcgccctgcccatccacagcggaacggtgacattgtcacaacaatgcctgatggcgcgcatcgaacaacacttgccgcccgagctgcacgcctgcactctgctggatgcggtgctggcgcggcttccggcgagccaacacctcagcgaacgctggcgctgtgaagcgctgctcgccgagctggggtttgaaccggcgagctggacgttgaccgccggcaccctcagcggcggccagcacacccgcctgctgctggcgcgcgcgctgatccgtcagcccgatctgctgctgctcgacgagcccagcaaccacctggatctgcccacgctgctgtggctggagcagttcttgcgcagctggaacggcagcttcgtgctggtgtcgcacgatcgctatctgctcgatcaggtgaccaactgtacctggatcctgcgcgacaaaacgctgcagtttttccgcttgccctgctccgccgcgcgtcaggcgctggctgaacaggacgctgcggacgagcaccgccgtcgggccgagcaaaaagagatcgatcgggtggaaaaaagcgccaaacgcctggcgacctggggcaaagtctacgacaacgaagatctggcgcgcaaagccaagcaaatggaaaagcgcgtcgatcggttgaaggaagaacagaccaccctgaccgccgggagcccgtggcggctgcgattacagggagaggcgctggacgccgatcgcctgctggcgctgccgcaatgggccgtgcgcccggcgccggatgcgccggtgctgttcagcctggaacatctgcgcgtgaaaagcggcgatcgcattgccatcgtcgggcgcaacggctgtggcaaatcgtcgctgctgcgcttgctgtggcaggcgtatctgcttccctcggaacgcccggcgatcttccatccgcgcgtgcgtattggctattacgatcagagcctgcaacagctgcgcgatgaagacacgttgagcgaagcgctggcgcagtttgcgccgctgaccgaggaacagcggaaaatggcgctgatcggcgccggtttcccttacctgcgccatcatcagcagatccgttcgctgagcggtggcgagcgttcgcggttgctgttcgtcggcctgacgctggccaaccattcgctgctgctgctggacgagcccaccaaccacctggacatggcaggcaaagaagagctggcggaaacgctgcgccagttcgccggcgccgtcatgttggtcacccacgaccggatgctgatcgaacagagctgcaaccgcttttggctgatcgaccagcaaaaactggaggagtggcacgatctggcgccggtgtatcagcgcctggcgggtgaagcgccgacgttaccggcgacgggcaaggccaacgcaaacgccccgacgccacacgagcggctggaagacgaagaagcgctgttggccgcgctgttggccctagaaagcaaactggaggacgacctggcgcgcaagccgaagcaccagaaaccggcgctgcaggcgcgctggcgccgcgagattgccgacatcaccgcccggttgaatctgggctaa

SEQ ID NO: 423878 - DNA, 2430 bp, Serratia marcescens
atgttaaagcctcgcccgttcctgctgttgttgttattgctgtttggtttgcaactgacgccgttcggcgccgtcgccgtcgcccaggatgatcccgccgccgaaagcgcgcccgatcccgctacgcagctgaaagccgcgcaaaagcagttggacagcatgaagcagctggtttccaaagcgaccaccgataaccagctcagcaaactgcggctggcgaccgacgatctggtcgccagcatggaaaagctcgccaccgatctgcagcccgagcaggacaaactgaaagcgcagctggacgtcctggggccggccccggcggccggcgcgctgcctgaaaccccggcggtggcccagcagcgcaacgcgctgaacaacagcaagaaacagctggacgatgcggtaaaacgcgctcaggccatcaagaccagcgccttcgagctggggcaacagatcggcgatctgcgccgggtggcgtttaaaacccagctggcgctgaataccggcagcattctgggcatcaaattctgggcgccggtgctgcagccgtccgaaaatgacgtgcagcggctggatcagttcaacgccgagatgaaagcggcctgggatgccagttggcaggacgagtggcgttacggcacgctggcgttgttggcgctggcggtgattgtctggtcctgggggcgctatttctccgagcgtttcctcgcctgggtcagcatccgtttcctgccggacgggcgtctgcgccgcagctttatggcgctcgtcaccgtggtggtgacggtgatcaccacctctatcgcgctgaacctgctgtattacgtctttgttcgcgtgcagccgctgccggtgatgctggaggacttcgccgaaggctttaaccgtctggggattttctgcgcgctgatcgccgggctggggcgtgcggcgctgtcgctgaatcgcccgtcgtggcgcttggcttccatggataacgaggtggccgccgggctgcgttacttctcgccgctgctggccggcctggcgttggcgttcggcaccgtggagctgatcaacaacgtcgtcagcgcctcattggccaccaccatcttcggcaacggcctggtggcggggctgatcggcatggtgctgctggcggcgccgctgcgcggccagcgcattcggcgccggctggaacagcagggcgcgcacctggaaaaacgcacgctggtcagcgggctggtgcacctcgtcaccctggtctgttcggtggtgatcctgttttccctgcttatcggctacatcgccttcgcccgcttcctgacctaccaactgatctgggtggtgctggtgctgatggcgttctattttatggtgctgttcgccaccgatttgtgcgccgcgctgttttcgccgcagaccgtcagcggcaagatgctgaagaaaacgctcagcttcaaggatcgccatttggagcagatggcgatcatcaccaccgcgctggccaaatgttcgctgttgctgttgatgattgtctcgctgttcaacggctcgttcggcagcaccacgccgggttcgctgatggagaaaatcgtctccatcctgaccggtgaaggcttgcagcgtttcaacatcgtgcccggcaacctgctcaacgccgtgatctgcctggcgatcggcatctatattctgcgcgcggtgcggcgctggctgggatctgaactgctgccgaaaactatctcggacgtcggcatccgcgcctcgctggtgacgctgttcagcaatatcggctatgtgctggtaatactgatcaccctggcggcgctgggcatccagtggagcaacctggcgtggattgtcagcgccctgtcggtcggcatcggtttcggtttgcaggagatcgtgaagaactttatttccggcctgatcctgctgaccgagcgcccggtgaaggtgggggatatgatcggcatcggcggcgtggaaggcgacgtgcggcgcatcaacgtgcgcgccaccgaaatccagctcagcgaccgctccaccatgatcgtaccgaactcgcagctgatctcgcagaacgtgcgcaacgccaccatgggcaacgcgcaaggggtggtgaccatcgcgctgacgttcccgaccgacattgatccggagcaggtgcgcaatattctgcttaacgcttaccacgaatacgaaaacatcctggaaacgccggcgccttacgtgcgcttcagccagctggggccggacggcattatcctgagcgtgaccggctatgtgccgagcccgcgcatggtcggcgcgaccaagagcgaactgctgttcaacatcctcaagctgctgcgcgcgcagcgtgtcagcctgtccagcccgcaggaagtggtgtttatgaagcagcaggcgacgcgatatcaggccaacgaagaggaacactcctcctaa

SEQ ID NO: 423879 - DNA, 183 bp, Serratia marcescens
atggaggacggtgagatgaagaagattactctcgtgtttttgatgctgatgctgagcgggtgcatcggcggcggtggcggcccgtcgaatgcgccttcggcctcgccgaatgagccttatacctgcaccaaatccagcgccaacagcgactgttcgcaatcggtggagccgtcgatgtactag

SEQ ID NO: 423880 - DNA, 1020 bp, Serratia marcescens
atgaagaacgcctatgaaaaaaacatcgagccaaaacccgacctgacaatgggttttttgctgatgaagcaatttacgctggcttcggttgccggcctggtggaatctctgcgctttgcggcggatgaatccttctccagccggcagattttttgccagtgggagtggatgacctgcgacgatcggccggtcactgccagctgcggtttgccggtatcaccgactgcgaagctcgatttttccagagactgggactatttcgtggtcgctggcggattgctagaagagactcgcaacccgccagaatggttgttacaggcgctgcgggatctgcacgcccgcaatattccaatcattacgctgtgcagcggagcgttcgttgccggtaacgccgggctgctggataatcatcactgtgcgatccacttcactacccgcgacgagtttcggcttcgttttccaaaagccattccggtaatcgacaaaacctatattaaagacggcgggattatctcctgtccgggcggcatggcaattgacctggcggccgatctgatccgtcagcattgcggcctggtacgctcgcagaaggtactgaaatatctactgatggacgcgccacaacctgccggaaagacgaagcagaaagccccgcttaatgcgccggatgtgtatgagaacgaacgggtcagtaaggtcattgaatttatgaaacagcaccttgattcaccgatcccgctcgccgacgtggcggattttgcgggtgtgacctttcgtcagctcaatctgatattcaccaaatgcactggccactcagcagccgtttactggcgcagtatgcggttggagcaggcgcgaaagctgatggccgattcaagtaacagtattaacgaaattgccaccgcgaccggattttcggacgcgtcgcatctcatttcgtggtttcgtaagcaatacggtgagacaccgagttcgttccgcaagcgacgcagggaagtggaaaagttggtgaaggagtaa

SEQ ID NO: 423881 - DNA, 1386 bp, Serratia marcescens
atgtcaaataccatttctgtagaagacgttccccttaaccgctttcaccggttgctgaccgtgcgttcgggaggtggatcctttgtcgatggctacgtgctcagtattatcggcatcgccatgatgaaagtctcacctgcactaggtctgagcgcattctgggaaggattgattgccgcctcggcgctgatcggtatcttcttcggtggttttatcggcggtgcgctgactgaccgtcttggccgccgcgtactctatttcgttgggccgacgctgtttgtcgtctgctctctggcgcaatactgggtgcaaagcggtgaagtgctgtttgcgctgcgctttatgaatggcgttgccgtcgggattgaatacccggtcgcgaccgctttcctggtggagtttctgccgaagaaaaaccgcggcccctgcctcgcgacgctgactatcctctggttcgcaggcgcagccgtggcgtacctggccggcgaagccattcttaattttggtggacctgacgcctggcgcctgacactggcgagtacggccgtcattggcgctctgctgttcatcgtgcgtctgggcaccccggaatccccgcgctggctgttaagtaaaggccgccatgccgaggcagaagcgatcatccgccgcgtttacggccctgagtttggtctggataacttaccggtacaggctgaaggcaaaaacctttcttttgccaacctgctccattccggttacggcaagcgcatggcgtttgtggcgattttctggacctgctccgtcattccggtatttgccgtctatgcctttgcccctaaggtgctggatgcgctgcacctcaggggcaactgggcatcctatggatccgttgccattaccctgctgttcgtggtgggctgcgtcatcgcgactcgcctgattaatgtcctgggacgccgtaagctgctgctgcacagttttctgtggtcaggccttgcgctgttgctgctaggctttctgcgtgatggtccgtctgcggtgatcctgctgatgttcggtctgtacgcgctgttcatcggaggggcgcaggtgctgcagttggtctatcccaatgagatcttcccgactgaaattcgcgccggtgccgtaggcgtagggacgtcgctgtcgcgtatcggtgcggcggtgggcacctggctggtgccgctttcgttgcagaatattgggattggtccgacgatgtatatcgctgcagcgatcaccttctttggtctgatagtgtcgtggtttatggcaccggaaaccaatgcacgcagtctggaagacgcctcctcattagaggaggaacttccgcgtaacaaggtttcaatgcagggggtcatgccgaaacgacactctctttga

SEQ ID NO: 423882 - DNA, 918 bp, Serratia marcescens
atgccccagaaaaaagcgacgctcatcggactgatagccatcctgctgtggagcgcaatcgttgggttgattaaaagcgtgagcgaaggttttggcccggtgggcggtgcggcgctgatctacacctgtagcgcagtcctgctgttattcaccgttggtttcccgaaattgcggctgtttccaccgagctatctgatcctcggcagcatcctgtttgtctgttatgaactctgtctgtcgctatcgcttggcttcacccattccggccgtcaggccattgaggtcgggatggtgaactatctctggccgagtatgaccatattactgtcggttatcgtgaaccgacaaaagaccagcccgctgattattccgggcgtcattttagccgtcgccggaatttgccgggtattaggaggcgaacagggtttctctttcactgagatgacccataacgtaatggaaaatccgctcagttatggcctggcatttagtggtgccattatttgggcaatatattgcgtggtcaccaaaatcatcgccaatggcaataacggcattaccctgttctttattttgaccgcactgacgttatgggggaaatacctcacttccccgcaaccagaatttattctctcctggcatacatggataagtttattgctggccgccatcgccatggggtttggttatgccgcctggaacgtcggcattctacacggcaatgtgacagtgctggcggccgcttcgtactttatcccgattatctcggcggtactggctgcggttatgttgaagtcacacctgaacatcgcgttctggcaaggcactgccatggtgagcctgggctcgctgctctgctggtggtctacccgccgttctgcgccgaaagccttacctgtaataaaagaaagtaagtaa

SEQ ID NO: 423883 - DNA, 903 bp, Serratia marcescens
gtgttgacatttgaaggtatctacaccccggcaattaccccttacgcggccgatggcagtattgatttcgcccgctttgcggatgtgctggaatccctgattgaagctcgagttcacggcatcatcattggcggttcaaccggcgaatactatgcccagagcgccgaagagcgtaaggcgctggccgagcatgcgcgtcaagtcattggcaaccgtctgccgctgattgttggaaccggggcaatccgtaccgaagatgcggtggactacgcgaagcatgcccgcgagattaaagccgacgctattctggtgacctcgccgccgtacgcgctgcctacagagcaggaaaatgcccatcacgcgctaacagtggataaagccgcgcagttgccgatcatgctctacaactacccaggccgtatggggatcaccatgggtgaaacctacttccgcgaggtaagccgctcgtccaacgtggtcgccattaaagaaagctcgggcgatttcaataacctgcatctgctggcctgtaaatttccgaacattgcgctctcctgcggctgggacgatcaggcgctggagttctttgcttggggagcacgcagctgggtgtgcgccggttctaactttattccgcgtgaacatgtggcgctgtatgaggcttgcgtagtggaaaaggacttcgcgaaaggccgcaaaattatggccgccatgatgccgctgatgaacttcctcgacggcggaaagtttgtgcagtccatccgctatggctgcgagttgaacggtctgacctcgggccaggtgcgtgcgccgctgcaaagtctggacgaagaagagaaagcacagctgaaagcggtgattgccggggtgaaacgcaacgtggctgcggccacggcggcgtaa

SEQ ID NO: 423884 - DNA, 1503 bp, Serratia marcescens
atgaaacagcttcagacactcaacgatgtaacgcgcttggcgcatgaacttacgcttccggacaaggcgtttatcaatggccgtttcgccccggcgcgttccggtaaaaccttgacgacgtacaacccggcgaccggtgaagccatcgtaaatcttgctgcctgcgatgaatccgacgttaacgcggcggtgagcacggctcgcacagcctttgaggccggaagctggagcaaattggctccgggcgaacgcaaggcggtgctgctaaaactggcggcgctgatggaacagcagctcgcatcgctggctgtgctggaaagcctcgacagcggtaagccggtcagcgagtgtctggcggtggacgtaccggagactatccatgtgctgaagtggcatgcggaagccatcgacaagctttacgaccacacggcgccggtaggcaataatgcgatggcgctgatagtgcgtgaaccgattggcgtggtgggctgcgttctgccgtggaatttcccgctgctgatgctcgcctggaaaattggcccggcattggcggcagggtgttcggtggtggtgaaaccggctgaacaaacgtctctgacgtcgctgcgcgtggctgaactggcgtttgaagcgggcgttcctgcgggggtattgaatattgtgaccggtaccggaaaagaagtcggcgagccgattggtttgcatccggatattgatatggtgagctttaccggctccaccgccaccggacgtcgcttcctgcactatgcggcggaatccaatctcaaaaaggtcgtgctggagtgcggcggcaaaaacccggcgctggtgtttaacgatgccgacgatatcgctgcggttgccggacatgtgcttaacggtgcgttctggaacatgggcgagaactgctccgcgacctcgcgcctgctggtgcaggaagatgtgaaggaggcgctgttggcggaaatggcgaagcaaatcggtaactggacgatgggtaacccgttcgatccgcgcaatcggctgggtgcgatgatctctcctgagcactttagtaaggtgagccgctatcttgatatcgcgcgccaggaagggttacctattctgcacggaggtaacacgaagcagggggcttacgtgcagccgaccatcatcgatggcgtgacgccggaaagcgcgctgttccgggaggagattttcggcccggtgctgtgcgtcaccacgtttaaaaccgaaggcgaggccatcgcgctggccaacgacaccccatacggcctggcggcgtcggtttataccggcaagcttaatcgcgccatccgcgtttctcgcgctattcgcgccggaacagtgaccgtgaactgcttcggagagggggacgcaaccacgccgtttggcggctacaggcagtccggttttggcggtcgcgataaatcagtgtttgcgcttgaccagtacaccgagctgaagaccatctgggttgatgttgctgaagacgacgcctga

SEQ ID NO: 423885 - DNA, 306 bp, Serratia marcescens
atgttgctgaagacgacgcctgaagccgtgcttcgcggcctggaagacagaatccatttctatttctgtcttctggtggcggtggggctgtcgaagaagctgggacgcattacctccaaccggcaaaaaaattcctttattattaaatggctaaagaatgctcgggagatgggatctttccatcagtgcgccgacagtgaaattgtctggctgcgtggggagatcctgcgtcattcgcccgatcgggacccggaaccggttctgatgctgatttaccggacagccagtaaaatgcacagaacgtga

SEQ ID NO: 423886 - DNA, 690 bp, Serratia marcescens
atgagaacgggtaagacagcgctgtacgaggatctcaagcggcttatcttaacgatggaactcgacccggatgagctgctggatgaagccagtctgaccgctcagtacggcctgtcacggacaccggtgcgcgaagtgtttcagcgcctggcaggtgaagggtatctcgagatcgttgaaaagcgtggcgtacgcgtgattcccatgagccatgccacgctgcgcaactttttcctggtggcaccgatgatctatgcggccaccgggcgccttgcagctcagcactacaaacccgcgcagttgaaggcgctaaaagaaactcaaaagcgctttcgcaaagcggttcagagccatgatgtcgaagcgttggctctggagaacaaccgctttcacgagatcatgggggaaatggcggctaacccctatttgcaaccgagcctcggacgcttgctgatcgatcattgtcgtatcggtcacacctttttccgtccacgtaatgatgacatggagcggcgtttacaactggctgccgatcatcacgatgcgtttatcgtcgcactggaagcgcacgatgagcaggcggtagtggatctggtgttcgaacactgggaactctcccgggaaaacatggagatctttattgcgccgcagggactcaaggccgatgagcgtatccagtcacctgaataa

SEQ ID NO: 423887 - DNA, 1320 bp, Serratia marcescens
gtgcaaaagatcacttctctccctgctgatgacgccctgccagggtggtatcacaccagcccatctcgccccccacggcctgctcacgtggggcaaaaacacgctcgctgggccattgtgggggccgggttaaccgggctggcagccgcccgccagatggcgatccactttcctgacgatgaaattgtactgattgaagcgcaggaagtgggctatggccctgccgggcgcaatgcgggttttgccattgatgtgccgcacgatatcggcgccaaggactacatcggcgatgtcaaaaccgccaggcttatcctgcagctcaatacgctggggcagaactatctgcgtgctattgtgcaggagcacggaattgagtgtcagatgtcagaatccgggaaatatcaagctgccgtgggcgagcagggcgtggcgattcttgaggcctaccgccgcgggctagagaagattggccgtgaaacgcagatgataacgggcgaggagctacctgaccacatcggcacccgttactacaaacaggcgctttatattcccggcaccatcctgctgcaaccgtcggcgctggtgaaagggctggcgaacaatctgccatcgaacgtgacactttacgagtatacgccgatcacggctattaattatggcgacaaagtgacgctggtgcatgacaaaggcagcatcacggcagataagttgattctggcgaacaacgcatttgcggcgcactttggcttcctgcgcggacgcctgctgccgaccttcctgtacggtagcctgacccgcccgctgaccgccgatgagcagacccggctgggcggcaaaccggtctggggcgttatccccgcgcatccgtttggcagcaccgtacgccggacggtagataaccgcatactggtacgcaacagcttcagcttccacccagatggtcgtccgcgcgagcaccatctgaagaactttatcgctaaccaccgtaaatcctttgagcgccgttttccgacgcttgaccaggttgatttcgcctattcctggagtggggctatttgtctgtcggagaatcatgagggtttcttcggccagctggcacccaacgtgtacggcgcgctgtgctgcaacgggttgggtatcacgcgcggcacggctaccggcaaactgctggcggatatgattgccggtgagcgcaatgagttgatcgacttccttgtggcgtcaccgggcccgaataaaaccccgccggagccgttcctctccatcggcgttaattcagtactgaaatgggggcaatatagagcaggctcagaagtttag

SEQ ID NO: 423888 - DNA, 1443 bp, Serratia marcescens
atgcaaaccacctcgttgtccgatacccggaaaatctggcccgcactcaccgtctttttgttggtgttcgcggcttgcctgctgggcatcgtcagccgtcccgtcggatttttggcggtattctggccggtcaacgccgtactgctggcggttctggtgcgctgcccgcagtgggctacgcgcgccggctggggcatggcggtgctggggtatctggcggcggatctgctgaccggcagctcgctgcaaaaggcgttgctgctgaacgctgccaatctgaccggcgtggtggtggggtatctgctgttcatgcggctgtcgccgccggcgcgcatgctacagcgcggcgcctccagtatgtacctgttcggtatttgcctggccgccgccgccgcgaccggtgtagtgggcgcgggagtctcgcagtggctgttcggcaggccctatttaacctcgctggcgctgtggttctcgtccgaattcaccaactacgtcacgctgatgccgtttattctggtgtttcccgctgattggcgctatcgcctgcgcgtggcctgcgccatgttgacgcagcgcagccaatggccgcaggcggggcggaaaatggcggtgttggcgctgctggcgctggcggcggtctgcagcgtgctgatcggcggccccggcgcggtgatctttcccatgccggtgctgctgtggctggcgatgtccttttcgctgttcagcaccatgatcgcggtgctggtttatgtgctgtggtgccatctggcgatcgatttcgggttactgagcaccacgctcgacatgaaggtgctgcagaacacggtatcgatgcgtttgggcatcgcgctgctggcgctggggccgattgccgtcgccagcatgaactatgcgcgcaacgcgctgttgcgcacgctggagcacgtggcgagtcacgatgcgttgacccacgtgctgacgcgcaatgcgtttatgcagcgcggcgagcgagtgatagaccagaaaggcgagctggtgtgcgtcatgatgctcgacatcgattacttcaaatcgatcaatgaccgtttcggccacgccggtggcgatcaggcgctgatggcgtttacccgtgcgattgccgccgatctgagcgtcgatgatctgttcggccgcatgggcggggaagagttcgccatcgtctcgacgctcggccagccgcagcagggggtgcagctggccgaacggctgcggcaacgcattgaggcggaatcgatcaccatgccggccggccatccgctgcagatcaccgtcagcatcggcatggtaacctgcccgggcggttccggccacagcctggccgacctgctcaaactggcggatctggcggtatacaaagcgaaaaacgccggccgtaaccgggtcgctacgccggaatcttgcccgccgaacgatcctgaccgctga

SEQ ID NO: 423889 - DNA, 351 bp, Serratia marcescens
atgaaatacgtagacgggtttgtggtggcggtgccggccgccaataaggaggcatatctccggttggcggccgcagcggcgccgctgtttaaagagtttggcgccacgcgcgtcgtggagtgctggggcgatgatgtgcccgacggcaaacttaccgactttcgcggcgcggtgaaggcgcaggaaggcgaagtggtggtgttcagctggatagagtacccctccaaggcggtgcgcgacgccgccaacgagaaaatgatgaacgatccgcgtatgaaggcgctgggcgagatgccgtttgacggcaagcgcatgatctttggcgggttcgcgccgatcctcgatacctga

SEQ ID NO: 423890 - DNA, 474 bp, Serratia marcescens
atggccagaattacgcaacatctgtggtttgaaaaagacatggaggcggcgctgaattgctatgtcgcgctgatccccggttcgtccgtgaactggttttccgatctgccggcggatacgccgagcggcccggccggcagcgtgaagctggcttccttcaccctgggcgaccagcgctatgcggcgatcgaagccgggccgttggatccgttcaaccacagcttctccgtgatggtggaatgcgacgatcaggcggaggtcgaccggctgtgggacgcgttgtgcgtgggcggcgaggcggagcagtgcggctggctgcgcgatcgctgggggttgtgctggcagatcgtgccgcggcgcctgaccgagctgatgaacgatcccgacgccgcgcgcgtgcggcgggtcacggaagcgatgctgctgatgggcaaaatcgatatcgccggcctggaagcagcggcgcggggttag

SEQ ID NO: 423891 - DNA, 1344 bp, Serratia marcescens
atgcaaaaatcacagattcaaccgtgggttgcgcagcacccgctgttgcaacgaatggtcgccctcgagcctatcacctggttcaatccgcgcgcgacaacgctggccgcaggcttgccccatgtcggcctgaccgccgccgacgtcgccgccgcggagcagcgcctggcgcgctttgcgccttatctcgccgtggccttcccggaaacccggccgacaaaggggatcatcgaatccgagctggtggcgatccccgccatgcagcaggcgttggacctgcgctatgggctgcggcttggcgggaagctgctgctgaaaaaggacagccatctgccgatctccggctcaattaaggcacgcggcggcatttacgaggtgctgacgcacgcggagacgctggcgctggaggcggggctgctgcagatcggcgacgactacgcccggctgttttccgacgagtttcgccagttcttccgccagtaccgcatcgccgtcggttcgaccggcaacctggggctctctatcggcatcatcagcgcccgactggggtttgacgtcagcgtccacatgtcggcggacgcgcgggcgtggaagaagcaaaagctgcgcgacaacggcgtcacggtggtggagtacgccgaagattacggcgtggcggtcgagcaggggcgcaagcaggcggcgagcgatccgcgctgtttctttatcgatgatgaaaactcgcaaaccctgtttctcggctacgcggtggccggcggccgcctgaagcggcagtttgaccaacagggcatcgtggtggacgcacagcatccgctgttcgtgtatctgccgtgcggcgtcggcggtgggccgggcggcgtggcgtttggcctcaagctggccttcggcgaccatgttcactgcgttttcgccgagccgacccattcgccctgcatgttgctcggcgtttacagcgggctgcacgacggcattgcggtgcaggatcttggcatcgataaccgcaccgcggcggacgggctggcggtgggacgcgcctccggctttgtcgggcgggcgatggagcgcctgttgagcgcgttttacaccctgagcgacgaagagatgtttgcgctgctcgggctgttggacaagcacgaacatcttcagctggagccgtccgcgctggctggcatggccgggccgtggcgcgttgcggttcaggcgcggcagctcagcgaacaaggcgtgagcacagagagcctgacgcaggcgacgcacttggtgtgggcgaccggtggcggcatggtgccgccggcggaaatggcgaagtacctcgccgccgggcaggcgtctctgagtcaataa

SEQ ID NO: 423892 - DNA, 1356 bp, Serratia marcescens
atgccacacgataacaacgtagaaatccgagggtttatcgatgaccagccattttctcgctaccagtggttgatactggttttgtgtttcttggcggtagcgctggacggcttcgataccgccattatcggtttcattgccacgtcgctggtgcaggaatggggaatagaaaaaacctctctggggccggtgatgagcgctgctttggtcggcctggcggtgggcgcgttggccgccgggccgttggcggaccgtatcgggcgtaagaaagtgctggtgatctcgctgctgctgttcggcggcttcagtttgctgaccgccttcgccggctcgctgtcgacgctgacgctgttgcgtttcctgacggggctgggattgggggcggccatgcccaatgccgccacgctgatgtcggaatatgcgcctcagcgctgccgggctttgatggtgaatctaatgttttgcggttttcctctcggctcatcgctgggcggcttttcttccgcctggctgatcccgcatttcggctggcagagcgtgatggtgctgggtggcgttatgccgctgctgctggcgctggtcttgatcgccgccttgcctgaatccgcgcgctttatggttgcgcgcggctatgccgcacaacgcatcgccaaagtgttgaagcgcattgcgccactcccaaagacgccgcatttcatgttgcaggaagaggggcagataaaggcggcctcgccgctggggatgattttttcccgtcgctatctgctgggcaccttgatgctgtgcctgacttactttatggggttgatgattttctatctgctgaccagttggctgcccctgttgatccgtgaaaccggcgcttccgtcacgcaggcgtcgctaatcaccgcgctgtttccgctcggcggggggctcggcgtattgattatcggttggttgatggatcgcatgaacccgcacaaggtggtggccgtcggctatttgctcaccggcctgttcgtcggcatcatcggctttgtctatagctacccgccgctgatggcgatcacggtattcatcgccggcacctgcatgaacggcgcgcagtcatccatgccggccctggcggccggattttatcccacccagagccgggcgaccggcgtggcatggatgctcggtctcgggcgttttggcggcattctgggggcgatgagcggtggtgcgctgatgcagatgcagctgtcgttcagcaccatattcacactgctggccatcccggcgctgatcgcggcgctggcgttgatcgccaagcacctttccggctacccggcgctgccggcgccgctcaataaaaatgctgtgagggaataa

SEQ ID NO: 423893 - DNA, 1179 bp, Serratia marcescens
atgcgcacacaggttgcgataatcggcgccggcccggccggcttgatgttgtctcatctgctgcatctgcatggcgtggaatcggtggtgttggaaacgcgcagccgggcggcggtggaatcgaccattcgcgccggggtgctcgaacaagggacggtcgatctgctcaaccaggtcggattgggagagcggatgcggcgggaaggggcgcggcatcagggcatccggctggcattcggtggccgtcagcaccgcatcgatctggcgggattgaccgaccgcgccgtcaccgtttatgcccagcacgaagtcttgaaagacctgatcgccgcgcgtgtggcggcgcaggggcaactgtttttcgaagtggagcaggttgaattgaaggcgctggacagcgcgcagcccgaggttcactaccgtcacgcagaccagccgcgccagctccgctgcgacttcgtcatcggatgcgacggattccacggcatcagccgcgcggcgatgcccggcgggctgcggcaggattacacccgcatctatccgttcggctggttcggcattctggtcgaagcgccgccctccagcgacgagctgatctacgccagccatccgcgcggctttgcgctgatcagcacccgttcggccggcgtacagcgcatgtattttcagtgcgatccggcggaacaggtcgatcaatggtcggacgaccgcatctggcacgaactggaacagcggctggaaaaccatgaaggctgggcgctgaaaaagggccgtatcttccagaaaaacgtggtcggcatgcgcagcttcgttacagaaccgatgcgctacagacgcctgctgctggcgggcgacgcggcgcatatcgtgccgccgaccggcgccaaagggctgaatctggcgatggccgatgtctgcctgttgtcccaggcgctggagacgttttaccggcgaggcgactggcaacggctggacgagtacagcgacaccgctttgcagcgggtctggcgcgcagagcatttttcctggtggatgacccacatgctgcatacccgtcgggacgacacgcctttcgagcatcggctgcaactgtcagaattgcagtacacggtgaaatcgcgcagcgccatgacgatgctggcggagaattatgtcggggcgccattcccggcactataa

SEQ ID NO: 423894 - DNA, 1431 bp, Serratia marcescens
atgaaacagttgccgaaggattttctgtgggggggcgcggtcgccgcgcaccaggttgaaggcggttgggatcggggcggcaaagggcccagcatcgccgacgtgctgtccggcggctcgcacggcgtggatcgcgtgatgaccgacggcgtgctcgacggctatcgctaccccaaccacgaagcggtggatttctacggccgctataagcaggacgtggcgctgttcgccgagatgggcttcaaatgcttccgcacctccatcgcctggacgcgcatcttcccgaacggcgacgaagcggcgccgaacgaagccggtctgcagttttacgacgacctgttcgacgaactgctgaaatacggcatccagccggtgatcaccctgtcgcacttcgaaatgccttaccatctggtgaaggcctacggcggctggaaaaatcgccgggtggtggagttcttcgtgcgctttagcgaggtggtgatgcgccgctaccgcgaaaaagtgaagtactggatgaccttcaacgagatcaacaaccagagcaactaccgttatccgctgttcggctactgctgctccggcgtggattacacccgggaagacaacccggaacaggcgctgtatcaggtgctgcaccaccagttcgtcgccagcgcgcaggtggtcaaactcggccatcagatcaatccggaattcaagatcggctgcatgctggcctgcgtgccgttctacccgtactcctgcaagccggacgacgtgatgtacgccgtggaagcgatgcaccaacgctatctgtataccgacgtgcagatgcgcggctactacccaagctacctgctgcgcgattgggaacgcaaagggctgaagatcgagatgcagccgcaggacgcgcagatcctgcgcgagggctgcaccgactacatcggcttcagctattacatgagcaacgccctgcaggctaacgcggtggacggcagcgacggcatgttcggcttcccgggcaacgtgccaaacccgcacgttaaagcctccgactggggctggcagatcgatccggtcgggctgcgctattcgctgaacgtgctgtatgagcgctatcagaaaccgctgtttatcgtggagaacggcttcggcgccttcgacaaggtggaagcggacggtcagatcaacgatgactaccgcatcgactatctgcgcgcccatatcgaagagatgaaaaaagcggtgattgaagacggcgtagacctgatcggctacacgccgtggggctgcatcgactgcgtgtcgttcaccaccggcgagtacagcaaacgctacggcttcatctacgtcgacaaacacgacgacggcaccggcacgctcgagcgctcgcgcaagaagagcttcgactggtaccgccgggtgatcgccagcaacggcgaacagctgtaa

SEQ ID NO: 423895 - DNA, 735 bp, Serratia marcescens
atgtttacccataaagcaatcgccgagctcaacgccctggagctgatggtttataactacgtcagcaaacacaagaatcaagtgatgtacatgaccatccgcgagctggccgaggccgccggcgtgtccaccactaccgtgctgcggttttgcaagaaaatgggctgtgacggctattcggaatttcgcatccgtttcaagctgtatctcgaacagagcgatgcgccgccggtcgattccggcatcggcgaaatcctcagcttttttaaaagcgtcagcaacgatgagtttaatcagctgatcgatcaggcggtgcagcatatcgccgccgccgagcgaattattttcgtcggcatcagcacctcaggcgcattggggaaatatggcgcgcgttttttttccaacgtcgggaaattcagcacccacatcgacgatccttattatccggtcaacagcgacatgtataaaaacgcggtggcgatcgtgctgtcggttaccggcgaaaccgaagagatcctgcggctggccagccagttcagcctgcatcactgcaagatcatcagcattaccaacaacgaaacctcttcgctggcgcggctggcggacttcaacctctcctaccacgttccgcagcatttgatcggcgggcatcacaatatcaccacgcagatccccgtgctttacattattgaaaccatcggcaaacggcttgggcatattaattcggccaaataa

SEQ ID NO: 423896 - DNA, 474 bp, Serratia marcescens
atggaaatcaatgttaacggccgggtggttccactcggcgatatctcgcccgagaccccgctgctgtatgttttacgcaacgatctgcaattgaacggccccaaatacggctgcggcctgggggagtgcggcgcctgcacggtgctgatcgacggcgtcgccgcacgctcctgctcaatgccgctgtccgccgtaggaaacaaatccgtcaccacgctggaaggcctgggcaccgcggaagcgccgcatccggtacagcaagggtttattgatgagcaggcggcgcagtgcggttactgcgccaacggcatgatcatgacgctggtcgcgctgttcgaacgcgagccgcaggccgacgaacaaaccatcaagaaagaattggcttacaacctgtgccgctgcggcacgcatatcgagatcttgcacgccgccgagcgcgcccgcgatctgctggccgcgcggaggcaagcatga

SEQ ID NO: 423897 - DNA, 2259 bp, Serratia marcescens
atgagccgcctcgaactgacccgccgccagctgctgcaggccggcggtgtggtgatggtcagcagcctgctgcctgcgccattgagcgccttcgccgccgagtcggttgcatcgcccgccgatctgccgctggatcgggtggacagctttatcagcctcaccgccgacggccgggtgacggcgttcaacggccacgtcgatctgggcaccggcattcgcaccgcgctggcgcagatcgtcgccgatgaaatttgcgtgccgtttgatcacgtcacgatgatccttggcgatacgcaacgcacgccggatcaggggccgaccatcgccagcgccacccttcaggtgacctcagtgccgctgcggcaggcggcggcgcaggtgcggcacctgctgacggcgctggcggccaaagccttcgaactgccggccgaacagctgacggcggcggcggggcaggtatttgtgaccaggaacccagggcgctcgctgagctatgcgcagctggcgagtgggcaaaatctgcacgtgatgctggataaaaacgtgcagctgaacagcgaacggcagaaccactacgtgggccgcgccgtgccccgggtcgatattccggccaaggtcagcggtgggctgacctacgtccacgacctgcgcttgcccggcatgctgcatggccgcgtggtgcgcccgccatacgtaggcgccgacagcagcgcgccgttgggcggcggcctgctgtcggtggatgaaagctcgatcgcgcacctgccgggcatcgtgaaactggtggtgatcaacgatttcatcggcatcgtggccgagcgcgaggagcaggcgatcgccgccatgcgccaactgaaaaccgaatggaaaccctgggccgggttgccggatctgtcgccggaagcgctgcccgccgcgctggaggccaatccgaaaaccgaccgcgtgctgcgcgacgacgcgggcactgatgccgcgctggcattgctgcataccgcagtgcaggccgactatgtctggccttaccatcagcacgcctcgatcggcccttcctgcgcggtggcggaagtcaaagacgggcgggcgcaggtgtggtccggcacgcaaaacccgcacgatctgcgcaaagacatcgccaggctgctcgagctgccgcctgggcaggtgcacatcacccgcatggaggcctccggctgctatggccgcaactgcgccgacgacgtctcggcggacgcggcgctgctggcgcgggccaccggccggccggtgcgcgtgcagctgatgcgcgaacaggaatccggctgggagccgaagggcaccggccagctgattcgggtgcgcggtggcctcgacgcgcaaaaccgggtggcggcctacgaattgaaaaccagctacccctccaacaatgccgtgaccttgccgctggtgttgaccggcaaagtggccaaccggggcgacgtgcagcaaatgggcgatcgcaccgccattccgcaatacgagtatccgcacatgcgggtggtctgtcaggacgccgcgccgatcgtgcgggcttcgtggatgcgcggcgtttcggcgctgcccaacgtgttcgcccatgagtcctggatcgacgagctggcctggcgcgccggcgaggatccgatcgcgtttcgtttgcgctatctgaacgatccgcgcgcggtggccttgattgaagcgctgaaacggcaggcgaactggcaagacggtccggcgcatcgctcgcgcgccgccggcgccgaagtggtgagcggccgcggcttcgcctatgcgcgctattttcacagcaaattccccggcttcggcgccgcctgggcggcctgggtgtgcgatctcagcgtcaaccgccgctccgggcagatcacgctcgataaaatcttcgtggcgcatgactgcggccgcatgatcaacccggccggggtgcgccatcaggtgcacggcaacgttatccagtccgccagccgggtgctgaaagaatttgtgaccttcaacgagacgggggtgacgtcattggactggggcggctatccgatcctgcgtttcgacgagctgccgcagatcgatatccagctgatcgatcgcccggaggaagcgccgatgggcgccggagaatccgcctcggtgccgagtgcggcggcgatcggcaacgcgctgtttgacgcgctcggcgtgcggctgcgcgaggtgccgtttacgccggcgcgggtgcttgccgcgctgcgcgcccacgccggccattaa

SEQ ID NO: 423898 - DNA, 1299 bp, Serratia marcescens
atgagtaagatgaaaaagatcgccgggtggggcggggttacggtgctcgccgtggtggtggccggcgttgtcgccagctggcaaccggaaatcgcgccgctcgccgccgacgcgacgcacagttttagcgaggcgcagattgcgcgcggcaaaacgctggccgatctcggcgattgcgcggtgtgccacacccgttcgggcggcgagcgcaacgccggagggctggcgatggcgatccccttcggcaccatttacaccaccaacatcacgccggacgtggaaaccggcatcggcagctggagctacgcggcgtttgaacgtgccatgcgccacggcgtcgatcgccagggccgctacctttatccggcgtttccctataccgcctttacccgcacgagtgacgacgatctgcaggcgctgtacgcctacctgatgtcgcaaccgccggtcaactatcggccgccggccaccgatctgcactttccgttcaatatccgccagggcatcttcgcctggaacctgctgttcctgacgccgggcgcgatgcaggaaaacccggcccaaagtgccgcctggaaccgcggcgcttatctggccgaagggctggggcactgcagtgcctgccactcgccgcgcaacgtgttgttcggcgagaaaaccggtagcgaccacctggccggcggcgtggcggaaggctggacggcgccggcgttgaccggccgctcgcccgcgccgctcgattggacgcagcaggatctggtcgatttcatgcgtaccggctactcggccaaccacggcgtggccgccggcccaatggcgccggtgatcgaagaagggttgtcccgcttgccgcaggcggatctgcaggtgatcgccgtctatctgcgcagctatcatcctgaaacggcggcgggcgcgacggcggccacgttgaacgctaaggcggagcggcaggtcgagcccctgagctcgcaaggcgcgcggctgttttccggcgcctgcatggcttgtcatgcgcaggaaaagggcgcgcagatggcgggggtgcggccttctctggcgctgaacaccaacctgttcgccgaggcgccggacaacgccattcgcgtggtgctggatggcatacagcggccggcgaacgccgaactgggctatatgccgggcttccgccataacctggatgacgcgcagatcgccatcctgctcaactatctgcggcagcactacgccggtcaggcgccgtggcccgatctgaccgcgcaggtcagccgtttgcgcgccgaaaccgcgcagaaatag

SEQ ID NO: 423899 - DNA, 624 bp, Serratia marcescens
atggacaggggcagtaaaatgaatacgttagacgcaatccgccagcgccgcgccaccaaacagtttgatgcgcagcacgtgatgacgctcgaagagaaaaaagcgttgctgactatcgcgctgcagggcgcacccagcgcttttaacctgcagcactggcgcccgctgctgatcgaagatcgcgcccagcgcgagaaaattcgcgaagcggcgtgggggcaggcacaggtcaccgacgcgtcgatgctggtcgtgctgtgcggcgatctgtcgagctgggagtcacaggtaaaaaacgtctgggccgaggcggcggagccggtacagcagttcatgatcccggccgtcgatcagtattatcgcggtaagccgcaggtgcagcgcgacgaagtgatgcgcagcagcggtatcttcgcccagacgctgatgctggcggccaaggcgcagggctacgactcttgcccgatggacgggtttgatttcgacgccgtgggcgagatcatcaacaaaccggcgcactatcagatcgcgctgatggtcgccatcggcaaggcggcggggcagccttatccgcgcatcggcaaactgccgttcgacgaggtggtgaaaaccgatcgtttctga

SEQ ID NO: 423900 - DNA, 894 bp, Serratia marcescens
atgaaaacgaaaacgcgcggcgcagtgcaaatgatcctcgccatgaccatctccggcaccgtggggtggccggtgctcgttttagggcagccgcccgcgacggtggtgttttggcgctgcgcgttcggcgcgctggccatgctggcgacctgcgccgcactcggtcagctgaaatcaggcgcgatcaaccggcgccagctgagcttcgccattctggggggaatcgccctggtgctcaactggacgctgctgtttgccgcctatgcgcatgcctcgatcgcggtcgccaccgttacctaccacgttcagccgttcatgttggtggcgctgggggcgctgctgttcggcgaaaagctgacggctaatcggctgggctggcttctgctggcgttcgcgggaatggtgttgatcgtcaccggccggcaaaacggcggcggcgatgactatctgctcggcgtggcgctggcgctgggcgcggccctgatgtacgccattgcggcggcgatcgtcaaacagctggccgcgctgccgccgcagctgatcgtgttgattcagcttaccgtcggcgcgctggtgatggcgccgttcgccggcctggccacgccgcctgcggccccgatcgactggctgctgctggcgaccctcggcctggtgcataccggcttgatgtccacgctgctgtacggcgccattcagaagatccccacctctctggtcggcgccctgtcgttcatctacccggcggtggcgatcgtggtggactgggcggcgttcggccaccgcctcagcctgttgcagctactgggcacgctggcgatcctgggcgccgcggcgggcatgaacttcggctggcggctctcgccggtcgcccggcgggctgataaaaccggttaa

SEQ ID NO: 423901 - DNA, 555 bp, Serratia marcescens
atgcagaacatcacgccaatcggcctcttgtcggcggcgatccgccgtgagcgggagcgagtgaacctgtccgtcaccgaactggcgaagcgcgcgggcatcgccaagtccacgctgtcgcagctggaagccggcagcggcaatcccagcctggaaacgctatgggcgctggcgatggcgctggatgtgccggtcagccggctgatttcacagccgagcagacaggtgcaggtgatccgcgcccatgagggtacgccggcgctgtcggagcagggcaactacgccgccacgctgctggccacctgcccgccgggggcgcagcgcgacatttaccggctgcgggtgcagcccggagaagccaagctttcccggccgcatcctcccggcaccgtcgagcatgtgattatcagcagcgggcgcgcgcgcctggggccggcagaccagccgcaggagctgagcgccggcgattacatcagctattccgccgatcgcgagcacgttttcgaagcgctggagccggataccaccgccgtgatgctgatcgaacagggctaa

SEQ ID NO: 423902 - DNA, 1926 bp, Serratia marcescens
atgaaaatcgctattccttccctgctgttattcgccggtttgacggcgacgcacccggccaccgtgttggccgtcgcaccgcccgccgcagcggatcagggccagaacgacacggccaacaacgatttcagcttcgtacgctatcgcgcggattaccgcgtcaacgccaacgccaccaacgtgaagacggaaagctacgaagtgctgctgaagaccaaggcggcggtcgagaaattcagccagatccgcctgagctacagcgaaaaaatggaaacgctggaggtggtcgccgcttatacgctgaccgccgacggccagcgccacgacgtggcgcccgatcgcatctatacccaggagagttactccagcgccacggcgccgctgtatgccgaccgcaaagtgcgcgtcatcgtgttctccaacctggcgccgggatcgcgcgtggtgtatgagctgcgccgcacgcaaaacaccccgtatttccccgactatttcggcctgtgggagacgttcagcgttttcgatcagttcgacgatgccgaagtgaccctgcaggcgcccgccaagctgccgatgcatattttcacgcgcggcgtggcgggcggagacaagccgcagatccgcgacgggcaggcgcactggcgctggcattattcacgcagcgcgccgatgaaatcgcaaaactgggcggcggacagctggaccttcagcccgaccatcatggccagcacctaccgcgagtggccgcagttggccaaggcctaccagctgaaggccggcgcggcggcgaaggtgacgccgggcatccaggcgttggcggacaacatcaccgccggcatcagcgatcggcgcgagcaggcggaggccctctatcgctgggtggcgcaaaacattcgttacgtggcggtgtatctgggcaacggcgggctggagccgaattcggcgcagagcattctcgacaaccactacggcgactgcaaggatcacgtggtgatcctggaggcgctgctcgccgccaaaggcattgcaagctcgccggtgctgatcggcatggacgaaggcccgatactgcctaaagtgccgctgctcagccgctttaatcacgccatcacctacgtgccggaattcaaactgtacctggattccaccaatccgtgggcgcgcttcgggcaactgccggaaggcgatctgggggcgccggtgctgctgacgcgcgacgccaagctggcgcgcacgccgggcagcgacgagcagccggtcaagagcgcgctgagcgtcgatttcgtgttcgacaaagcgggtaatctgcacgggcaaaccgagcgtcggctgagcgaagtggaagagattgacctgcggggctacttctcgcagatcaaccggcagaaccgggcgcaggccgaagcgtcgatcatgtccgcctccggcatcgacggcagcggcgaggtggcgatgaacagcgatccgctggatctcaaaaaacagttcggttaccgcttccgcttcaaggcggacgactacgtcgatttcggcgtggtgggtggcatgacgctgcccaatccgcccggcggcaaatcgttccgcacgctgtacaccaccacggcggcgccgggcaacgaaacgccgttctactgcagcgcgcagcgctacgacgaaacctaccgtctgcagctgccggccaacgtgccgatcatcgccattccgcaagacaggcagttccgcaatgcggcgggcgactatcgcgtggcgtggcggcgcgacgggcagcaggtgatcgtcaatcatcagctgcaggtgaacgccattcgcggcaaggaggcgctgtgccaggcgcaggattacccggcgttccgcgagctgttccagcaggtgcggcgcggtttccgcggccaggtggtgtacggcgaattggccaccggcaagtaa

SEQ ID NO: 423903 - DNA, 357 bp, Serratia marcescens
atgagaaagatatttttggcctgcccctacagccacgccgacgccaacgtcgtgcagcaacgctttatagcgtgcaacgaggtcgccgccgctatcgtgcgcgccggcagcgccgtttttagccaggtcagcatgtcgcatccgatcaacctgtgtttgcaagagctcgacaaaaccgccatcggcaggctgtgggcgccgatcgacgccctgttcatggcggcgatggatgagttgatcgtgctcgatttgccgggttggcaagagagcggcggcatcaagcgcgaaatggactatttcgccgcacggggctgccgcgtcagcctgtggtccgaggtcgcgggcgagttcaactga

SEQ ID NO: 423904 - DNA, 1233 bp, Serratia marcescens
atggctgagttcggtaatttcatcatctatatcatcatggccggcaccctgatcggcgcgctggcgtcgatcgtcaaaccggaaggtgaactggggcgcgagttcgtcaacggcattcacgccatcggcccggtgtttctcgcccaggcaggtatcatggcggcgatcccgatcatctcttacctgatcatgcacagcatcggccccttcttctcggcgctgggctccgacgcctcaatcgcggcgctggcggtgatcgccgtggacatgggcggctatcagctggccgacgccatcgccgccaaccgcgacatgtggatcgtcgccatgctggtgggatacacctccggcgccagcatcgtgtacctgatcccggtcgggcttatcatgctgaaccgcgacgaccataaatatctggcgctgggcgcgatggcgggcctgatcagcattccgttcgccgtgttgatcgccctggtgaccatcaccttcaataatctgccggtcagggagatcatttccaccacctcgcccgccgcacactacctgcagctggacttcctgcaggcgctgcggctgctgtcgccgctgttcgtcctgtgtttcctgctggcgctgggcctgaagctgcggccggcggccatggtgaaggggttcctgatcttcggtaaggcggcggacgcctttatcaaactggtgctggcgctgtgcatcatcgagcatttcaccggcgtgtttaaaaaggtgttcggcggctgggtattcgatccgttattcgccgacaaagacgaattattccgcgccatcgagattgccggttacatcggcattatgttggcgggcacattccccatttgttatttgttccagcgctattgccgcaagccgatgcatttcatcggcaaaaaactcggcttatcagataccggcgcgctgggctttattatggtgttggccaatatcatcgcggtttatcacctgttcaaaggcatgcgggcgcgcgataaggtgctgtgcgtcgccttcggcatctgtgcgcaggccacgttgggcgatcacctggcgtttaccgccaacttccaaccttcgctggtgctgccgatcatgatgggtaaattcctcggcggcatgattgccgtgctgatcgccatcaagatctcggtgccggaagccgaattgctggaaaaagaacagacgcaaaggcaagcgacggccatcgccgccgccgctcgctga

SEQ ID NO: 423905 - DNA, 1461 bp, Serratia marcescens
atgatgaatcaacgttatgccgcgattgatcagggaaccaccggcacccgggtcgtggtgttcggcgaagacggcaggcaccattcgccagccagcatgccgcacaagcaaatcacccccaatccgggctgggtggaacacgacgccctggagattttggcgaatatccgccgctgtctcagccagtgcgacatggtggacgccatcggtttggggcatcagggcgaaagcctgctggcctgggacgccgacagcggcctgccgctgtacaacgccatcgtttggcaagatcagcgcaccgagccggagatccagcgcctgaaacgcgaaggcgtcgaaccgctggtgatggcgaaaaccggcctgccgctcgatacctacttctccgccagcaagatgggctggctgatgaacaacgccccgggggccaggcagctggcgcaacgcggccgcctgcggctcggcaccatggacgctttcttcctgttccacctgtgcggccggcatctcaccgactataactcggcctcgcgcacctcgttgttcaacatccataccctgcagtgggacgaggagctgtgccgtttgttcggcgtgccgatcgacagcctgcccgaggtcagagacaacatcggccacttcggcgacgtcgcgctcaacggcaaaccggtgccgctgacggcctgcatcgtcgaccagtttgccggcacatacggccacggctgccatcaaccggggcagatgaagatcaccttcggtaccggcgcctttttacaggcgatcaccgggccgcgcccgatcgacgccggcgagtccggcctgttgcccacgctgtgctggaagctacccggcagcgagccggtgtatggcctggacggcggcgtttataacgcagcctccgccattaactgggcgagaaagatcggcctgttcaacgacttcgatgaattcggcgatttcccggcccagccggccatcgcgcgcggcctggcctttgtgcccgcgctttccgggctggcctgcccgtattgggatcgctccgccgccggggtgtgggccggcctgtcgctggaaaccgaacgcaaggatctgctgcagtcgatcctcgaaggcatcgccatgcgttctgccgaggtgatcaacgccatggataagttgaaaccgatcggcgacagcatttcggtggacggcggcctgtccgccaaccgctatttcacgcagttcctcgccaacctgatccaaaagcgcatcgtcacgcccgccaacaaagagatcaccgctcagggcgtggcgcagttggcgcgtaaagggctgggtatggaacagccgctcaaggtgctcaaccgctatgaagtgacggagcccgccgaggtcgatatggcggtctggttcgcccgctatcaggaaatcatcgcgcgctcgcgcggcttacgttcatcgcaggaggagcaccatggctga

SEQ ID NO: 423906 - DNA, 1404 bp, Serratia marcescens
atgatggaagaacaaacgggttgggacattgtcgtgattggcggcggtgtggtcgggtgtgcggtattccgcaaattctgcctgatgggcgcccgtacgctgctgttggaaaaggggggcgatatcctgtccggcgccagcaaagccaacagcgcgctgctgcataccggcttcgatgcgcccagcggcagcctggagctgcgctgcatgcaggccggctaccgggaatttatcgccatccgcgaacgcatgaatctgccgctgctgcccaccggcgcgctggtcgtggcctgggacgagcagcagttggcggcgctgcccgcgatcgtgcagcaggcgcatgacaacggcgtgccggacgtggcgcagatcgacgccgccgagctgtatcgccgtgagccgcagctggcgcccggcgcattggcggcggtagaggtgccgggcgagagcgtgatcgatccctggagcacgccgctggcttacctgacgcagggcgtcaaacacggcggcgactatcgcttcaataccgaggtgaccggcgccgaacgcttgccgaccggctggcggctaaccagcaaccggggcgagtttcacggcaaaatcgtcatcaactgcgccggcaatcagggcgaccgggtagaaagtttctgccatcagcccgagtttgaaatccgcccgcgcaaagggcagttcctggtgttcgacaaggccgccgccgggcaggtcaacgccatcatcttgccggtaccgacggcgatcaccaaaggggtactgctgtcgaaaaccatctttggcaatctgttgctggggccgaccgccgaagaacagcaggatcgcgagacggcgacggtggacgaaaccaaaatgcgcgagctgatcgaacaggggacgcggctgctgcccacgctggcaaattacagcgtgaccgccagctatgccggattgcgcccggcgacagagcagaaacactatcgcattcagcactatcccgagcggcagtggatctgcgtggcgggcattcgttccaccggcctgacggcggcgctcggcatcgcgcaatatgtggagcagctttaccgcgaccattttacgccgtgcttcacgccgacggcgccgcagaccgtgcattggccgcagatgccgatgcttgccgactacgcgctgcgcgattacgcgcgcccggacaacggcggcatcgtttgccattgcgagctggtgacccagcgggaaatcgaggcggcgttcgattccgccgtgccgccggagtgcatcggtgggctgcggcggcgcacgcgcgtgatgatggggcgctgcaacggtttttattgcagcagccgggtggcggaaatggtgggcgatcgttttggccagacgctggccgtagggagcattgatgaaaactga

SEQ ID NO: 423907 - DNA, 1224 bp, Serratia marcescens
atgaaaactgagtatcaggtggcgattgtcggcgccgggccggccgggatcgccgcggcgaccgcgctgcggcaggcggggatcgaggatgtggtgctcctggaacgggagcagcaagcgggcggcgtgccgagacactgccggcaccccaccttcgggctgcaaacgttttaccggccgatgctcggctccacctatgtcgataagatactggcgcgcgccgggcaggtggagatccgcaccggcgtgacggtgctcgccatcaagccggacggcgagctgaccatcacggatcgccacggcgtcagcaccttgaaagcgcagcgggtgatcctggcgaccggcgtgcgcgagacgccgcgccatccgcgcctggtgagcggcctgcggccgcagggcgtgctgaccgccggcgcgctgcagcagttcgtctatctgcgcgggctgcagccgggcaaggcgccggtggtggtcggcaccgagctggtcagtttctccgcgctgtggacgctgcgcaacgccggcgtgcgcgccgtcgccatgattgaaagcggcggcagacccgtcgcctggcggctgagcgcgctctatgcgcgcctgatgggggtgccgattcattattattcgcgggtgaccgatattgccggccgcgatcgggtcgaatccatcgaggtggagaaccgccgcggggagaaacggcgcatcgcctgcgacagcctgatcttcaccggccgcttcaccggggagtatacgctgatccgccagagccacctggcgcagcggccggacagcggctgcccgctgaccgatcagttcggccgctgttccgacgccgcctatttcgccgtcggcaacatgctgcatccggcggacatgggcgaccagtgttatcaggaagggttgcgcgttggcgaagccgttgcccgttcgctgcggcgcacgctgccgccggcgcggcaaatgcttccggtgcggcacgacgagcggatccgcctgaccgcgcctgccaacgtggcgctgatcggcaaacccagcacggtcacgatcaatatgcgggtagagcgggcggtgtccggttcggtggtggtgcggctgggcgaggaagtgctgtatcgcaaaacgcatcgctgcctgccggaacggcggatcctgctgcgcaatatcgctttgccggccgacggcgagcgtgacgcgctgcacatcagcatcgaatccgccgggtga

SEQ ID NO: 423908 - DNA, 771 bp, Serratia marcescens
atggatatctctaattccgtggataggcgcaatgaaatactggcgctgatccaggccaacggccgggtttacgtgaatgagctggcggataaattccaggtttcgcaggaaaccattcggcgcgatctgaacaagctggaagattatcgcctgatcaagaagatccacggcggcgcggtcagcagccagttcaaattcgagcatgaattcaatgaacgggccaaaatcgccgaggccgagaagcgcgccatcgcggagaaagcggtgacgctgatccagccgggcgatacggtgttcgtggatttcggctccaccacgctggagttcgcccggcagctggcgaccgtcgatcagctgacggtcatcaccaattcgccgctgatcgccaacgtctgtctggaaaatgactccatcgacgtggtgctgatcggcgggcagttcatcggctccaaaatggagtgcctgggggcgatcgcgctgaataacattgaggcgtttttcgccgattacgccatcatcggcgccggcgcggtcaatgtgcagaccggggtgatggatcaaaacgtcaatgaggcggccatcgcgcgcaaaatgattgcgcagagccgcaaatgcatcgtgctggcggacgaaaacaagctgcgcgggcatgcgatgaccctggtggccaaatggcccgagatcgattatctggtgacctccgacagcggcaacgcgctggaggggctggttttcccggccaacgtcaatgtgttggtcgcacaggtataa

SEQ ID NO: 423909 - DNA, 996 bp, Serratia marcescens
atgactggcaagagaaagtttgtatctgagttctctattggtatgacttcaaaaggatggctaatttttactccagatcaacttcactcagatggaagaatgaaagaggaacatcaaaacatagcagataatagtcatatttatctcatttgtaaaaggccaaaagcaatatgcagtaaagagatgcttctgataaacgatggaattctgagtggagaagttattagcagagtcaatggagaggaggttatatcaacctatagttttccttttaaatttgaaagtggggaggaaagtatagtggtggcggactatcctcataaaaaaattcatacgttgggtagcgatggcaaatggattcgatattggcctagtgactttctagctttatataccaagaatgagatctaccatgatttggaggtgctctatgtaggtcaagcctttgcagaaggaaaaagaacagcaatggatagacttagaagccattcaacacttcagaaaatccttgcggatactatgtgtgactttcctgatgatcaaatatttatagttacattggaatatgatgattacatactagcctcttcatttaacagtatggataaatctagtatcggtgggcaggaggatgatggcagagggaggagtataatagaccatcctctttcaaagaaagagataatttgcctttccgaagctggtttaattaggtattttcagccgaagtataacgaggtttataaagagagttttccagcggctgaccaaaagattctttcaaactgcttgggtttggatttctcaggactttctgttgaagtcgagctgtatggttcgggtcttagattgttttcagaaaatatatttgcacaacatcatcatatcgcgatgtttaacttggcagatgagtcagttagattgggctttttcacccattgcgatggtactaatgtaccattcactatggatgatgttattccaatgactagataa

SEQ ID NO: 423910 - DNA, 1674 bp, Serratia marcescens
atgtctgccggtttattgaaaacgatagctctgagcgtggccctggcctgcccccttcccgccgcctttgccgccgatctcaccgccggtgcggtcgccgccccggatcggtatggcgctaacgtcgccgcgcagattttgcgggccggcggcaatgcggttgacgcagcggtcgccaccgcctttacactggcggtcacctaccctgaagccggcaatatcggcggcggcggctttatgacgctgtacgtcgacggcaaaccctatttcctcgactaccgcgaagtggcgcccaaggccgccggcaaaactatgtatctgaacgagaaaggcgaagtgatcgaaaatctaagcctggtgggcagccgcgccgccggcgtgccgggcaccgtgctggggttgtgggaagcgcataaacgcttcggcaagctgccatgggccgaactgctgacgccagcgatcggctacgcccggcaaggtttcaccgtggcggatcagcagtatcagtaccgtgaagacgccaacaagctgttcgccgggaaaaccaacttcggcgactatttcggcgccatgaagcccggcgcggtgttcaaacagccggagctggcggccacgctcgagcgcatcgccaagtcgggcgccgacgatttttatcacggcgaaaccgcgcgcctgctggtggcgcaaatgcagcgcgacaatgggctgatcggcgcggcggatttggccgactatcgggtgaaatggcgtgaaccgatgcgcatcagctggcgcggcaacaccgtatataccgccccgctgcccagctccggcggcattgcgctggcgcagctgctggggataaaagaggatcgcgccgccgatttcaagggggtgccgctgaactcggcgcgctatatccacctgctggcggaaatcgaaaaacgcgtgttcgccgatcgcgccgactacctcggcgacccggatttcactcacgtgccggaagcgcagctgatcgcccccgactacctgaagaaacgcgccgccgagatcaacccgacggcgatctcgccgaccgaacgggtgcggccggggctggaaacccaccaaaccacccacttctcgatcgtcgatgccgccggcaacgcggtcagcaacacctatacgctcaactgggacttcggcagcggcgtggtggtcaaaggcgccggcttcctgctcaacgacgagatggacgacttcagcgccaaacccggcgtcgccaatgccttcggcgtggtgggcagcgacgctaacgccatcgagccgggcaaacgcatgctctcctcgatgagcccgaccatcatcacccgcgacggcgaggtcagcctggtgatcggcacgccgggcggatcgcgcatcttcacctcgatcttccaggtgatcaacaacctctacgattaccatctgccgctggcgcaggcggtggccgcccagcgtgtgcaccatcagctgttgccgaaggacaccctgtactatgacagctttgcgccgctgaccggcaaaccggcggacgagctgaaagccatgggctacaccctcgaagaccagggctggaacatgggggatattcaggccatccgcatcgatggccgcacgccggaaaccgcgtccgatccgcgcggccgcggcgtcggcctggtggtgaacaagtaa

SEQ ID NO: 423911 - DNA, 864 bp, Serratia marcescens
atgttaaaacactggccccctttgagcgcgctgcgcggtttcgaagcggcggcgcgcctgggcagttttcatcaggctgccgaagaactccaccttacccagtcggccatcagccagcagatccgcagcctcgaagcgtttctggagcagccgctgttcttccgcaccggccgcagcgtggcgctgaccgacgccggccacgatctgttcagcaccgcgcaggtgatgctgcaacagttggcggtcggcattcgccgtttggatcagtaccgcaaacccaaccagctgatcgtcaacaccaccccggctttcgcccgccactggctgacgccgcggctgggcgacttcaatcggcagcatccgcaggtcgacctgtggctgttcaccagctttgaaccgccgaatatggcgacggacagtatcgatctggcgatccgcgacgatctcagcgcgcaggcggactgcacctttaacctgctctgcagcgaccggctttatcccgcctgccaccccagcctgctggcgttggcggcggagcagcgcgtgaccctgcacggcgaacgggagatggactggagccactggacggtggcgggcggcgcgcacgtcggccagcgcgacagcgggctgaacttctccgatcccggtctgctgctggacgccgcctgcaatggcctcggcatcgcgttggtcagccaactgctggcgcagcacgcgcacgacgccgggctgctgcaaccgttaaccgagcaacgcgtgcgcggcgccaactgggcgtggctgctgcaccgcgacagcgagcacaacccgctcgcccggcacttctgccaatggctgcagtcggcgctgcccgccggcgcataa

SEQ ID NO: 423912 - DNA, 1131 bp, Serratia marcescens
atgtcaactcgtcgcgtatttattaaacagttttccgccgttgccggggtcggtttgacggcctcgttaggcattccgttacgcagtcacgcagaagctgcgcttaatccggcctggcggatgcccgacgaaggggaaccgcagcagcgggcgtttctcgccttcggcgcgcagcgggccatctggggcgaattcacggcggatgtgcaggcggcgcaggggcgtatcgcccgcgccatcgccgagtttcagccggtgacggtattttgccgcggcaatgaacggcaattggccgaggccacctgcggcagtcacaacgtcagctatgtcgtcaccgagctggatgacatctgggtgcgcgatttcggcgccaatttcgtcgtcaacggcgccggcgaactcggggcggtggatttcaacttcaacggctggggcaataaacagcggcatgccagggatgcgcgcctggcggcgtttgccgccaaccgctacggtgcagcccaactgcgccgcagcgcactgacaggcgaaggcggcggtatcgaagtagacgggcacggcaccggcatcatgaccgagagcagttgggtgaatgcgaaccgcaatccgggctggagccgggaacgggtggagcaggagctgaaagcgatgctcggcctgcgcaaaataatctggctgccgggcatcaaaggccgggacatcaccgacgcccacgtcgatttttacgcccgcttcgtgcggccgggcgtggtggtggccaacctggacaccgatccggcctcttatgaccatgcggttacccagcaacatctggcgatcctcaaggcggcgaccgacgccgacggccgccggctgcaggtgcatacgctttcgccgccgctggcgccgcgcgacagccgattcagccgcaacaacccggattttgcggcgggttacatcaactatttcgtcatcaacggcgcggtgatcgccccggagtttggcgatccgcaggcggatcgggcggcgtttgcgctgctgacggcgctctatccgcagcgcaaggtggtgcagctggagatcgacgccatcgcggccggcggcggcggcattcactgcgtgaccagccaactgccaaggcacggtcggtaa

SEQ ID NO: 423913 - DNA, 681 bp, Serratia marcescens
atgaccgattcaccctcgaccattcccacctggtatcgcgatccgcgcgcggaagaggctatggccgatggccatgcgcccatctggcgccatcttatcggcctggtgccggaaaacgaactgtccggcgtgaaggtgctggatttcggctgcaatcagggcggttttctgcgcctgctgtaccagctccgcccatttcagcaggggcttggcgttgatatcgctcgccggtccgtcgatgaagccaaccggctgaaagggcatctgccggtggtttatcaaaccgatacgcggctgaacggctgggacgaccattttgatatcgccttcagtcatgaagtcatctatctgatcgacgatattgcccagcatgctgccgatatactgcgggtgctgaagccgggcggcgtttactatgcggtgaccggttgccacaccggcaacccgctgtggccgcagtggcgtgaacgggtggctgcagaaacccataccgtggtgcaggatcggtcgctggccgactatgcgcgcattttctccgccgcggggttccaggtctctgcccgcaggctgggcttttccggcttcgtgccctatgagccggacgggtggatgccggatatcgcggcggcaatcgactactattggcacaccaaaacggtgttcaggctggttaaaccctaa

SEQ ID NO: 423914 - DNA, 1143 bp, Serratia marcescens
atgcagaggaaaacgcttttggtgctcgggctgtcgctgttgttggccgcctgcgatgggcaaaacgccggtgcgccagccggcgcgggcgcagaacaggaggtcggcgtggtcacgctgcgcggccagtcagtgaccctgagcagcgagttgaccggccgggtcaacgccaccatgacctctgacgtgcggccgcaggtcgacggcatcatcaagcagcggctgtttactgaaggggccgaggtcaaggccgggcaggtattgtatcaaattgaccctgccagctatcaggccagctacgatcaggccgcggcccagctgaaaaacgcccaggccacggtgcaatccacccggctcaaatcgcagcgctatgcggcgctggtgaaagagaacggcgtttctcagcaggatgcggacgatgccaaagccgcctatctggcggccgtggcgtcggtggcccaatatcaggcggcgctggagacggcgcgcatcaacctcgcctatacccaggtgcgggcgccgatcgccgggcgtatcggcatctcgtcggtgacgccgggcgcgctggtcaccgccagccaaagcgatgcgttagccaccatccgcgcgctcgacccgatctatgtcgatctgacccagtccagcgcccaactgcttaaactgcggcgccagcaggcggcgttacagcgcgtcgcggtcacgccggtcgccatcaagctggaggacggcacgccttatgctcacgccggcaagctcgagctgaccgaggtggcggtggacgaagccaccggctcggtcacgctgcgcgcggtgttccccaaccccgaacatgaattgttgcccggcatgtatgtccacgccacggtggcaaacggcgtcgatcccaaagccattctggcgccgcagcagggcataacccgcaacgccaaaggggaagccaccgcgttggtggtggacgagcaaaacaaagtggcgcagcgcaccgtcagcgccgaacgggtggtgggcagcaattggctgatcggcagcgggctgaacgaaggcgatcgcctgatcgtcgaaggcaccagcaaggtgacgatcggcgccgcggtgaagccggttgaggtttcggtcgacaaaacccaacgcggggagcagtga

SEQ ID NO: 423915 - DNA, 3138 bp, Serratia marcescens
atggcgcagttctttatccggcggccggtattcgcctgggtgatcgccatcatcatcatgctgtgcggcctgatgtcgatcaactcgttgcccgtttcgcagtacccggacgtctcaccgccgcagatttccatctccgccacctacccgggcgcagacgcggaaacgctggaaaacagcgtcacgcaggtgattgagcagcagctcaccggcctggacggcctgctgtatttttcttcgaccagcagctccagcggctcggtcagcatcaacgtcacctttgatcagggcaccgatccggatatcgctcaggtgcaggtgcaaaacaaggtgcagcaggcggaaagccgtttgccgagtgcggttaccgcgcagggcgtgacggtcaagaaatcccagagcagcttcttgctgatcgtcgggctgtatgacgaaagcgacaaggcgacgatggccgatatctccgactatctggttagcaacctgcaggatccgctgtcgcgcatcgagggcgtgggggacgtgcaggtgttcggctcggaatacgcgatgcgcatctggctggatccgaccaagctggcgagctatgcgctgatgccttccgacgtgcagacggcgatcgaagcgcaaaacacccaggtgtccgccggcaagatcggcgatctgccggccgccgccgatcagcagctgaccgccacggtaaaggcgcagtcgcggctgcaaacgccggaacagtttcgcaatatcatcctgaaaagcgacagcagcggcgcgctggtgcggctgggcgacgtggcgcgaattgagctgggcaacgaggactactctgccagcgcgcacctcaacggccacccggcggcggggatcgcggtcaagctggcggcgggcgccaacgccctcaacaccgccaagctggtgaaggccaaggtggcggaataccaaagcgcgatgccgcagggctacaaggtggcctacccgaaagacagcaccgactttatcaatatctcgatcgaggaggtggtgaaaacgctgttcgaagcggtggcgttagtggtggtggtgatgttcgtgttcctgcaaaacctgcgtaccacgctgatcccgaccatcaccgtgccggtagtgttgctgggcaccttcggcgtgctggcggcgttcggctattcaatcaataccctgacgctgttcggcatggtgttggcgatcgggctgttggtggacgacgccatcgtggtggtggaaaacgtcgagcgcgtgatgcgggaggataagctgccgccgcgcgaggcgacggagaaatcgatgcgtgaaatcaccggcgcattggtcggcattgcgctggtgctgtcggcggtgtttctgccgatggcgttcttcggcggctccaccggggtgatctatcgccagttttcgatcaccgtcgtctcctcgatggtgctgtcggtggtgctggcgttgacgctggcgccggccttgtgcgccacgctgctgaaaccggcgcacgacgcgcagaccgacaagggctggctgggcaaattcaaccgcggctatgaccggctgcaggagaagtacgccgacaaggtcggcggggtgatccaccggccgacgcgctatctgctgctgtacggcctgctgttgatcgccgccgccgtgatgtacctgcgcttgccgaccggctttctgcccaacgaggatcagggcacggtgatggtgcagtacaccttgccggccggcgccaccaacgcgcgcacctcggcggtgagcgaggcggtgaccgcctatttcctcgaccaggaaaaggccaacgtcagcaccatttttaccattaacggtttcggtttcagcggcagcgggcaaaacgccggcatggcgttcgtcagcctcaaagactggagccagcgcagcggcagcgcgaacaccgccgacgccatcgccaaacgcgccatggcgcacttcgccacgctgcgcgacgcccaggtcttctccatgagcccgccggcgatcgacggtttcggccagtccgacggcttcaccttcgagctgcaggccaaaggggcgaccacccgcgccgagctgcaggcgatgcgcgaccagatcgttgccgcggccgccggcaatccatcgctgctggcggtgcgcgccaacaccttgccggataccccgcagctgcaggtggagatcgacaacggcaaactgcaggcgctcggcctgagcgccgccgacgtcaacagcaccctcagcagcgcgttcggcagcacctacatcaacgactttatcgatcgcaaccgggtgaaaaaagtctatatgcagggcgatgtgcagtaccgcgccaagccggaagatctcgaccgctggtttgtgcgcggcaccaacgcgtcgggcgccagcagcatgacgccgttctccgccttcgcgtcttcgcactggatctacgggccggaaaacctgtcgcgctataacgggctgtcgtcgttcgagatcatcgggcagggcgccaccggcgtcagctccggtacggcgatgagcgagatggagaagttggcggcaacattctccgccggcagcagctactcctggagcgggctgtcctatcaggagcggctgaccagcggccaggcgtcgtcgctgtacgccatttcgctgatcgtggtgttcctgtgcctggcggcgctgtatgagagctggtcgattccgttcgcggtgatgttggtggtgccgatgggcgtggtgggatcgctgctggcgatcaccctgcgcgggctggaaaacgacatctacttccaggtggcgctgctcaccatcatcggcctgtcggcgaagaacgccattttgatcgtcgagttcgccgaggagatgcaccagcggggcgaaacgctgattggcgcggcggtccacgcggcgcgcatgcgcctgcggccgatcctgatgacctcgctggcgtttaccgccggggtgctgccgctggcggtatccagcggcgccggcgccaacagccgcatcgccatcggtaccggcatcatcggcggcaccatcaccgccaccgcattggcgatctttttcgtcccgctgttttatgtgttggtgcgccgcatgtttacccgtcggcccgccaacccgccgtcacaggcaggagaataa

SEQ ID NO: 423916 - DNA, 1443 bp, Serratia marcescens
gtgttgcaacgagtcatgatgttaactttaccgctgctgctgaccggctgtctgtcgctggatccgcactaccagcgcccggcggcgccggtgcccgccaacctgccgcagggcgaggccggcggcaaccgggcgctgagctacccggacgtcgcctggcgcgactatgtccaggacgcccggctgcgccaggtggtggcgctggggctgaacagcagccgcgatctgcgcgaggcgatcgccaatatcgcgtcggcgcgcgccctgtacggcgagcagcgctcggcgctgttcccgacaatcaatgccaccgccgacggcagccgcgggcgggcactgaccggcagcggcaacgccaccgcgctgagccaaagctacgaagctgcggccggcgtcagcgcattcgagttggatctgttcggcaaaaacgccagcctgtcgcgcgcggcgttcgaaacctatctggcgaactcggaggcggcgaaaagcactcgcctgacgctgatcgccgatatcgtcaccgactgggtggcggtggcggccgagcgcagcaatctggcggtggcgcagcagacgatggcgagcgccaaacggtcgctggacgtcacgcgcaacaatcaacagcacgggattgcgtcgctggttgacgtggcgtcggcggaaaccgtctatcagcaggcgcgatcggacgccgccagctacgctaccagcgccgcgcaggcgaaaaacgcgctggatttggcggtggggcaaagcgtgccggaaagcctgctgccgagcggcatcgaggcgctcggcgggatcatgcgcgatctgccggccggcgtctcttcgcaagtgttgctgaagcggccggacgtgctgcaggccgagcataacctgaaatccgccaacgccaatatcggctcggcgcgggcggcgttcttcccgtcgatcagcctgaccgccagcggcggggtgggcagcggtgaactctcctcgttgttcagccacggcgccggcgtctggtcgtttgcaccgagcatcagcctgccgatcttcagcggcggctataacacggctcagttgaactacacccaggcgcagaaagacctgtatgttgccacttatgagaaagcggtgcagacggcatttcaggaaaccgccgacgcgctggcgcgcaaggccacgctgcaggaacagctggcggcgcagaccggctatgtggcggcggcgcagcaatattatcgcctggccgagctgcgttaccgccagggcgttgacagctacctgacgctgctggacgcgcagcgcacgctgtacacggcgcagcaggcgctgatcgccgcgcagcagaccgcgtatgacaatcaggccaccctgtataaagtgttgggcggcggcgttgccgccgagcggcagggggacggcgtcatcgccgacaagacgacgctcagccgctaa

SEQ ID NO: 423917 - DNA, 360 bp, Serratia marcescens
atggcagaagacattcagcaacaggtcatcgcgcttatcgccgccttcaacgcatcagggcggctgaagaagggcgtggtcatcaccccggaaaccgagatcaacaccgcgctcaacctgtcgttcagcgattccaatacgctgatgcgccgctacttcgataccttcggcgtcgacagcggcaactataaccacgagctgtatttccagccgccgaccaacaccggccgctggttttccccctccgcctgcaaagaacacccccggccgctgtgcgtgtcgatgctggtgcgttccgcgcgcgccaaacgctggctgtacgatatccactttcttatcgaacagctgcgccaggcctga

SEQ ID NO: 423918 - DNA, 201 bp, Serratia marcescens
atgattcgttttcatattccagccatgacctgcggcggctgcgccagttccgtcacccgggcgttgctgaacgttgacccgcaggcgcgtattcaaaccgatccggccaggcgggaagtgctcatcgacagtgcgttgcacagcgatgccttcggcgccgcgctggacgaagccggttttcctccggccgagccggattaa

SEQ ID NO: 423919 - DNA, 471 bp, Serratia marcescens
atgaacatcggacaagcagcccggttatccggcgtttcggcgaagatgattcgctattacgagcaaataggcctgatcccgagagcggctcgctccgatgcgggataccgccactacggcatgtcggacgtgcatggcctgcgttttatccggcgctcacgcgacctgggtttttccgttgagcagatatctgcgttgctgatgctgtggcacgaccgcgaacgcgccagcgccgatgttaaagccgtagcgctatcccatatcgccgtgctgaaagccaagattgcgcaactgcagacgatggcgcaaacgctggaacgccttgccggccattgccacggcaatacgcgccccgactgccctattctggcaggtttagcgcaaccggtggcgctcatcgcgccgcgccaaacgccgcatttcggagtgatgcgcgagccgaaaccacgacgaccgcgtgaatcgtcataa

SEQ ID NO: 423920 - DNA, 2556 bp, Serratia marcescens
atgaattcatccaatgccaacttcccccagccttcgtccgcgcgtctgagtctgccggttgaaggcatgacctgcgcctcctgcgtcggtcgcgtcgagcgggccttgacggcggttcccggcgtgcaggcggcaacggtcaatctcgccaccgaacgcgccgacatcacgtttaccggccaggcgaatccgcaggcggcggcccgcgccatcgaaggcgccggctataccgtgcgagaagaaaccactgagctggcgatcgaaaatatgacctgcgcctcctgtgtcgggcgggtggagaaagcgttgagccaggtcgccggcgttaccgaagccaatgtcaatctggcgaccgaacgcgcgcgggtgcgctatctggccggcaccgtatccctggaagacctcgccgctgccgtcacccgcgccggttatacgcctcgccgcctgacggcggatagccccagcgcggacgaccaggccgccgaacggcgcgaaaatgagtcacgcgcgttgcggcgcgccctgttcggcgccgccctgttcaccctgccggtattcctgttggaaatggggtcgcacctcattcccgccatacatgagtgggtcatggaggggttgggcgtgcagacaagctggtatatccagtttgtcctcaccactttggtcttatttggccccggcctgcgcttcttccgcaaaggcgttcctgcgctgctgcgcggcgcccccgacatgaactcgctggttgcggtcggcacggcggcggcctacggttattcgctggtcgccactttcgcccccggggtgttaccgcagggcaccgccaacgtctatttcgaagccgccgccgtgatcgtcacgctgatcctgctcggacgcgtgctggaggcgcgcgccaaggggcgcacctcacaggccatcaaacggctcgtcggccttcaacccaaggtcgcacgcgttgaacggcatggcgaaacggttgaaatccctctcgaacaggtggttgccggtgatgtggtcttcgtccggccgggggagaaaatcgcggtggatggcgaagttctggaaggcgcgtcttatgtcgatgaaagcatgatcaccggtgaaccggtgccggtcgagaaaaccgtgggggccgatgtggtcggcggaaccatcaacaaaaccggcgcgttcagtttccgggcgacaaaagtcggcgcgaataccgtcctggcgcaaatcattcgattggtggaggaagcgcagggttccaaactgccgattcaggcgttggtcgataaggtgacgatgtggtttgttccggccgtcatggcggcggcggtactgacctttctggtttggctgttcttcgggccgtcgcccgcgctgaccttcgcgctggtgaatgcggtcgccgtgttgattattgcctgcccttgcgccatgggtctggcgacgccaacctctatcatggtcggcaccgggcgcgccgccgagctgggcgtgctgtttcgcaagggcgaagcgttgcaggccctgcgcgatgtaggcgttatcgccctcgacaaaaccggcacgctgaccaaaggccgccccgagttgaccgatctggtgcccgctgacggtttcgaataccacgaagtactggccttggtcgctgcggtcgagacacggtccgaacaccccatcgccgaagctatcgtcgcggcggcaagagagcagaatcttacgctcgccgctgtcgacagtttcgacgctacacccggtttcggcgtaacggcgcgcatcggccaacgccggatctccgttggcgcagatcgcttcatgaccaggctcgggcttgatgtgacacgttttcagcccgtcgccgagcgcctcggcgaccaggggaaaagcccgctttatgccgccattgatggccgtttggctgcggtgatcgcggttgccgatccgattaaggaaacaacgccggaagctatcgctgcgctgcatgcgcttgggctcaaggttgcgatgatcaccggcgacaatgccgcgacggcggcggcgatcgcccggcaattggggattgacgaagtcgcggccgaagtgcttcccgaaggcaaggtggcggcgttgaaatccttccgcaacagcggcgcgaaagtcgccttcgtcggcgacggcatcaacgatgcgccggcactggcggaggcggacgttgggctggctatcggtacgggcaccgatgtggcgatagaagcggccgatgtggtgctgatgtcgggcgacctgcgcggcgtagccaacgccattgcgctcagccaggcgacgatccgcaacatcaagcagaacctgttttgggccttcgcctataacgccgtcctgatcccagtggcagccggcgcgctttatcccctgaacggcacgctgctttcgcctattttcgccgcggccgcgatggcgctttccagcgttttcgtccttggcaatgcactgcggctcaaacgtttccaggcgccgatggccgtcgagagccgcgctgaagcggcggcggcaaccgcgccacccggcggaatatcggcatcatcgtaa

SEQ ID NO: 423921 - DNA, 1479 bp, Serratia marcescens
atgaaaaatcttcgtagaaccttgttattgccgctgagcgcgctcgccttgctaaccggatgtgcggcggtgggccccgattactcgccgcctgtcgcccgtcaccctgccggcttcggccaaccaccggcggggctgagtgccggaaatgtcgaactcgcctggtggcgcctctttgacgatcctgctctcacggatttggttcagcgcgcgttggcggcgaaccatgatgtcggcatcgccgtcgcccgagtagacgaagccagagccctgttgcgtgaacaacggcaggatttcctgccgcgcgccagtgccacgctgagttatgagactcgtcgactgggtgaagcggagaggctggccgcccagccacgccatacgcaaacctatcgcggtgcgattgattcgacatgggaaatcgatctctttggacacgttcggcgctcgattgaggccgcgcaggcgctggcgggaagccgcgaagcgttgctgcgtggcgttcaggcgggcgtcgctgcggaagtggccgccacctggctagaactgcgaggtttagacgccgaacttaagatggtcgccgaaattagccacagccagcgtgaaagtttggtgctggtaaaaaaacaaatgagcgccggcgccgccagcgaattcgaccgattgcgcgccgaggcgctattgcgcaacgtcgaagcggcgacgccagagctggaacgccgccgagccgccgccgtcaacgcattggcgacgctgcttgccgaaatgccccagacattccgccccccttccgccgaatggggaagccagccgccagtgctgcggacgatcgccgtgggcacgcccggcgccctgctcgcccggcgcgccgacattgtggcggctgaacgggaacttgcggcagccaccgccatgattggcgtggaaacggcggcgctctacccgcgcatcgaagcgcgaggttcgatcgggctggtcgccggcaacctcgatgcgctgactggcgccggtgcgttctccggtgtgatcagcccagtgattcgctgggcatttctcgatatcgggcgcgtacgcgcccggatcgccgccagcgaggcgcgaacacaacaggcactgttgatttacgagcggacggtgctgagcgcgctgcgcgaaacggacgatgctttcaaaacctatgctgaggcggtcagcacgttggatctgcggttacttgaggcggcggcgaatcgcgaagcggcccggctcgcccagacgcgttttgccgcgggcgaaggcatttatctggaggtgctcgaggcagaacgggccgacttcgccagtcggcgcgcattgacgcaggccggcacgcgtcagcggcttgccgtggtgggcatctacaaagcgctcggcggcggctgggagacgtgcgcggcggcaaaaaacgattgccgtggcgcgaccggttcgttcatgacggcaaaaatcggcgatgaaccttga

SEQ ID NO: 423922 - DNA, 3153 bp, Serratia marcescens
atgactttccctcgtttcttcattaaacgcccgatcttcgccatcgtgctctccatcttgacgctgatcgccggcaccgtggcgttattccagttgccgctcagcgaataccctgcggttacgccgcctaccgtacaagtgacggcgtcttatcccggcgccaacccgaaagtgatcgcggaaacggtggccgcaccgcttgagcaagccatcaccggcgtcgaaggcatgctttacatgtcttcacaggcggcgaccgacggccgaatgacgttgaccgtcacctttgcccagggaacgaatgccgacatggcgcagatccaggtgcaaaatcgggtcgcgcgcgcgttaccccgcttgcctgcagaggtacagcaccagggcgtggtgacgcagaaaacctcgccggacatcctgatggtggtgcatctcctgtcgcctgaccaacgctacgatccgctttatatctcgaattacgcttatctgcaggttcgtgatgaactgtcccgcattccgggcgtcagcgatgtccaggtctggggagccggcgaatacagcatgcggctctggctggatccggatctgatcgccgcgcgcgggctaaccgccggcgatgtgatcgctgcggtgcgcgagcaaaacgttcaggtggcggccggttccgtcggtcaggcgcccgattccaatgccgcatttcaggttacggtcaataccctcggccgtctggccgatgagaaacagtttggcgatatcatcatccgcaccggcagcgacggccgggtgacccgcttgcgcgacgtcgcccgtatagaaatgggcgccgatgcgtatgcgctgcgcagcctgctcgacggcgagccggccgtcgcgctgcaaatcattcagagcccgggcgccaacgcgctggacgtcgctcaggcggtcagagcgaccgtcaagcgcctggagggcaactttcctgccggactcagttcacggatcgcctacgatcccacggttttcgtgcgggcatcgctcgagtcggttgtgacgaccctgctggaggcgatcctgctggtggtgatcgtggtagtggtgttcctgcgcagctggcgagcctcgctgattccgctgctcgcggtgccggtttcgctggtcggcacgttcgccatcatgtacttgatgggcttctctctcaatacgctgtccctgttcggtttggtattgtctatcggcatcgtcgtcgatgacgcgatcgtggtggtggaaaacgtcgaacgacacatcgaaaacggcaaaacgccgcagcaagccgcgcgactcgccatggatgaagtcaccgggccgatcgtcgccatcacctcggtgctggccgcggttttcgttccaacagcgttcctgagcggtttacagggcgagttttaccggcagttcgcgctgaccatcgccatttcaaccctgctgtcggcgctcaattcgcttacgctcagcccggcgctggcgggcatgttgctgcggcctcatccggcgaaacctcgcgctcctggccgcattgggcgcgtcttgcaagccgctgtccggcctttccaacgcgcgccggacgcgtatgccaatgccgtgcgtaaaacggtgcgcgtccgcgggatggcgctggctatttacggcgggctgctcgttctgacgtttttcagcttccaggccgttccgccgggcttcgtgcccatgcaggataagtactatctggtgggcatcgcccaactgcccaattcggcctcgctggatcgcaccgatgcggtcgttaaacagatgtcgaagatcgcgctggcggaacccggggtggaaagcgtcgtggcctttccggggctgtcgattaacggcttcgtcaatgtgccgaacgccgccgtgatgttcgtcatgctcgatccgtttaaagatcgcgccacgcccgacctggccgcctccgccatagccggtcggctgcaggcgaaattcgccgacattcccgatggtttcctcggcgtatttccgccaccgcccgttcccggtctcggcgctaccggcggattcaagatgcaggtggaggatcgcagcggcgcggggctcgagtccctggttgagcacacgcggatcctgatgatgaaagccaccgaatcgggccaggtcgccggtctgatgaccagtctggatatcaacgcgccgcagctggatgtggttatcgaccgcactcaggcgcaaagtcagggtgtcagcctggcggatgtgttcgagtcgctgcaaatctacctcggctcgctttacatcaacgatttcaaccgattcggccgcacctacaaagtcaccgctcaggccgatgccgcccatcgcatgcaggccgaagctatcggccggctgcaggtgcgcaacgcggccggcgacatgctgccgctgtcttcctttgtcaccgttacgcccggctccggcccggatcgcatcattcgttacaacggctatccatcggctgatatctcgggcggtgcggcgatgggcgtcagttccggtcaggcggctgcattgatggagcgcttggcgaaagagacgctgccggaaggcatgaccgtcgaatggaccgatctcacctatcagcaaaagctcgcgggcgacgcagcgctgttcatttttccgctgtgcgtgctgctcgcctatctcattctggccacgcaatacaacagctggctactgcctttggccgtgctgctgatcgtgccgatgtgtctgttgagcgccatgattggcgtctggctgctgggcggcgacaacaacgttttcgtgcaaataggcctcattgtgctggtcggcctggccgccaaaaacgccattctgatcgtcgagttcgcccgcagcctggaggatgaaggcgccaacgcgctcgaggcggtgattaaggcctgcaggctgcgattaagaccgatagtgatgacttcaatcgcgtttatcgccggcgtcattccgttgatcttcgccagcggcgcgggggcggaaatgcgccatgccatgggggtggcggtcttcgccggcatgctgggcgtgaccttgttcggcctgttcctgacgccggtcttttatgtcgtgattcgcggcctggcgacccgattcgagcaatatcgtgccaaagccagccgtaaggagcgagtctga

SEQ ID NO: 423923 - DNA, 1161 bp, Serratia marcescens
atgatgaaagccaaaaccataatcctgatcgcagcggcgataaacggcgctttcgccgttgccggctgcaaagaaaacccgtcttcggcgacacctgcgccgcctccccgtgttcctgtggctgatgttttagtccgcccgataacgccctttgccgaattcaccggttcgctggccgcggtcaagcacgttgagttgcggcctcgggtcgccggttatgtgctggcggtaaatgtgccggaaggtcgcctgatagaaaaaggccacccgctctttctcatcgatccgcggccatttcaagccgcgctgaacgaggcgacggcgcgtttgcaagaagcggaagccgcctcaacgctagcccaggccgactatgtgcgagctaagacgttgttcaataaaaacgttatcgcccgcgatcggtttgattcggccaccgccatgatgaaagcgagcaatgcgcaggtcaacgcagcgaaagcggcgcgggaggcggcaaagttggatctggagttcacccgcgtcaccgcgccgattgccggacgcgtaggccagacgctcgtcaccgaaggcaactatgtcaccggcggcgtcacgccgctcaccatgctggtctcggtcgatccactccacgtctatttcgatgtggatgaacgcacctatttgcaatcgttgaccgcgtggcgcaataaaacggcgccacctgacattcgggtatcggtggcgttacttgcagacaaaacctattcccggcgcgggcgcgtcgatttccagtccaataccgccgaccgcacgacggggacggtgcgcctgcgcgcggtgatcgataacccggatgggcgactgtcacctgggttgttcgccagagtcaagctggaaaccggcgcgccgcaggccaagatcctgatcgccgaccaatcgattggcaccgatcaaaaccggcgctatgtcctggtcgtcgatgagaatgacaaaaccgaataccgccccgttgaacttggcccggtcgttgaaggactgcgcgtgatagagcacggcctgcggccgggagaacgcatcgtcgtgaaagggctggtgcgccccggcatgtcaatcacgccgcagcccgccgagattgacggcgcgcctatcgagcaattgaacgctgcgggagacgcgacatga

SEQ ID NO: 423924 - DNA, 570 bp, Serratia marcescens
atgagcaagaaaaagatcctgatgctggtcggtgactatgccgaagattacgaaaccatggtgccgtttcaggcgttgcagatgatcggccattgggtggacgccgtgtgccccggcaaagccgtcggcgactacatcatgaccgcgatccacgattttgacggcgcgcaaacctacagcgagaaacccggccaccgtttcaccctgaacgccgacttcgccaccgccaaagaagagcactacgatgcgctcttgatccccggcggccgggcgccggaatacctgcgcctgaatcccgacgtgatcgcgctggtgcaggcgtttgacgctgcgaaaaaaccgatcgccgccgtttgccacggcccgcagctgctggcggcggccggggtgttgcaaggccgcacctgcagcgcctacccggcctgtgcgccggaggtgcggctgggcggcggccattatgcggagatcggcatcgatcaggcgcacgtcgacggcaatttggtcaccgccccggcctggccggcgcatccgcagtggctggcgaagttcgtcgaggtgctgcagaaatag

SEQ ID NO: 423925 - DNA, 1539 bp, Serratia marcescens
atgctgaatctggctaccttgcttgaagagagtgcgcgcacctggccggaacggccggcggtgatacagaacgatgtaccgctcagctatcgggcgctgaacgacatggccaaccgggtggcaaatctgttggtcgcgcgcggcgtgcggcgcggtgaacgggtggcgctggcctgcccgaaccggccggagtttccggctgtctattacggcattctcaaaagcggcgcggtggtggtgccgctcaatattctgcttaagagcgcggagttcgactattacctggcggattcggcggcggtggcgctgttttgtttcgaaggcagcagcggcctgccgctgggggaggaagcgctgcgggcggcggcgaaggcggagcagtgccgtgaggtgtttatcatcggcgatcggttgccgctcgagggggagcgtttcagcgcggcgatagccgcacaggctaccgaattcgcttcggccgcgacgctcgaaagcgacaccgcggtggtgctgtataccagcggcaccaccggccgcgccaaaggggcggagttgacccacgccaatctggtgcttaacgccttgggatcggtgcggttgttcgacggttcggagacgacccccgatcgtcacctggtcaccttgccgctgtttcatactttcggctcgacggtgcagatgaacgccgggttcgccgccgccgccactctggtgctggtcgagcgcttcgacgccgcgcaggccatcgcgctgatgcaacggcacggcatcacctttttcgccggggtgccgaccatgtattgggcgctgttgaatgcgctggatgaacacacggatatcgaaagcttgcgcagcacgctgcgtatggcggtgtccggcggcgccagcctgccggtgcagatcctggaggatttttcgcgccgcttcggcgtcaacattctcgaagggtatgggctctctgagaccagcccggtcgccacctttaaccatccccatcgggtaaccaaacccggctccatcggccaaccgatctggggcgtggaggtgcgcctgctcgacgccaccgggcagccggtcgacgctgtcgatcaggtgggggagatcgcggtgcgcggctacaacatcatgaaaggctatctgaatcgccccgaggcgacggcggaggtgctggaaaacggctggttccgcaccggcgatctggcgcgccgcgacgccgacggcttctatttcatcgtcgatcgggccaaggacatgatcattcgcggcgggttcaacgtctacccgcgcgagattgaagaggcgctgattcgccacccggcggtgtcgttggtggcggtgatcggcgtcgaacatccgtcgctgggcgaagagatcaaagcggtagtggtgttgaaagagacggaggagccgatcgaggaagaaacgctgatcgcctggagccgggaacggctggcggcgtacaagtatccgcgcatcgtcgagttcgtcgagcgtttgccgatgaccagcaccggtaaggtgttgaagcgctgtttgcgctga

SEQ ID NO: 423926 - DNA, 1275 bp, Serratia marcescens
atggaaaagctatcctacgcttcagacagcagcaccaccgcttgggctacatatctgcaacaaatcgatcgcgtcgccccttacctcggcgagctgtcacgctgggttgatacgctgcgtcaccctaagcgcgctttgattgtcgatatcccgctgcagatggacgatggcaccatccgtcacttcgaaggtttccgcgtacagcacaacctgtcgcgtgggccgggcaaaggcggtatccgcttccaccctgacgtcgatctgaacgaagtgatggctctgtccgcctggatgaccatcaagtgtgccgcggtcaacctgccgtacggcggcgccaagggcggcatccgcgtcgacccgttcaaactgtctgaaggcgaactggagcgactgacccgccgctataccagcgaaatcggcttcattatcgggccacagaaagacatccctgcgccggacgtcggcaccaacgccaaagtgatggcctggatgatggacacctactccatgaaccacggcaccaccatcaccggcgtggtcaccggcaagccaatccacctcggcggctccctgggccgtgagaaagcgaccggccgcggcgtgttcgtcaccggcagtgaagtggccaagcgtctgggcgtgcagatcgaaggcgccaaagtggcggtgcaaggcttcggtaacgtgggcagcgaagctgctcgcctgttcgttggcgtcggcgcgcgcgtcgtcaccatccaggaccactccgccaccctgtttaacgccgacggcatcgacctggccgcgctgaccgaataccaggccaagcacaagcagatcgccggcttccctggcgccagcgagatcgaaagcgaagcgttctggtcggtcgacatggacatcctgatccctgcggcgctggaaggccaaatcacccgtgagcgtgccgaaatcctcagcgccaaactggtgctggaaggcgctaacggcccgaccttcccagaggcggacgacattctgcgctcccgtaacatcaccgtggttccggacgttatctgtaacgccggcggcgtaacggtcagttacttcgagtgggtgcaggacatggcgagctacttctggagcgagtccgagatcaacgagcgtatggacaagatcatgaccgacgccatggtccacgtctggaacaaggccgcagagaaagagtgcagcctgcgcaccgccgcttatatcgtggcctgtgagcgcatcctgaccgcacgtaaagagcgcggcatctacccaggttga

SEQ ID NO: 423927 - DNA, 621 bp, Serratia marcescens
gtgccgaactcttcttctcaactcgaacttttgcgctcggtcgccgacggcatcgcggcgctgttttttccgaatgcggaagtggtgatccacgatctggccaccaacaagattgcctatctggccaacaacctgtcgaagcgcaaaccgggcgatgacgccgggctggaggacttcgagcttgatggcggcgccggcgtgaccggcccctatgagaagctgaactgggacggcaaaaagatgcgttccgtgagcatcgccgcgcgcgacgagcagggcaagcccagctatctgctgtgcatcaacctgagcaccgcgatgttcgaggacgcccgcaacgcgctggacatgttcctgtcggtcacgcggctgcagccacagccccaacagctgttcaaagacgactggcaggagaagatcaacaccttcctgcacgactggctgcggcgcgaaaacgccgcgctcggcgcgctgagccgcgaacagaaacggcggctggtcagcgatctctatcatcagggggcgttcaaggccaaaagcgccgcggactacatcgccaacgtactgtcgatggggcgcgccacggtgtacaagcacttgcgagaattgaagcaggagtaa

SEQ ID NO: 423928 - DNA, 2190 bp, Serratia marcescens
atgaagattaaaaacaaagggatagacaattcgaatgcggaagcgacggccgccaagcggttgttgctgggctcggcgctggccttactgcccttcgcgccacacgcgtccgccgcggcggacgagacgattttggtgaccgccgacgcgcaaaacagcgtgaccgcgccggtcaaagggatcgtcgccaaagagagcgccgccggcaccaagaccgccgccgctctgcgcaaaacgccgcagtccatctcggtggtcacgcgcgagcaaatgaacgaccaggaaccggcgtcggtcgccgacgcgctgaattacaccagcggagtgatcaccacctaccgcggtaactccaaccgcaatgacgaagtgatcagccgcggcttccgctatgcgcccaagctgctcgacggcctgcactttggcctctcgagccaaaacggcggcgccgggcagatcgatccctggctgctggagcgcgtggagatggtgcacggcccggccggcgtgctgtacggccaggtcagccccggcggcgtggtggtgatgaccagcaagcgccctaccgcccagagcattcacgaagtcaaattcagcaccggcaaccgccatctggcggaaacggcgttcgatttcggcggcaaactcaatgacgacaacaccctgttttatcgcctgaacggtatcgccagaaccgagcatgagttcgtcaaagacagcaagcagcaacgggtggccatcgcgccggcctttacctggctgccgaacgaagacaccagctttacgttgctgaccagctaccagaacgatccgaaagccgggtcgcgcaacttcctgccgcgcgccggcacgctgttctcgaccagcgcgggctatgtgccctatgacttcaacatcagcgaacccagcttcaacagatcgcggcgcgagcaggcgtcgatcggctacagcctcgagcataacttcagcgatgcgctgtcgtttacccagaacctgcgcttcacccaccgcgatgaagactataaatatctggtttataacgtaaactcgaaggtcaacgaccacaccgtcacccgcatggcgcagcatgaaacgcagatgaccaacgagtttggcgtggataaccagctgaaggggctgttcgacaccggcgaggtgaagcacacggtgctgggcgggttggattaccgctacagccatatcgattcgaagatgtatcgcgatcgcggcaacgactacccgatcgactgggcaaacccggttcgccccagcatcgatggcagcacgctggcgctggcttccagcgacttgaagacgctgaatcaggtcggggtgtatctgcaggaccagctggagtggaataactggaacctgctgctgtccggccgtcaggactggtcgcaggtcaacacccgcgatcgcaccagcggcggtaaggagcagacctacaatgacgcccagttcaccggccgtgcgggcctgctttacgccttcgacaacggcatttcgccgtatgtcagctacagcacttcgttcgatcctaacctgtatccgagcgcgccgggcgccgatccgctcaagccgaccaccggcaaacaaaccgaggtgggcgtgaagtaccagatcccgggcggcaacaccctgctgaccctctcctggttcgacattacccagcgtaatgtggcgtcttacaaccgtctcacctccgcctacgagcagatcggcgaggtgaaatccaaagggattgaggcggaagtacatgcccagccgacgccggagatcaagctgaccgccgcctatacctacaccgacgtggtgaccaaagactccaactcggcggacgaaatcggccacagcccggcgggcatcccgcgtcacgcggcttccgcctggggcagctacagcttcctgagcggcgcgctgaacggcctgaccgtcggcagcggcgtgcgttacatcggcgatgcgccggccgacgccatcggccagtacgatgtgccgcactacacgctgtacgacgccatggtgaaatatgaccttggccaggcctcgtcggcgctgcgcggtgcggctctccagctcaacgtgcagaacctgacggacaagaaatacgtttcatcctgcagcggcgagtacgcctgtttctatggcagcggccgcagcatcatcgcttcagtcaactaccgctggtaa

SEQ ID NO: 423929 - DNA, 1308 bp, Serratia marcescens
atggagtttttgccggaaaagaggccagacaacggtcatgagggattggcagcgcagtggctgcgtgaagaggcggcggggcagcccgagtggtggcagaaggtggcctctcacggcacgcccatcgtcgagccgcacgatgaccgccacatcaaaatgacctggctatggcgcgatcctgccggcgatgaacggcgctcgccgattcgccgcgtttatgccgatatcaacggcataaccgatcaccacagcacgtcccccagcagcctgaccaggctgcccggcaccgacgtttggtacggcgcggccgttatcgatcgccgctggcgcggcagctacagcctgatccccgtcacagaccgggatcttcctcccgtcttcagcggcgacgaaacgctgcgcgatcgccagcagcgcgcctggtggatttcgctgtttccactggcgatcgccgatccgttgaatcgcctctcgctggggccttcgcatcgtccgcgcccggtttccctggcccaggggccggatgccgacgaccaaagcgcctggcaggccgccgatcggccgctggacgaggcgcggctacagcgttttcagtggcacagcgaacggctcggcacgcagcggcgcgtctggctgtatgccagcggcgacgcggcggtgaaagcgaatcgcccgctggtgttattgctcgacggccaaaactggatcgaaaggcacgcgctgctgccggtgatcgagaacgaaaccgcaacagggcggctgccgcccgcatgctggctgctgatcgatgcgatcgacggcgaacaccgggaaaacgagctgccctgcaacgccgccttctggcaggcaatcatcgatgagctgttgccgcaggcgcagaagcgcgaagcgttcagcgaggaaggggcgcgcaccgtcgtcgccggccagagctacggcgggctggcggcgttatatgccggcctgcattggccggcgcgcttcggccacgtgctgagccagtccggctccttctggtggcctacggtgcaattcgttacccagttcgaaaaacgccacgaactggaggaaggctggctgatacgccaggttcggcaacgcgacgcggcggcgccagcgctcaacgtgatccaacaggccggcgatcgggaggcggatatcgaattcgtcaatcgccagatgcacgaggcgctgacggcggcggggcaccgcgccgactaccgcgtgttttccggcggacatgacgcgctctgctggcgcggcggcctggtggacggcgtacgccagctgctttccgggatggaataa

SEQ ID NO: 423930 - DNA, 225 bp, Serratia marcescens
atgactcaggaacaacaaaacccgttcgatgacgaaagcctccgtttctccgttttggtcaacgcgcagcagcagtattcgctgtggccgcagtttgccgacgcgccgcaagggtggcgcgtgctgatggggccggcgtcgcgcggcgaatgcatcgactacatcgaaacgcactggcaggacatgcggccggcggccttgaaagcggcggatgcggcgcgttaa

SEQ ID NO: 423931 - DNA, 8511 bp, Serratia marcescens
atgtcagaaacgctttctttgccggatactcaggtcgagtatcgggattatccgctggttgcggcgcaaccggggatctggatcgccgaccaaatcgcgctgcggcgcaacggcttcgcggtggcgcactacaccgaactgcacggcgctatcgaccgctcggcgctggagcgcgcgatccgtcaggggctggccgaagcggatacggttcaggcgcagttctttgaggcgcaggacggccagccggtgcagcgtttgccgctgaacgccgatcctgcgcgcgtgcaggcgccggagtggttcgatttcagcgcgcggccggacgccgaacaggcggcgctggcgctgatgaacgacgatctggcgcaggatctgccggcggacggcgagcggccgctctatcgccatgcggtgatccgcgtcagcgccgatcgctggttctggtatcagcgctttcatcatttgaccctggacggtttcagcttcgaagccatcacccgtcggatcgccgatatttatcgcgcgctgcgccacgggctggcgccggcggcctcgccgtttaccccgttcggcaaggtggtggaagagtttcagcaatggcaaacctcgcccgcacgtgagcgggcggccgaattctggcgccagcatttgcgcgatttgccgtcgccgctgtcattatcgacggagagtcgggaggttgaagcgggcgcccggccgctcaaacaggcgctggtgctgcctgaatcgctgtttgacgaagcgctgcgcgatggcgcgctgcagtcgctgcagccggccgatatcgtcacggcggcgctggcgctgtatctggcgcgcatgagcggcgaaacccgcttctcagtcggttttcctttcatgcgccggatgggatcgcaggcgctggcggcggtcggcccggtggtcaacgtgctgccgctgctgctgaacgtgacgccggagatgtcgctggcggatgtctgcctggccaccgtggcgcagatcaagcaggcgcgccgccatcaacgctatgaggcggagcagatcaagcgcgatctcggcctggtcggcggccatcaggaactgtacgggccggtggtcaacgtcaaggtctaccacagcgccttgtcgttcgacggtcaggcggccaccacccatacgctggcgatggggccggtcgacgacctggagttcgagatcggttttcgaagcggcgtattgacgctgactttggtcgccaaccaggccaaatactcgccgcgcaccttgcagcaccacgcggagcgcatcggccattggctgcagcagttggcgcggcagccgcaccagccgaacggtcaactggcgttgatcggcgagggggaactcagacaactcgcggcctgggggcgcggcgctgagctgacgccgccggcgggcatggtttcgatcatggatgcgttccagcgccaggttgagcgtcagcccgaggcgttggcggtgtcctgcggcgacgtgcgcctcagctaccggcagctctccgaacgggtgatgcagctggggcgagtgctgatcgaaagcggcatcggcgccgaagacgtggtcgccatcggcattccgcgctcggtggacacgctggtcgcgctgttcggcgtgctggccagcggcgcggcctatatgccactcgatctggactatccgcgtgagcgcctggcgctgatgtgcgacgacgcgcggccggtgatgttgctgacccaccgcgctacgcgggccaacatgccggatctgccgcaggtattgtgcctggatgacgcaccgagcctggcgcgctgcgcggccgccgcggccacgccgataacggacgacgaacggcgtgtgccgctgaacgaggcgcatctcgcctacatgatttacacctcaggctcgaccggcaaacccaagggcgtgatgtccacgcaccgcgggctgctgaacctgttcctgtcgcaccaggcttctctgttcggcccggcgatcgaaaaattcgaggctcgccacgcgcgccgcttgcgcgccggccataccgcctcgttctctttcgattcctcctgggaaccgctgttctgcatgatgatgggcagcgaactggttatcttcgatgaggagctgcgccgcgacccctgggcgctgctggaacagacccagcagacgccgatcgatctgctggacatcacgccgtcgttcttctcgcaactggtggactgcggtctgctgaaagggcagttcccgctgccgtcgttcgtgatgatcggcggcgaggcggcgacgccgacgctgtggaacctgatgcagcagcatccggaggtggagatccacaactattacggcccgtccgaatacaccgtcgataccctcggcgcgccggtgacggccgcagaccagccggtgatcggccgtcccctcgccaatacctcagtctggctgctcgacagccgcctgcagccggtgccgatcggcgcggcgggcgagctgtacatttccggcaagggcatcgcgcgcggttacctgcgccgcccggatctgacggcggcgcgatttgtcgccaacccgttcgccgaaggcgaggtgatgtaccgcagcggcgacctgatgcgctggagcgcggagggccagctggtattcattggccggaccgatcaccaaatcaaggtgcgcggcttccgcgtcgagctgggtgaggtggaaagcgccttggccgccttgccggacgtggggcgggcggtggtgatcgccgaaccgatcggcgccacctatcgcctgattggctactgctcggtgcaggatgacgcgcgtcgcgcctcgccggcgctgcaaagcgagctgctggggcagttggcgcagcgtctgccggattatatggtgccggcgatcctggtggtaatgccggagctgccgctgaacgtcaacggcaagattgaccgccaggcgctgcccaaaccgcaggaaacgctggcgcaaagcattcgcgaaccggccaccgagcaggagaggctgatttgccgcgcgatggcccaactgttgggaatggagcgcgtcggcgccgacgacgatttcttcgcgctcggcggcgacagcatctcggcgatggggctgggcaccgccctgcggcgcaaaggctatctgctgcggccgcgcgagatcttcgcgctgcacacccccgcgcgcatggcgcaggcgatgcagccgctggccgttggctctcagaccgcacgcagcgtgcggcaaggcccgatcgacgggctgccgatcctgcactggttcgccgagacgggcgatatgcatcgccgcttcgcgcacggcgttttcctgcgtgtgcccgccgagctgcaaccggaacagctgcgttatgcgttggcacagctgcgcgcggcgcacccggcactgagcgccaggatccgcgacggccagttggtggtcgaggaagccgctaccgctgagttcatgcaggttcagaccgtatccggcgaactggagctagcggcggaacaggcgtttgatgccgcactcgagcagctcgatccggcggccggcgccatgatgcaggcgatcctgttgcagcgtgacgggcagagcctggggctggtgctggcgatccaccacctggtggtcgacggcgtttcctggcgcatcctgctcgacgagctgcggcaagtggccgacagcgccatgcaggggcagccgatcacgctgccgccggaggaaacctcgctctatgaatggtccgcgcgtttacgggccgacgtcgaacgccgcgaagccgagctgccgttctggcagcagatgctggcggacggcgtgccgcgtttggggcggcgcgcgctggaaccgcagaccgatcgcatcgcctcggtgagcgaacggcgcacgctgctcgacagccagctgaccgccgcgctgctcggcacattgccgcagaactatcgcgcccaggttgaagagatcatgctgtgcgcgctggctcaggcctgccgtcgtcagttccaggccgcttcgctgcgtttctctctggagtcgcacggccgcgccgaactggacgacggcctcgatctggcacgcaccgtcggctggctgacggcggagtacccgctgcgcatcgaactgcatgacgccgagcataatgaggcggtgcgcgcggtgaaacgggcgacgcgcgcggtggccgatcgcggcgtcggctatggccagctgcgttatctgcatccgcagcgtgacgatctggcggcgctggcgcagcgcaacgccccggagattttattcaactaccttgggcgtttcagccaggatgaggcgcactggacgccgcagcgcagccagacccgcttccgcgacgccttcgccgtggcgcaggatgcgcagcaggcgccgtcttacgggctggaagtgaatatctttgtcgaggagcggcgcgacggcgcctgcctggcgattaactggagctggctggagggaattttcagcgagagcgacattgcgcagctgcacagcggcatcgagcacgccgtgcgttcactgtgcgagtttgccgaacggcatcccgaacgcgcggcggcgacgttggtggcggccgaaatcgcccagccgggcgtcgatgatgaagcggtgcgcgcctgggagcgggagtgcgggccgttagccgcggcgctgccgctgttgccgctgcaacacggcctgctgttccatgcgcagacggcgcagcagggcggcagctacaactcgctgacgcgcctgagcctctgcggcgaactggacgcgcatcaacttcagcaggcgctgaatgcggtgatccgccgccatccgcagctggccgcccgattcaaccgcgagggcgagccgctgcagctgatcccgcaggaaagccattggccgctggacagccacgcgctgccgccgctggccgaagaacaggaggtgcaggcactgcaccggctggagcagcaggaactgcagcgcgatctgttcaaccagccgggcgcgatgctgcatgcattgttggtcaaacacggggatagcgaacgctacacgctgttccttaacgcgcatcacctgatcgtcgacggctggtcgacgccggtggtgctcaacgatctgatgctggctctgcgtgaaggcgagcaggcgttgccgccgctgcgttcgaactatgccgatatcgtgcgccgcctgaccgcgcgggatgccgaagcttcgcgccgcctctggtgccagacgctgcaggacgtgcggccgacgttgctgttcggtgaggcacaggacgatcgcgtacacgagctggagatgacgctgccgccggccgaggaaaggcgcttgctgaccctgtgtcgcgaacgcgggttgacgctcaataccgtgatgcagggcatttgggcattgcagttggccagctgttgcggccagcaggacgtggtgttcggctcgccggtttccggccgctttggccagatagaagggatcgaggaacacgttggcctgttcagcaacacgctgccggtgcgggtgcgtctgcagcacgatcgttcgctgacggaacagctgactgagctgcagcaccggcaaattgaactgctggagcacgacgatttggggttgggggaaattcagcacctggccggggcgggcacgctgttcgatacgctgttggtggtggagaactacccggacaacgacgctctgctgggcggcgcagggtcgctgcgctgcgacgccatccgcaacaaaggctatacccactatccgctgacgctgctggtgctgccgggcgagcgtctgcgcctgctgatggagtaccgcgcctcggtgccgcagcctgagcgcttcgccgcgcggctgatggcgctgttgcagcagtggatcgcccaaccggatttgccgctgccgcgctggcagttgcaaacgccgcaggagcaggcgctgatcgcggcggtcaaccgcaccgggcaggcggtggcggacaccaccttgcatcaggcgatcgccgatcaagcgcggcgcacgccggaacgcatcgcgctgcaggatgccgggcacagcctcagctaccgtgacatgcagcgccaggccgcgctgctggccgagcggctgacagcggccggcattcagccgggggatatcgtcgcggtggcgttgccgcgttccgtgcgcctcagcctggcgctgacggcgattgtgcagaccggcgccgcctggctgccgctggacaccggctacccggacgagcggctggcctacatggtggaggacgccaagccgcggctgattatcaccgagagcgcgttggatgcccgctttgccgcgctggcgccgacgctgctgttcgatgcgctggacgacagcgggcgcgaaccggcagcgcgcctgccggcggggaacggcgattatcccgcctacgtgctgtatacctccggctctaccgggcgaccgaaaggcgtggtggtgaaccaccgggcgatcgtcaaccgcctgttctggatgcagcacgagtatgcgctcgatgcgcaggacgtggtattgcagaaaacgccgtgcagcttcgacgtttccgtctgggaattcttctggccgctgatggtcggcgcgcgcctggtgatggcgccgccggaggcgcaccgcgatccgcaggcgctgacgacgttgatcgacgactatggcgtgaccacgctgcatttcgttccgtccatgttggctatctgggtggaggcgctgaacgagcgggcgccacagcgcgccgccgccagcctgaaacgcgtgttctgcagcggtgaggcgctgtcgtgtgaactggcttcccgctatcaggcgttggttaccgcgccgctgcacaacctgtatggcccgacggaggcagcggtcgatgtcacctaccaaccggcgtccggcgcggcattggcggcggtgagcggcgccggcgtgccgatcggcaaaccggtctggaacacccagttgagcattctcgacgcgatgctgcggccggtgcccgtcggctgcgccggcgatctttacctgcgtggcattcagctggccgatggctatctgcatcggccggggctgacggcacagcggtttgtcgccgatcccgccggcaacggcgcgcgcatgtatcgcaccggcgatatcgcccgctggctggaagacggcagcgtcgagtatttagggcgcagcgacgatcagctgaagatccgcggccagcgcatcgagctgggggaaatcgagcaggcgctgctggcgcagccgggggtagcgcaagcggcggtgcacgccatcgagctgggcgagggcgcgacggggcttggcggcgccgatatgcgccaactggtcgcctggctgatcgcccaaccgggcgtgacgctggataccgccgtgctgcatcaggcgctggagcagcgtttgccggcgcacatgatgccggtcagctatgtcatgaccgacagcttcccgctcagcgccagcggcaagctggatcgcaaggcgttgccgcggccgcagctgagccaccaaagtggccgcatgccacagagcgacagcgaacgcctgctggcggcgctgttcggggaactgttggggcgcgagacggtgtatgccgacgacgacttcttcgcgctgggcggccattcgctgctggcgatgcgtctggcggcggagctgcgtcgccgcgtgcctcggccattgagcgtcgggcagatcatgttcgcccgcagcctggagaagatggcgcacctgctcgatgacgcgcaggcggccaactcggccgagagccgcggcgtcggcgaatgcctgcagctgcgggccggccaaggcccggcgctgttctgcctgcatccggcttccggtttcgcctggcagtactcggggctgagccgttatctgccgggcagctaccccatcatcggcctgcagtcgccaagaccggacggcgccatcgccacctgtgaggatatcgagcagatggtcgatcgtcatctcgccaatctgcgccgcctgcagccgcaggggccttactacctgctgggctattcgctcggcggcacgctggcgcactcgatggccgcgcgcctgcagcagcagggcgaagaggtggcgttcctcggcatgctggatacctatccgccggaaggccaggattggaccggccccagcgaggaggacgcgcagaaagaggtggcgcaggagcaggccgagtttatggcggaagatcatggcgatccggcgctgatggcggagaaggcggcaatgttcgacagcatcgtcgccaactaccgcgacgcggtgcgcattctgtcccaggcgcgcagccggcgtttccacggcacggcgacgctgtttgtcgccgaccagacgctgccgccggagatggacatcgacgccgtgtgggcgccgtatctggatgggctgatctgccatcaccagcgctgcgaacacgcggacattctgtcgccgacttctctggagacgctcgggccgctgttgcattcgttgctgacgcggcaatacgggttggtataa
